United States Patent Application Publication US 2023/0026259 A1 - sequence listing, part 74

SEQ ID NO: 175947 - DNA, 5792 bp, Homo sapiens
  Payload ID: 14544
  Gene Symbol: ARHGEF28
  Gene Name: Rho guanine nucleotide exchange factor (GEF) 28
  Uniprot ID: Q8N1W1
  ENST ID: ENST00000437974
  CDS Start-End: 21-5216
tcattgcagatgcgaaagccatggagttgagctgcagcgaagcacctctttacgggcagatgatgatctatgcgaagtttgacaaaaatgtgtatcttcctgaagatgctgagttttactttacttatgacggatctcatcagcgacatgtcatgattgcagagcgcatcgaggataacgttctccagtccagcgtcccaggccatgggcttcaggagacggtgacggtatctgtgtgcctctgctcggaaggttactctccggtgaccatgggctctggctcagtgacctacgtggacaacatggcttgcaggctggctcgtctgctggtgacgcaggccaatcgcctcacagcctgcagccaccagaccctgctgaccccatttgccttgacggcaggagcactgcctgccttggatgaggagctcgtgctggctctgacccatctggaattgcctctagagtggactgtgttgggaagttcttcacttgaagtatcttctcacagagaatctcttctacacctggctatgagatggggcctggctaaactttcccagttcttcttgtgtctcccggggggagtccaggccttggctttacccaacgaagagggtgccacaccattagacttagctttacgtgaaggacactccaagctggtggaagacgtcacaaattttcagggcagatggtccccaagcttctcccgagtgcagctcagtgaagaagcctccttgcattacattcactcatcggaaacgctgaccctgaccctgaaccacacagccgagcatttgttggaggcagatattaaactcttccggaaatacttttgggatagagcctttcttgtcaaggcctttgagccagaagccaggccagaggaaagaacagctatgccctccagcggtgcagaaactgaagaagagattaagaattcagtgtccagcagatcagcagctgaaaaggaagatataaagcgtgtcaaaagcctggtggttcaacacaatgaacatgaagaccagcacagcctagatttggatcgctccttcgatatcctaaaaaaatccaagccgccctcgacattgcttgctgcaggccggctttcagacatgctgaatggaggtgatgaagtctacgctaactgtatggtgattgatcaggttggtgatttggatatcagctatattaatatagagggaatcactgccactaccagccctgaatccagaggttgcactctgtggcctcagagcagcaaacacacccttcctacagaaaccagtcccagtgtgtacccacttagtgaaaatgtcgaagggacagcacacactgaagcccagcagtccttcatgtcaccatcaagttcgtgtgcttccaacttgaatctttcttttggttggcatggatttgaaaaggaacaaagtcatctaaagaaaagaagttctagccttgatgccttggacgccgacagtgaaggggaagggcattctgagccatcccacatctgttacactccagggtctcagagctcctcaagaactgggattcctagtggggatgaattggactcttttgagactaacactgaaccggattttaatatctccagggctgaatcccttcctctatcaagtaatctacagtcgaaggaatcactgctttctggagttcgctcacgttcttattcttgctcatcacccaaaatttctttaggaaaaactcgtttggtgcgtgaattaacagtatgcagttcaagtgaagagcaaagagcttacagcttatcggagccaccaagagaaaacagaattcaggaagaagaatgggataaatacatcatacctgccaaatcagagtctgaaaaatataaagtgagtcgaactttcagtttcctcatgaataggatgactagccctcggaataaatcaaagacaaaaagcaaggatgccaaagataaagagaagctgaatcgacatcagtttgccccaggaacattctctggggttctgcagtgtttggtttgtgataaaacactcctggggaaagagtcactgcagtgttctaactgtaatgcaaatgtgcacaaaggttgtaaagatgctgcgcctgcatgcaccaagaaattccaagagaaatataacaagaacaaaccacagaccatccttggaaattcttcatttagagacatcccacagcctggtctctccttgcacccttcttcctccgtgcctgttggattgccgactggaaggagggagactgtgggacaggtccatccattgtccagaagtgttccaggcaccaccttggaaagcttcaggaggtcagccacatccttggagtctgagagtgaccataacagctgcagaagcaggtctcattctgatgagctgctacagtccatgggctcttctccctctacagagtctttcataatggaagatgttgtggattcttctctgtggagtgacctcagcagtgatgcccaggagtttgaagcagaatcttggagtcttgtggtggatccctcattttgtaataggcaggagaaggatgtcatcaaaagacaggatgtcatttttgagctaatgcaaacagagatgcatcacatccagaccctgttcatcatgtctgagatcttcaggaaaggcatgaaagaggagctgcagctggaccacagcaccgtggataaaattttcccctgtttagatgagttgcttgaaatccacaggcatttcttctacagtatgaaggaacgaaggcaggaatcctgtgctggcagcgacaggaattttgtgatcgaccgaattggagatattttggtacaacagttttcagaagaaaatgcaagtaaaatgaagaaaatatatggagaattctgttgccatcataaagaagctgttaacctctttaaagaactccagcagaataaaaagtttcagaattttattaagctccgaaatagtaatcttttggctcgacgccgaggaattccagaatgcattctgttggtcactcagcgtattacaaaataccctgtcttggtggaaaggatattgcagtacacaaaggaaagaactgaggaacataaagacttacgcaaagcgctttgcttaattaaagacatgattgcaacagtggatttaaaagtcaatgaatatgagaaaaaccaaaaatggcttgagatcctaaataagattgaaaacaaaacatacacgaagctcaaaaatggacatgtgtttaggaagcaggcactgatgagtgaagaaaggactctgttatatgatggccttgtttactggaaaactgctacaggtcgtttcaaagatatcctagctctacttctaactgatgtgctgctctttttacaagaaaaagaccagaaatacatctttgcagccgttgatcagaagccatcagttatttcccttcaaaagcttattgctagagaagttgctaatgaggagagaggaatgtttctgatcagtgcttcatctgctggtcctgagatgtatgaaattcacaccaattccaaggaggaacgcaataactggatgagacggatccagcaggctgtagaaagttgtcctgaagaaaaagggggaaggacaagtgaatctgatgaagacaagaggaaagctgaagccagagtggccaaaattcagcaatgtcaagaaatactcactaaccaagaccaacaaatttgtgcgtatttggaggagaagctgcatatctatgctgaacttggagaactgagcggatttgaggacgtccatctagagccccacctccttattaaacctgacccaggcgagcctccccaggcagcctcattactggcagcagcactgaaagaagctgagagcctacaagttgcagtgaaggcctcacagatgggcgccgtgagtcaatcatgtgaggacagttgtggagactctgtcttggcggacacactcagttctcatgatgtaccaggatcaccgactgcctcattagtcacaggagggagagaaggaagaggctgttcggatgtggatcccgggatccagggtgtggtaaccgacttggccgtctctgatgcaggggagaaggtggaatgtagaaattttccaggttcttcacaatcagagattatacaagccatacagaatttaacccgtctcttatacagccttcaggccgccttgaccattcaggacagccacattgagatccacaggctggttctccagcagcaggagggcctgtctctcggccactctatcctccgaggcggccccttgcaggaccagaagtctcgcgacgcggacaggcagcatgaggagctggccaatgtgcaccagcttcagcaccagctccagcaggagcagcggcgctggctgcgcaggtgtgagcagcagcagcgggcgcaggcgaccagggagagctggctgcaggagcgggagcgggagtgccagtcgcaggaggagctgctgctgcggagccggggcgagctggacctccagctccaggagtaccagcacagcctggagcggctgagggagggccagcgcctggtggagagggagcaggcgaggatgcgggcccagcagagcctgctgggccactggaagcacggccggcagaggagcctgcccgcggtgctccttccgggtggccccgaggtaatggaacttaatcgatctgagagtttatgtcatgaaaactcattcttcatcaatgaagctttagtacaaatgtcatttaacactttcaacaaactgaatccatcagttatccatcaggatgccacttaccctacaactcaatctcattctgacttggtgaggactagtgaacatcaagtagacctcaaggtggacccttctcagccttcgaatgtcagtcacaaactgtggacagccgctggttccggccatcagatacttcctttccatgaaagcagcaaggattcttgtaaaaatggctccagtatgacaaagtgcagttgtacgttgacatctcccccgggactgtggactggaaccacatctactttgaaagatttggacacctcccacactgagtccccaaccccccatgactcaaattcacaccgccctcaactgcaggcgtttataacagaagcaaagctaaatctaccgacaaggacaatgaccagacaagatggggaaactggagatggagccaaagaaaatattgtttacctctaattgtgttgtcatttttccaaacaaaacaaaacactggcacttttgggagaaactttttgtctccattccttatgtatgtgtgattgtctgtgtccaaattgctttaagaataatatttaatatttcctggaagctcatttttttggcatgagtctaattaaattattgaaagccaccctgtttgtataatctttaacttatcaaatctaatttcagatttctggaggagaaactaacttgaataagcaggactattttaaaagttgttttgacgctagagtaaaattccatgtcacattttctacccaatcatctggatttcaagattccttttaagatctcaatgaagcaatttggatttaaagagtggtattcacaaggggtgaactttcacagtcagggcagttgcctcagtgcccacataggcagaggaggatgtgggaaagggtttttctcagctagtttttgtgtgctcatttcttctgggagcattaaaagtggtgatctgttacagtcactattcaactgggcacgtgttgtgattggtcagtcactgagccagggatacagtccgga

SEQ ID NO: 175948 - DNA, 6118 bp, Homo sapiens
  Payload ID: 14544
  Gene Symbol: ARHGEF28
  Gene Name: Rho guanine nucleotide exchange factor (GEF) 28
  Uniprot ID: Q8N1W1
  ENST ID: ENST00000426542
  CDS Start-End: 21-5138
tcattgcagatgcgaaagccatggagttgagctgcagcgaagcacctctttacgggcagatgatgatctatgcgaagtttgacaaaaatgtgtatcttcctgaagatgctgagttttactttacttatgacggatctcatcagcgacatgtcatgattgcagagcgcatcgaggataacgttctccagtccagcgtcccaggccatgggcttcaggagacggtgacggtatctgtgtgcctctgctcggaaggttactctccggtgaccatgggctctggctcagtgacctacgtggacaacatggcttgcaggctggctcgtctgctggtgacgcaggccaatcgcctcacagcctgcagccaccagaccctgctgaccccatttgccttgacggcaggagcactgcctgccttggatgaggagctcgtgctggctctgacccatctggaattgcctctagagtggactgtgttgggaagttcttcacttgaagtatcttctcacagagaatctcttctacacctggctatgagatggggcctggctaaactttcccagttcttcttgtgtctcccggggggagtccaggccttggctttacccaacgaagagggtgccacaccattagacttagctttacgtgaaggacactccaagctggtggaagacgtcacaaattttcagggcagatggtccccaagcttctcccgagtgcagctcagtgaagaagcctccttgcattacattcactcatcggaaacgctgaccctgaccctgaaccacacagccgagcatttgttggaggcagatattaaactcttccggaaatacttttgggatagagcctttcttgtcaaggcctttgagccagaagccaggccagaggaaagaacagctatgccctccagcggtgcagaaactgaagaagagattaagaattcagtgtccagcagatcagcagctgaaaaggaagatataaagcgtgtcaaaagcctggtggttcaacacaatgaacatgaagaccagcacagcctagatttggatcgctccttcgatatcctaaaaaaatccaagccgccctcgacattgcttgctgcaggccggctttcagacatgctgaatggaggtgatgaagtctacgctaactgtatggtgattgatcaggttggtgatttggatatcagctatattaatatagagggaatcactgccactaccagccctgaatccagaggttgcactctgtggcctcagagcagcaaacacacccttcctacagaaaccagtcccagtgtgtacccacttagtgaaaatgtcgaagggacagcacacactgaagcccagcagtccttcatgtcaccatcaagttcgtgtgcttccaacttgaatctttcttttggttggcatggatttgaaaaggaacaaagtcatctaaagaaaagaagttctagccttgatgccttggacgccgacagtgaaggggaagggcattctgagccatcccacatctgttacactccagggtctcagagctcctcaagaactgggattcctagtggggatgaattggactcttttgagactaacactgaaccggattttaatatctccagggctgaatcccttcctctatcaagtaatctacagtcgaaggaatcactgctttctggagttcgctcacgttcttattcttgctcatcacccaaaatttctttaggaaaaactcgtttggtgcgtgaattaacagtatgcagttcaagtgaagagcaaagagcttacagcttatcggagccaccaagagaaaacagaattcaggaagaagaatgggataaatacatcatacctgccaaatcagagtctgaaaaatataaagtgagtcgaactttcagtttcctcatgaataggatgactagccctcggaataaatcaaagacaaaaagcaaggatgccaaagataaagagaagctgaatcgacatcagtttgccccaggaacattctctggggttctgcagtgtttggtttgtgataaaacactcctggggaaagagtcactgcagtgttctaactgtaatgcaaatgtgcacaaaggttgtaaagatgctgcgcctgcatgcaccaagaaattccaagagaaatataacaagaacaaaccacagaccatccttggaaattcttcatttagagacatcccacagcctggtctctccttgcacccttcttcctccgtgcctgttggattgccgactggaaggagggagactgtgggacaggtccatccattgtccagaagtgttccaggcaccaccttggaaagcttcaggaggtcagccacatccttggagtctgagagtgaccataacagctgcagaagcaggtctcattctgatgagctgctacagtccatgggctcttctccctctacagagtctttcataatggaagatgttgtggattcttctctgtggagtgacctcagcagtgatgcccaggagtttgaagcagaatcttggagtcttgtggtggatccctcattttgtaataggcaggagaaggatgtcatcaaaagacaggatgtcatttttgagctaatgcaaacagagatgcatcacatccagaccctgttcatcatgtctgagatcttcaggaaaggcatgaaagaggagctgcagctggaccacagcaccgtggataaaattttcccctgtttagatgagttgcttgaaatccacaggcatttcttctacagtatgaaggaacgaaggcaggaatcctgtgctggcagcgacaggaattttgtgatcgaccgaattggagatattttggtacaacagttttcagaagaaaatgcaagtaaaatgaagaaaatatatggagaattctgttgccatcataaagaagctgttaacctctttaaagaactccagcagaataaaaagtttcagaattttattaagctccgaaatagtaatcttttggctcgacgccgaggaattccagaatgcattctgttggtcactcagcgtattacaaaataccctgtcttggtggaaaggatattgcagtacacaaaggaaagaactgaggaacataaagacttacgcaaagcgctttgcttaattaaagacatgattgcaacagtggatttaaaagtcaatgaatatgagaaaaaccaaaaatggcttgagatcctaaataagattgaaaacaaaacatacacgaagctcaaaaatggacatgtgtttaggaagcaggcactgatgagtgaagaaaggactctgttatatgatggccttgtttactggaaaactgctacaggtcgtttcaaagatatcctagctctacttctaactgatgtgctgctctttttacaagaaaaagaccagaaatacatctttgcagccgttgatcagaagccatcagttatttcccttcaaaagcttattgctagagaagttgctaatgaggagagaggaatgtttctgatcagtgcttcatctgctggtcctgagatgtatgaaattcacaccaattccaaggaggaacgcaataactggatgagacggatccagcaggctgtagaaagttgtcctgaagaaaaagggggaaggacaagtgaatctgatgaagacaagaggaaagctgaagccagagtggccaaaattcagcaatgtcaagaaatactcactaaccaagaccaacaaatttgtgcgtatttggaggagaagctgcatatctatgctgaacttggagaactgagcggatttgaggacgtccatctagagccccacctccttattaaacctgacccaggcgagcctccccaggcagcctcattactggcagcagcactgaaagaagctgagagcctacaagttgcagtgaaggcctcacagatgggcgccgtgagtcaatcatgtgaggacagttgtggagactctgtcttggcggacacactcagttctcatgatgtaccaggatcaccgactgcctcattagtcacaggagggagagaaggaagaggctgttcggatgtggatcccgggatccagggtgtggtaaccgacttggccgtctctgatgcaggggagaaggtggaatgtagaaattttccaggttcttcacaatcagagattatacaagccatacagaatttaacccgtctcttatacagccttcaggccgccttgaccattcaggacagccacattgagatccacaggctggttctccagcagcaggagggcctgtctctcggccactctatcctccgaggcggccccttgcaggaccagaagtctcgcgacgcggacaggcagcatgaggagctggccaatgtgcaccagcttcagcaccagctccagcaggagcagcggcgctggctgcgcaggtgtgagcagcagcagcgggcgcaggcgaccagggagagctggctgcaggagcgggagcgggagtgccagtcgcaggaggagctgctgctgcggagccggggcgagctggacctccagctccaggagtaccagcacagcctggagcggctgagggagggccagcgcctggtggagagggagcaggcgaggatgcgggcccagcagagcctgctgggccactggaagcacggccggcagaggagcctgcccgcggtgctccttccgggtggccccgaggtaatggaacttaatcgatctgagagtttatgtcatgaaaactcattcttcatcaatgaagctttagtacaaatgtcatttaacactttcaacaaactgaatccatcagttatccatcaggatgccacttaccctacaactcaatctcattctgacttggtgaggactagtgaacatcaagtagacctcaaggtggacccttctcagccttcgaatgtcagtcacaaactgtggacagccgctggttccggccatcagatacttcctttccatgaaagcagcaaggattcttgtaaaaatgatttggacacctcccacactgagtccccaaccccccatgactcaaattcacaccgccctcaactgcaggcgtttataacagaagcaaagctaaatctaccgacaaggacaatgaccagacaagatggggaaactggagatggagccaaagaaaatattgtttacctctaattgtgttgtcatttttccaaacaaaacaaaacactggcacttttgggagaaactttttgtctccattccttatgtatgtgtgattgtctgtgtccaaattgctttaagaataatatttaatatttcctggaagctcatttttttggcatgagtctaattaaattattgaaagccaccctgtttgtataatctttaacttatcaaatctaatttcagatttctggaggagaaactaacttgaataagcaggactattttaaaagttgttttgacgctagagtaaaattccatgtcacattttctacccaatcatctggatttcaagattccttttaagatctcaatgaagcaatttggatttaaagagtggtattcacaaggggtgaactttcacagtcagggcagttgcctcagtgcccacataggcagaggaggatgtgggaaagggtttttctcagctagtttttgtgtgctcatttcttctgggagcattaaaagtggtgatctgttacagtcactattcaactgggcacgtgttgtgattggtcagtcactgagccagggatacagtccggacttgcttagtacctaagcctaatgctggtggggtttcaagacatggttcagcatcatcttttaacaaggcccagaggcccagagcccccatcaagtcattttgatgtaaatagtgaactttgttagagccctcacttctatcaatcagctgtcctgtccctgccagcacctggagcaccaactaccactccctggaaagaacccttccctgcagttttttaaggacaaaactgcccactcctcattaagtttgctgcctggatacacttttccacaaaggaaaactggcatatcctgccttccgagtagtatgggtctctgtgtgagaaaccaggagatattttcatcttgttcggaaatacttgtatgtattttggtgtcaataaatatcttgtacctcatta

SEQ ID NO: 175949 - DNA, 2936 bp, Homo sapiens
  Payload ID: 14544
  Gene Symbol: ARHGEF28
  Gene Name: Rho guanine nucleotide exchange factor (GEF) 28
  ENST ID: ENST00000512883
  CDS Start-End: 1-1956
atgattgcaacagtggatttaaaagtcaatgaatatgagaaaaaccaaaaatggcttgagatcctaaataagattgaaaacaaaacatacacgaagctcaaaaatggacatgtgtttaggaagcaggcactgatgagtgaagaaaggactctgttatatgatggccttgtttactggaaaactgctacaggtcgtttcaaagatatcctagctctacttctaactgatgtgctgctctttttacaagaaaaagaccagaaatacatctttgcagccgttgatcagaagccatcagttatttcccttcaaaagcttattgctagagaagttgctaatgaggagagaggaatgtttctgatcagtgcttcatctgctggtcctgagatgtatgaaattcacaccaattccaaggaggaacgcaataactggatgagacggatccagcaggctgtagaaagttgtcctgaagaaaaagggggaaggacaagtgaatctgatgaagacaagaggaaagctgaagccagagtggccaaaattcagcaatgtcaagaaatactcactaaccaagaccaacaaatttgtgcgtatttggaggagaagctgcatatctatgctgaacttggagaactgagcggatttgaggacgtccatctagagccccacctccttattaaacctgacccaggcgagcctccccaggcagcctcattactggcagcagcactgaaagaagcattagtcacaggagggagagaaggaagaggctgttcggatgtggatcccgggatccagggtgtggtaaccgacttggccgtctctgatgcaggggagaaggtggaatgtagaaattttccaggttcttcacaatcagagattatacaagccatacagaatttaacccgtctcttatacagccttcaggccgccttgaccattcaggacagccacattgagatccacaggctggttctccagcagcaggagggcctgtctctcggccactctatcctccgaggcggccccttgcaggaccagaagtctcgcgacgcggacaggcagcatgaggagctggccaatgtgcaccagcttcagcaccagctccagcaggagcagcggcgctggctgcgcaggtgtgagcagcagcagcgggcgcaggcgaccagggagagctggctgcaggagcgggagcgggagtgccagtcgcaggaggagctgctgctgcggagccggggcgagctggacctccagctccaggagtaccagcacagcctggagcggctgagggagggccagcgcctggtggagagggagcaggcgaggatgcgggcccagcagagcctgctgggccactggaagcacggccggcagaggagcctgcccgcggtgctccttccgggtggccccgaggtaatggaacttaatcgatctgagagtttatgtcatgaaaactcattcttcatcaatgaagctttagtacaaatgtcatttaacactttcaacaaactgaatccatcagttatccatcaggatgccacttaccctacaactcaatctcattctgacttggtgaggactagtgaacatcaagtagacctcaaggtggacccttctcagccttcgaatgtcagtcacaaactgtggacagccgctggttccggccatcagatacttcctttccatgaaagcagcaaggattcttgtaaaaatggctccagtatgacaaagtgcagttgtacgttgacatctcccccgggactgtggactggaaccacatctactttgaaagatttggacacctcccacactgagtccccaaccccccatgactcaaattcacaccgccctcaactgcaggcgtttataacagaagcaaagctaaatctaccgacaaggacaatgaccagacaagatggggaaactggagatggagccaaagaaaatattgtttacctctaattgtgttgtcatttttccaaacaaaacaaaacactggcacttttgggagaaactttttgtctccattccttatgtatgtgtgattgtctgtgtccaaattgctttaagaataatatttaatatttcctggaagctcatttttttggcatgagtctaattaaattattgaaagccaccctgtttgtataatctttaacttatcaaatctaatttcagatttctggaggagaaactaacttgaataagcaggactattttaaaagttgttttgacgctagagtaaaattccatgtcacattttctacccaatcatctggatttcaagattccttttaagatctcaatgaagcaatttggatttaaagagtggtattcacaaggggtgaactttcacagtcagggcagttgcctcagtgcccacataggcagaggaggatgtgggaaagggtttttctcagctagtttttgtgtgctcatttcttctgggagcattaaaagtggtgatctgttacagtcactattcaactgggcacgtgttgtgattggtcagtcactgagccagggatacagtccggacttgcttagtacctaagcctaatgctggtggggtttcaagacatggttcagcatcatcttttaacaaggcccagaggcccagagcccccatcaagtcattttgatgtaaatagtgaactttgttagagccctcacttctatcaatcagctgtcctgtccctgccagcacctggagcaccaactaccactccctggaaagaacccttccctgcagttttttaaggacaaaactgcccactcctcattaagtttgctgcctggatacacttttccacaaaggaaaactggcatatcctgccttccgagtagtatgggtctctgtgtgagaaaccaggagatattttcatcttgttcggaaatacttgtatgtattttggtgtcaataaatatcttgtacctcatta

SEQ ID NO: 175950 - DNA, 560 bp, Homo sapiens
  Payload ID: 14544
  Gene Symbol: ARHGEF28
  Gene Name: Rho guanine nucleotide exchange factor (GEF) 28
  ENST ID: ENST00000509848
  CDS Start-End: 311-560
atcgccggggagagccttccggactccgggcggcggctggctgggggcgcgttccgaggcgccctcaggcagggcgcgggggcagagcctcgcctgggttctggaggctgcggggccatcgctccaggcccacagcgtccccgcattggttggctgggtgggccgaggaacagtggcaacatctgtgtttgtgcggcttctcccgccttgacccctgcctgggtatccacacatctcctcacaccaggagttatagaggttcaccacggaccacaccaattgggcaaaatccaaagaaaatgcgaaagccatggagttgagctgcagcgaagcacctctttacgggcagatgatgatctatgcgaagtttgacaaaaatgtgtatcttcctgaagatgctgagttttactttacttatgacggatctcatcagcgacatgtcatgattgcagagcgcatcgaggataacgttctccagtccagcgtcccaggccatgggcttcaggagacggtgacggtatctgtgtgcctctgctcggaaggttactctccggtgacca

SEQ ID NO: 175951 - DNA, 6273 bp, Homo sapiens
  Payload ID: 14544
  Gene Symbol: ARHGEF28
  Gene Name: Rho guanine nucleotide exchange factor (GEF) 28
  Uniprot ID: Q8N1W1
  ENST ID: ENST00000513042
  CDS Start-End: 177-5294
aaaccttggcttcagcccggccgccgccaggcgttggcatcgccggggagagccttccggactccgggcggcggctggctgggggcgcgttccgaggcgccctcaggcagggcgcgggggcagagcctcgcctgggttctggaggctgcggggccatcgctccagatgcgaaagccatggagttgagctgcagcgaagcacctctttacgggcagatgatgatctatgcgaagtttgacaaaaatgtgtatcttcctgaagatgctgagttttactttacttatgacggatctcatcagcgacatgtcatgattgcagagcgcatcgaggataacgttctccagtccagcgtcccaggccatgggcttcaggagacggtgacggtatctgtgtgcctctgctcggaaggttactctccggtgaccatgggctctggctcagtgacctacgtggacaacatggcttgcaggctggctcgtctgctggtgacgcaggccaatcgcctcacagcctgcagccaccagaccctgctgaccccatttgccttgacggcaggagcactgcctgccttggatgaggagctcgtgctggctctgacccatctggaattgcctctagagtggactgtgttgggaagttcttcacttgaagtatcttctcacagagaatctcttctacacctggctatgagatggggcctggctaaactttcccagttcttcttgtgtctcccggggggagtccaggccttggctttacccaacgaagagggtgccacaccattagacttagctttacgtgaaggacactccaagctggtggaagacgtcacaaattttcagggcagatggtccccaagcttctcccgagtgcagctcagtgaagaagcctccttgcattacattcactcatcggaaacgctgaccctgaccctgaaccacacagccgagcatttgttggaggcagatattaaactcttccggaaatacttttgggatagagcctttcttgtcaaggcctttgagccagaagccaggccagaggaaagaacagctatgccctccagcggtgcagaaactgaagaagagattaagaattcagtgtccagcagatcagcagctgaaaaggaagatataaagcgtgtcaaaagcctggtggttcaacacaatgaacatgaagaccagcacagcctagatttggatcgctccttcgatatcctaaaaaaatccaagccgccctcgacattgcttgctgcaggccggctttcagacatgctgaatggaggtgatgaagtctacgctaactgtatggtgattgatcaggttggtgatttggatatcagctatattaatatagagggaatcactgccactaccagccctgaatccagaggttgcactctgtggcctcagagcagcaaacacacccttcctacagaaaccagtcccagtgtgtacccacttagtgaaaatgtcgaagggacagcacacactgaagcccagcagtccttcatgtcaccatcaagttcgtgtgcttccaacttgaatctttcttttggttggcatggatttgaaaaggaacaaagtcatctaaagaaaagaagttctagccttgatgccttggacgccgacagtgaaggggaagggcattctgagccatcccacatctgttacactccagggtctcagagctcctcaagaactgggattcctagtggggatgaattggactcttttgagactaacactgaaccggattttaatatctccagggctgaatcccttcctctatcaagtaatctacagtcgaaggaatcactgctttctggagttcgctcacgttcttattcttgctcatcacccaaaatttctttaggaaaaactcgtttggtgcgtgaattaacagtatgcagttcaagtgaagagcaaagagcttacagcttatcggagccaccaagagaaaacagaattcaggaagaagaatgggataaatacatcatacctgccaaatcagagtctgaaaaatataaagtgagtcgaactttcagtttcctcatgaataggatgactagccctcggaataaatcaaagacaaaaagcaaggatgccaaagataaagagaagctgaatcgacatcagtttgccccaggaacattctctggggttctgcagtgtttggtttgtgataaaacactcctggggaaagagtcactgcagtgttctaactgtaatgcaaatgtgcacaaaggttgtaaagatgctgcgcctgcatgcaccaagaaattccaagagaaatataacaagaacaaaccacagaccatccttggaaattcttcatttagagacatcccacagcctggtctctccttgcacccttcttcctccgtgcctgttggattgccgactggaaggagggagactgtgggacaggtccatccattgtccagaagtgttccaggcaccaccttggaaagcttcaggaggtcagccacatccttggagtctgagagtgaccataacagctgcagaagcaggtctcattctgatgagctgctacagtccatgggctcttctccctctacagagtctttcataatggaagatgttgtggattcttctctgtggagtgacctcagcagtgatgcccaggagtttgaagcagaatcttggagtcttgtggtggatccctcattttgtaataggcaggagaaggatgtcatcaaaagacaggatgtcatttttgagctaatgcaaacagagatgcatcacatccagaccctgttcatcatgtctgagatcttcaggaaaggcatgaaagaggagctgcagctggaccacagcaccgtggataaaattttcccctgtttagatgagttgcttgaaatccacaggcatttcttctacagtatgaaggaacgaaggcaggaatcctgtgctggcagcgacaggaattttgtgatcgaccgaattggagatattttggtacaacagttttcagaagaaaatgcaagtaaaatgaagaaaatatatggagaattctgttgccatcataaagaagctgttaacctctttaaagaactccagcagaataaaaagtttcagaattttattaagctccgaaatagtaatcttttggctcgacgccgaggaattccagaatgcattctgttggtcactcagcgtattacaaaataccctgtcttggtggaaaggatattgcagtacacaaaggaaagaactgaggaacataaagacttacgcaaagcgctttgcttaattaaagacatgattgcaacagtggatttaaaagtcaatgaatatgagaaaaaccaaaaatggcttgagatcctaaataagattgaaaacaaaacatacacgaagctcaaaaatggacatgtgtttaggaagcaggcactgatgagtgaagaaaggactctgttatatgatggccttgtttactggaaaactgctacaggtcgtttcaaagatatcctagctctacttctaactgatgtgctgctctttttacaagaaaaagaccagaaatacatctttgcagccgttgatcagaagccatcagttatttcccttcaaaagcttattgctagagaagttgctaatgaggagagaggaatgtttctgatcagtgcttcatctgctggtcctgagatgtatgaaattcacaccaattccaaggaggaacgcaataactggatgagacggatccagcaggctgtagaaagttgtcctgaagaaaaagggggaaggacaagtgaatctgatgaagacaagaggaaagctgaagccagagtggccaaaattcagcaatgtcaagaaatactcactaaccaagaccaacaaatttgtgcgtatttggaggagaagctgcatatctatgctgaacttggagaactgagcggatttgaggacgtccatctagagccccacctccttattaaacctgacccaggcgagcctccccaggcagcctcattactggcagcagcactgaaagaagctgagagcctacaagttgcagtgaaggcctcacagatgggcgccgtgagtcaatcatgtgaggacagttgtggagactctgtcttggcggacacactcagttctcatgatgtaccaggatcaccgactgcctcattagtcacaggagggagagaaggaagaggctgttcggatgtggatcccgggatccagggtgtggtaaccgacttggccgtctctgatgcaggggagaaggtggaatgtagaaattttccaggttcttcacaatcagagattatacaagccatacagaatttaacccgtctcttatacagccttcaggccgccttgaccattcaggacagccacattgagatccacaggctggttctccagcagcaggagggcctgtctctcggccactctatcctccgaggcggccccttgcaggaccagaagtctcgcgacgcggacaggcagcatgaggagctggccaatgtgcaccagcttcagcaccagctccagcaggagcagcggcgctggctgcgcaggtgtgagcagcagcagcgggcgcaggcgaccagggagagctggctgcaggagcgggagcgggagtgccagtcgcaggaggagctgctgctgcggagccggggcgagctggacctccagctccaggagtaccagcacagcctggagcggctgagggagggccagcgcctggtggagagggagcaggcgaggatgcgggcccagcagagcctgctgggccactggaagcacggccggcagaggagcctgcccgcggtgctccttccgggtggccccgaggtaatggaacttaatcgatctgagagtttatgtcatgaaaactcattcttcatcaatgaagctttagtacaaatgtcatttaacactttcaacaaactgaatccatcagttatccatcaggatgccacttaccctacaactcaatctcattctgacttggtgaggactagtgaacatcaagtagacctcaaggtggacccttctcagccttcgaatgtcagtcacaaactgtggacagccgctggttccggccatcagatacttcctttccatgaaagcagcaaggattcttgtaaaaatgatttggacacctcccacactgagtccccaaccccccatgactcaaattcacaccgccctcaactgcaggcgtttataacagaagcaaagctaaatctaccgacaaggacaatgaccagacaagatggggaaactggagatggagccaaagaaaatattgtttacctctaattgtgttgtcatttttccaaacaaaacaaaacactggcacttttgggagaaactttttgtctccattccttatgtatgtgtgattgtctgtgtccaaattgctttaagaataatatttaatatttcctggaagctcatttttttggcatgagtctaattaaattattgaaagccaccctgtttgtataatctttaacttatcaaatctaatttcagatttctggaggagaaactaacttgaataagcaggactattttaaaagttgttttgacgctagagtaaaattccatgtcacattttctacccaatcatctggatttcaagattccttttaagatctcaatgaagcaatttggatttaaagagtggtattcacaaggggtgaactttcacagtcagggcagttgcctcagtgcccacataggcagaggaggatgtgggaaagggtttttctcagctagtttttgtgtgctcatttcttctgggagcattaaaagtggtgatctgttacagtcactattcaactgggcacgtgttgtgattggtcagtcactgagccagggatacagtccggacttgcttagtacctaagcctaatgctggtggggtttcaagacatggttcagcatcatcttttaacaaggcccagaggcccagagcccccatcaagtcattttgatgtaaatagtgaactttgttagagccctcacttctatcaatcagctgtcctgtccctgccagcacctggagcaccaactaccactccctggaaagaacccttccctgcagttttttaaggacaaaactgcccactcctcattaagtttgctgcctggatacacttttccacaaaggaaaactggcatatcctgccttccgagtagtatgggtctctgtgtgagaaaccaggagatattttcatcttgttcggaaatacttgtatgtattttggtgtcaataaatatcttgtacctcatt

SEQ ID NO: 175952 - DNA, 6351 bp, Homo sapiens
  Payload ID: 14544
  Gene Symbol: ARHGEF28
  Gene Name: Rho guanine nucleotide exchange factor (GEF) 28
  Uniprot ID: Q8N1W1
  ENST ID: ENST00000545377
  CDS Start-End: 177-5372
aaaccttggcttcagcccggccgccgccaggcgttggcatcgccggggagagccttccggactccgggcggcggctggctgggggcgcgttccgaggcgccctcaggcagggcgcgggggcagagcctcgcctgggttctggaggctgcggggccatcgctccagatgcgaaagccatggagttgagctgcagcgaagcacctctttacgggcagatgatgatctatgcgaagtttgacaaaaatgtgtatcttcctgaagatgctgagttttactttacttatgacggatctcatcagcgacatgtcatgattgcagagcgcatcgaggataacgttctccagtccagcgtcccaggccatgggcttcaggagacggtgacggtatctgtgtgcctctgctcggaaggttactctccggtgaccatgggctctggctcagtgacctacgtggacaacatggcttgcaggctggctcgtctgctggtgacgcaggccaatcgcctcacagcctgcagccaccagaccctgctgaccccatttgccttgacggcaggagcactgcctgccttggatgaggagctcgtgctggctctgacccatctggaattgcctctagagtggactgtgttgggaagttcttcacttgaagtatcttctcacagagaatctcttctacacctggctatgagatggggcctggctaaactttcccagttcttcttgtgtctcccggggggagtccaggccttggctttacccaacgaagagggtgccacaccattagacttagctttacgtgaaggacactccaagctggtggaagacgtcacaaattttcagggcagatggtccccaagcttctcccgagtgcagctcagtgaagaagcctccttgcattacattcactcatcggaaacgctgaccctgaccctgaaccacacagccgagcatttgttggaggcagatattaaactcttccggaaatacttttgggatagagcctttcttgtcaaggcctttgagccagaagccaggccagaggaaagaacagctatgccctccagcggtgcagaaactgaagaagagattaagaattcagtgtccagcagatcagcagctgaaaaggaagatataaagcgtgtcaaaagcctggtggttcaacacaatgaacatgaagaccagcacagcctagatttggatcgctccttcgatatcctaaaaaaatccaagccgccctcgacattgcttgctgcaggccggctttcagacatgctgaatggaggtgatgaagtctacgctaactgtatggtgattgatcaggttggtgatttggatatcagctatattaatatagagggaatcactgccactaccagccctgaatccagaggttgcactctgtggcctcagagcagcaaacacacccttcctacagaaaccagtcccagtgtgtacccacttagtgaaaatgtcgaagggacagcacacactgaagcccagcagtccttcatgtcaccatcaagttcgtgtgcttccaacttgaatctttcttttggttggcatggatttgaaaaggaacaaagtcatctaaagaaaagaagttctagccttgatgccttggacgccgacagtgaaggggaagggcattctgagccatcccacatctgttacactccagggtctcagagctcctcaagaactgggattcctagtggggatgaattggactcttttgagactaacactgaaccggattttaatatctccagggctgaatcccttcctctatcaagtaatctacagtcgaaggaatcactgctttctggagttcgctcacgttcttattcttgctcatcacccaaaatttctttaggaaaaactcgtttggtgcgtgaattaacagtatgcagttcaagtgaagagcaaagagcttacagcttatcggagccaccaagagaaaacagaattcaggaagaagaatgggataaatacatcatacctgccaaatcagagtctgaaaaatataaagtgagtcgaactttcagtttcctcatgaataggatgactagccctcggaataaatcaaagacaaaaagcaaggatgccaaagataaagagaagctgaatcgacatcagtttgccccaggaacattctctggggttctgcagtgtttggtttgtgataaaacactcctggggaaagagtcactgcagtgttctaactgtaatgcaaatgtgcacaaaggttgtaaagatgctgcgcctgcatgcaccaagaaattccaagagaaatataacaagaacaaaccacagaccatccttggaaattcttcatttagagacatcccacagcctggtctctccttgcacccttcttcctccgtgcctgttggattgccgactggaaggagggagactgtgggacaggtccatccattgtccagaagtgttccaggcaccaccttggaaagcttcaggaggtcagccacatccttggagtctgagagtgaccataacagctgcagaagcaggtctcattctgatgagctgctacagtccatgggctcttctccctctacagagtctttcataatggaagatgttgtggattcttctctgtggagtgacctcagcagtgatgcccaggagtttgaagcagaatcttggagtcttgtggtggatccctcattttgtaataggcaggagaaggatgtcatcaaaagacaggatgtcatttttgagctaatgcaaacagagatgcatcacatccagaccctgttcatcatgtctgagatcttcaggaaaggcatgaaagaggagctgcagctggaccacagcaccgtggataaaattttcccctgtttagatgagttgcttgaaatccacaggcatttcttctacagtatgaaggaacgaaggcaggaatcctgtgctggcagcgacaggaattttgtgatcgaccgaattggagatattttggtacaacagttttcagaagaaaatgcaagtaaaatgaagaaaatatatggagaattctgttgccatcataaagaagctgttaacctctttaaagaactccagcagaataaaaagtttcagaattttattaagctccgaaatagtaatcttttggctcgacgccgaggaattccagaatgcattctgttggtcactcagcgtattacaaaataccctgtcttggtggaaaggatattgcagtacacaaaggaaagaactgaggaacataaagacttacgcaaagcgctttgcttaattaaagacatgattgcaacagtggatttaaaagtcaatgaatatgagaaaaaccaaaaatggcttgagatcctaaataagattgaaaacaaaacatacacgaagctcaaaaatggacatgtgtttaggaagcaggcactgatgagtgaagaaaggactctgttatatgatggccttgtttactggaaaactgctacaggtcgtttcaaagatatcctagctctacttctaactgatgtgctgctctttttacaagaaaaagaccagaaatacatctttgcagccgttgatcagaagccatcagttatttcccttcaaaagcttattgctagagaagttgctaatgaggagagaggaatgtttctgatcagtgcttcatctgctggtcctgagatgtatgaaattcacaccaattccaaggaggaacgcaataactggatgagacggatccagcaggctgtagaaagttgtcctgaagaaaaagggggaaggacaagtgaatctgatgaagacaagaggaaagctgaagccagagtggccaaaattcagcaatgtcaagaaatactcactaaccaagaccaacaaatttgtgcgtatttggaggagaagctgcatatctatgctgaacttggagaactgagcggatttgaggacgtccatctagagccccacctccttattaaacctgacccaggcgagcctccccaggcagcctcattactggcagcagcactgaaagaagctgagagcctacaagttgcagtgaaggcctcacagatgggcgccgtgagtcaatcatgtgaggacagttgtggagactctgtcttggcggacacactcagttctcatgatgtaccaggatcaccgactgcctcattagtcacaggagggagagaaggaagaggctgttcggatgtggatcccgggatccagggtgtggtaaccgacttggccgtctctgatgcaggggagaaggtggaatgtagaaattttccaggttcttcacaatcagagattatacaagccatacagaatttaacccgtctcttatacagccttcaggccgccttgaccattcaggacagccacattgagatccacaggctggttctccagcagcaggagggcctgtctctcggccactctatcctccgaggcggccccttgcaggaccagaagtctcgcgacgcggacaggcagcatgaggagctggccaatgtgcaccagcttcagcaccagctccagcaggagcagcggcgctggctgcgcaggtgtgagcagcagcagcgggcgcaggcgaccagggagagctggctgcaggagcgggagcgggagtgccagtcgcaggaggagctgctgctgcggagccggggcgagctggacctccagctccaggagtaccagcacagcctggagcggctgagggagggccagcgcctggtggagagggagcaggcgaggatgcgggcccagcagagcctgctgggccactggaagcacggccggcagaggagcctgcccgcggtgctccttccgggtggccccgaggtaatggaacttaatcgatctgagagtttatgtcatgaaaactcattcttcatcaatgaagctttagtacaaatgtcatttaacactttcaacaaactgaatccatcagttatccatcaggatgccacttaccctacaactcaatctcattctgacttggtgaggactagtgaacatcaagtagacctcaaggtggacccttctcagccttcgaatgtcagtcacaaactgtggacagccgctggttccggccatcagatacttcctttccatgaaagcagcaaggattcttgtaaaaatggctccagtatgacaaagtgcagttgtacgttgacatctcccccgggactgtggactggaaccacatctactttgaaagatttggacacctcccacactgagtccccaaccccccatgactcaaattcacaccgccctcaactgcaggcgtttataacagaagcaaagctaaatctaccgacaaggacaatgaccagacaagatggggaaactggagatggagccaaagaaaatattgtttacctctaattgtgttgtcatttttccaaacaaaacaaaacactggcacttttgggagaaactttttgtctccattccttatgtatgtgtgattgtctgtgtccaaattgctttaagaataatatttaatatttcctggaagctcatttttttggcatgagtctaattaaattattgaaagccaccctgtttgtataatctttaacttatcaaatctaatttcagatttctggaggagaaactaacttgaataagcaggactattttaaaagttgttttgacgctagagtaaaattccatgtcacattttctacccaatcatctggatttcaagattccttttaagatctcaatgaagcaatttggatttaaagagtggtattcacaaggggtgaactttcacagtcagggcagttgcctcagtgcccacataggcagaggaggatgtgggaaagggtttttctcagctagtttttgtgtgctcatttcttctgggagcattaaaagtggtgatctgttacagtcactattcaactgggcacgtgttgtgattggtcagtcactgagccagggatacagtccggacttgcttagtacctaagcctaatgctggtggggtttcaagacatggttcagcatcatcttttaacaaggcccagaggcccagagcccccatcaagtcattttgatgtaaatagtgaactttgttagagccctcacttctatcaatcagctgtcctgtccctgccagcacctggagcaccaactaccactccctggaaagaacccttccctgcagttttttaaggacaaaactgcccactcctcattaagtttgctgcctggatacacttttccacaaaggaaaactggcatatcctgccttccgagtagtatgggtctctgtgtgagaaaccaggagatattttcatcttgttcggaaatacttgtatgtattttggtgtcaataaatatcttgtacctcatt

SEQ ID NO: 175953 - DNA, 3602 bp, Homo sapiens
  Payload ID: 14545
  Gene Symbol: ARHGEF3
  Gene Name: Rho guanine nucleotide exchange factor (GEF) 3
  Uniprot ID: Q9NR81
  ENST ID: ENST00000296315
  CDS Start-End: 170-1750
cactcggctccggagcccagtcgagtcctgcccggctagaagccggctgtcggtctccgtgtcgccgccgccgcccggcatcgtggagctggggcccccttttgcctgggagttttgtagtcgcctagggtcagcggtgacatcccaaagggcaggcccggcagccgccatggtggccaaggattaccccttctacctcacggtcaagagagcgaactgcagcctggagctacccccggccagcggtccggccaaggacgctgaggagcctagtaataaacgggtcaaacccctttcccgagtcacgtcgctagcaaacctcatcccgcccgtgaaggccacgccattaaagcgcttcagtcaaaccctgcagcgctccattagcttccgcagtgagagccgccctgacatcctcgccccccgaccctggtccagaaatgccgccccctcgagcacgaaacggagagatagcaagctgtggagtgagaccttcgatgtgtgcgtcaatcagatgcttacatccaaggaaatcaaacgtcaggaggcgatctttgagctttcccaaggagaagaagacttgatagaagacttgaaattagcaaaaaaggcctatcatgaccccatgctgaaactctccataatgacagaacaagagttgaatcaaatttttggaacactggactctctaattcctctacatgaagagctccttagtcagcttcgagatgttaggaagcctgatggctcgactgaacatgttggtcccatcctcgtgggctggctcccttgcctcagctcctatgatagctactgcagcaatcaagtagccgccaaagctctgctggaccacaaaaagcaagatcaccgagtccaggatttcctacagcgatgtttagaatccccctttagccgcaaactagatctctggaatttcctcgatattccaagaagccgcctggtaaaataccctctgcttctccgagaaatcttgaggcacacaccaaatgataatccagatcagcagcacttggaagaagctataaatatcattcagggaattgtggcagaaatcaacaccaagactggtgaatctgaatgccgctattataaagagcggcttctttacttggaagaaggccagaaagactccctgatcgacagctctcgagtcttgtgttgtcatggtgaactgaagaacaatcggggcgtgaaactgcatgttttcctgttccaagaagtgcttgtgatcactcgagccgtcacccacaatgagcagctttgctaccagctgtaccgtcagccaatccccgtgaaagacctcctgctggaagacctccaggatggagaagtgaggctgggtggctccctgcgaggggcattcagcaacaatgagagaattaaaaacttcttcagagtcagtttcaaaaatggatcccaaagtcagacccactcgctacaagccaatgacactttcaacaaacagcagtggcttaactgtattcgtcaagccaaagaaacagttttgtgtgctgccgggcaagctggggtgcttgactccgagggatcgttcctaaatcccaccaccgggagcagagagctacagggagaaacaaaacttgagcagatggaccaatcggacagtgagtcagactgtagtatggacacgagtgaggtcagcctcgactgtgagcgcatggaacagacagactcttcctgtggaaacagcaggcacggtgaaagtaacgtctgacagaagcatgtgcacttcgggaagcaggcctgcatcttacctgtacagtatttgcattccacagatggaacggtttggagaagcactttttcatacttttgtgaaagtatacatgttggcccagtctctcgtatctgtacctttgtccctagtactgtaactgccaatctgtctgtgtaagctggaatctgtggcaactattaccctgtgttgtatttcccaagtgtctggatggatggagaggtactcaaacaagttactttcagttgtcctgctggattttaaaaaaatagaaaaagaatctcaaaactactgttttacatagattgtttgaagagtccttcctcttgtgcttctgtaccactttcccagctcttagatgtggtagctaaaggcacggaatttagacggccttgtaaatagggcatgaggaactcatctgtgtattgggatggtattagagagagaatcaggaaagaccaactcatgaagtgaacttggtttgatcttactcaactagaaagcttgaaaacatccctggggattctgaaggcttaattttgcaaaggaggatgcattgtctgaactttgcaacttcatccagtgcaagtttgatgcaagaatgtattaggacataaaatagaggctgaccttaaaagggccaggacagaagcggctgccagctctgaatctttaactgaaatgcacatggcaccaggaggtgtctctcatagttggttgctagcctaaaacatcagaatagaacccaaagggcttaggaaggcctgccaggataacaagaaggccctgtattcattgtgtttcatctgcctaggcctactcattattttagagaatgaatgaagcaacaaggaagagagaccatgactctatcgatgacactgtttatagaaacacaggagaggaagaatttggaatgaaaagcacttcgtcagaaccttctgtgggagccattgagagaaaagcatggtccagtgccttctgagaaaggccagagctttgggctttcctgctctgcttttgggtcgtcaatttgccatctctggttctgtgctataatcagaattgtaattatgttctccagaggccaatttcattaactctgattaattagaatcagctagccagattagtaacctctttgtccagccttgatttacagtgcagggtaaagtgcagaccttaaaaacagctaagtacctagaagagctccctgcaagtgtaaatattaaggatgacctgtgcaaaattatacccacaccagcactagtggtaattattctaaattattgccaaaaagttttttttaatctgtctttcaagtttacagaaaagaaagcagtaaatgcattgatgtcattttattatgtacatatatcatgtgcattcaagctgtgtgacaagatatatcaatataaaaacaaggtatatactttattattttttgaaaacaaggatattgtgatcaattttaccctgtaaaacatatttctgtatttataggtcttaaacatgatgaattttttctattacaagtttatttaaaactgctttctcaagtcgttattgatacagcaagtgaacctgctgcagacagaagcagaggaaagccaagaacagcctttattggtgaagaaaagaatgaatgattctttgtaggcgccatcagccacttttagaagccatcagccagtgtgttgggaaaagaggtttgtcaagtgttggcctatgggaaggtggtcaatgaatgttttgatgaaatgaatgtttttgtataatggccttaaacttttctggaagtatttcaaataaattacattattaagtcatc

SEQ ID NO: 175954 - DNA, 3639 bp, Homo sapiens
  Payload ID: 14545
  Gene Symbol: ARHGEF3
  Gene Name: Rho guanine nucleotide exchange factor (GEF) 3
  Uniprot ID: Q9NR81
  ENST ID: ENST00000338458
  CDS Start-End: 111-1787
agcccaggggagccgccgccgcagccgccgccgccgcggtgagttttccagcctggagaggccgaaccagcgcgggggtcgaggagacctgagcctgccatactgagtctatggacagttccacagcaatgaatcaatgcagctgtagaggaatggaagaaaacaaggaaaggcctaaacggcagcggcaaaacaactttcccatgtttccctctcctaaagcctggaatttcagagggcgaaaacggaaacagagcacccaagatgaagatgctgttagcctttgcagtctcgacataagtgagcctagtaataaacgggtcaaacccctttcccgagtcacgtcgctagcaaacctcatcccgcccgtgaaggccacgccattaaagcgcttcagtcaaaccctgcagcgctccattagcttccgcagtgagagccgccctgacatcctcgccccccgaccctggtccagaaatgccgccccctcgagcacgaaacggagagatagcaagctgtggagtgagaccttcgatgtgtgcgtcaatcagatgcttacatccaaggaaatcaaacgtcaggaggcgatctttgagctttcccaaggagaagaagacttgatagaagacttgaaattagcaaaaaaggcctatcatgaccccatgctgaaactctccataatgacagaacaagagttgaatcaaatttttggaacactggactctctaattcctctacatgaagagctccttagtcagcttcgagatgttaggaagcctgatggctcgactgaacatgttggtcccatcctcgtgggctggctcccttgcctcagctcctatgatagctactgcagcaatcaagtagccgccaaagctctgctggaccacaaaaagcaagatcaccgagtccaggatttcctacagcgatgtttagaatccccctttagccgcaaactagatctctggaatttcctcgatattccaagaagccgcctggtaaaataccctctgcttctccgagaaatcttgaggcacacaccaaatgataatccagatcagcagcacttggaagaagctataaatatcattcagggaattgtggcagaaatcaacaccaagactggtgaatctgaatgccgctattataaagagcggcttctttacttggaagaaggccagaaagactccctgatcgacagctctcgagtcttgtgttgtcatggtgaactgaagaacaatcggggcgtgaaactgcatgttttcctgttccaagaagtgcttgtgatcactcgagccgtcacccacaatgagcagctttgctaccagctgtaccgtcagccaatccccgtgaaagacctcctgctggaagacctccaggatggagaagtgaggctgggtggctccctgcgaggggcattcagcaacaatgagagaattaaaaacttcttcagagtcagtttcaaaaatggatcccaaagtcagacccactcgctacaagccaatgacactttcaacaaacagcagtggcttaactgtattcgtcaagccaaagaaacagttttgtgtgctgccgggcaagctggggtgcttgactccgagggatcgttcctaaatcccaccaccgggagcagagagctacagggagaaacaaaacttgagcagatggaccaatcggacagtgagtcagactgtagtatggacacgagtgaggtcagcctcgactgtgagcgcatggaacagacagactcttcctgtggaaacagcaggcacggtgaaagtaacgtctgacagaagcatgtgcacttcgggaagcaggcctgcatcttacctgtacagtatttgcattccacagatggaacggtttggagaagcactttttcatacttttgtgaaagtatacatgttggcccagtctctcgtatctgtacctttgtccctagtactgtaactgccaatctgtctgtgtaagctggaatctgtggcaactattaccctgtgttgtatttcccaagtgtctggatggatggagaggtactcaaacaagttactttcagttgtcctgctggattttaaaaaaatagaaaaagaatctcaaaactactgttttacatagattgtttgaagagtccttcctcttgtgcttctgtaccactttcccagctcttagatgtggtagctaaaggcacggaatttagacggccttgtaaatagggcatgaggaactcatctgtgtattgggatggtattagagagagaatcaggaaagaccaactcatgaagtgaacttggtttgatcttactcaactagaaagcttgaaaacatccctggggattctgaaggcttaattttgcaaaggaggatgcattgtctgaactttgcaacttcatccagtgcaagtttgatgcaagaatgtattaggacataaaatagaggctgaccttaaaagggccaggacagaagcggctgccagctctgaatctttaactgaaatgcacatggcaccaggaggtgtctctcatagttggttgctagcctaaaacatcagaatagaacccaaagggcttaggaaggcctgccaggataacaagaaggccctgtattcattgtgtttcatctgcctaggcctactcattattttagagaatgaatgaagcaacaaggaagagagaccatgactctatcgatgacactgtttatagaaacacaggagaggaagaatttggaatgaaaagcacttcgtcagaaccttctgtgggagccattgagagaaaagcatggtccagtgccttctgagaaaggccagagctttgggctttcctgctctgcttttgggtcgtcaatttgccatctctggttctgtgctataatcagaattgtaattatgttctccagaggccaatttcattaactctgattaattagaatcagctagccagattagtaacctctttgtccagccttgatttacagtgcagggtaaagtgcagaccttaaaaacagctaagtacctagaagagctccctgcaagtgtaaatattaaggatgacctgtgcaaaattatacccacaccagcactagtggtaattattctaaattattgccaaaaagttttttttaatctgtctttcaagtttacagaaaagaaagcagtaaatgcattgatgtcattttattatgtacatatatcatgtgcattcaagctgtgtgacaagatatatcaatataaaaacaaggtatatactttattattttttgaaaacaaggatattgtgatcaattttaccctgtaaaacatatttctgtatttataggtcttaaacatgatgaattttttctattacaagtttatttaaaactgctttctcaagtcgttattgatacagcaagtgaacctgctgcagacagaagcagaggaaagccaagaacagcctttattggtgaagaaaagaatgaatgattctttgtaggcgccatcagccacttttagaagccatcagccagtgtgttgggaaaagaggtttgtcaagtgttggcctatgggaaggtggtcaatgaatgttttgatgaaatgaatgtttttgtataatggccttaaacttttctggaagtatttcaaataaattacattattaagtcatc

SEQ ID NO: 175955 - DNA, 3992 bp, Homo sapiens
  Payload ID: 14545
  Gene Symbol: ARHGEF3
  Gene Name: Rho guanine nucleotide exchange factor (GEF) 3
  Uniprot ID: Q9NR81
  ENST ID: ENST00000413728
  CDS Start-End: 545-2143
gcagaagagctgtcagatctttcccttcagcacttaaatcattgtcacgcaatggctttcatcttgggagattcatcctctgcattttggaactgagccttcctagtgttctgagagttttctgctgtctgttcagcttagcacgctaagaagctggagaggtacccagcagcctggttgcattctccgtcttggaaaagtatttaactgctttgagaaatcatggaatcgtttctggccacattgtgagattgtattgaattttctttttaagtttttaaatttttatatgcaaatgctggaaagcttggagacagtctatttcaaagaaggctgttgatttctgagactggcaggggcataaaatgacatgagagtgtctcagcaggattccaaattcacgaaagatttttccaggcacctactatgttcagaacggggatgcagaaatatcctggagaatctgaagttctgccttaaccctcgaaactttgaaagcaatggctgaaaaggaaagatgaatacctagaggctccctctggaaatgattgaggtttgccaccacaattggctactttggctttgcccatcaaaatttggtatcttcatgtgctgtctagcatctactacaggtcagatggagcttaggaggacaagggagcctagtaataaacgggtcaaacccctttcccgagtcacgtcgctagcaaacctcatcccgcccgtgaaggccacgccattaaagcgcttcagtcaaaccctgcagcgctccattagcttccgcagtgagagccgccctgacatcctcgccccccgaccctggtccagaaatgccgccccctcgagcacgaaacggagagatagcaagctgtggagtgagaccttcgatgtgtgcgtcaatcagatgcttacatccaaggaaatcaaacgtcaggaggcgatctttgagctttcccaaggagaagaagacttgatagaagacttgaaattagcaaaaaaggcctatcatgaccccatgctgaaactctccataatgacagaacaagagttgaatcaaatttttggaacactggactctctaattcctctacatgaagagctccttagtcagcttcgagatgttaggaagcctgatggctcgactgaacatgttggtcccatcctcgtgggctggctcccttgcctcagctcctatgatagctactgcagcaatcaagtagccgccaaagctctgctggaccacaaaaagcaagatcaccgagtccaggatttcctacagcgatgtttagaatccccctttagccgcaaactagatctctggaatttcctcgatattccaagaagccgcctggtaaaataccctctgcttctccgagaaatcttgaggcacacaccaaatgataatccagatcagcagcacttggaagaagctataaatatcattcagggaattgtggcagaaatcaacaccaagactggtgaatctgaatgccgctattataaagagcggcttctttacttggaagaaggccagaaagactccctgatcgacagctctcgagtcttgtgttgtcatggtgaactgaagaacaatcggggcgtgaaactgcatgttttcctgttccaagaagtgcttgtgatcactcgagccgtcacccacaatgagcagctttgctaccagctgtaccgtcagccaatccccgtgaaagacctcctgctggaagacctccaggatggagaagtgaggctgggtggctccctgcgaggggcattcagcaacaatgagagaattaaaaacttcttcagagtcagtttcaaaaatggatcccaaagtcagacccactcgctacaagccaatgacactttcaacaaacagcagtggcttaactgtattcgtcaagccaaagaaacagttttgtgtgctgccgggcaagctggggtgcttgactccgagggatcgttcctaaatcccaccaccgggagcagagagctacagggagaaacaaaacttgagcagatggaccaatcggacagtgagtcagactgtagtatggacacgagtgaggtcagcctcgactgtgagcgcatggaacagacagactcttcctgtggaaacagcaggcacggtgaaagtaacgtctgacagaagcatgtgcacttcgggaagcaggcctgcatcttacctgtacagtatttgcattccacagatggaacggtttggagaagcactttttcatacttttgtgaaagtatacatgttggcccagtctctcgtatctgtacctttgtccctagtactgtaactgccaatctgtctgtgtaagctggaatctgtggcaactattaccctgtgttgtatttcccaagtgtctggatggatggagaggtactcaaacaagttactttcagttgtcctgctggattttaaaaaaatagaaaaagaatctcaaaactactgttttacatagattgtttgaagagtccttcctcttgtgcttctgtaccactttcccagctcttagatgtggtagctaaaggcacggaatttagacggccttgtaaatagggcatgaggaactcatctgtgtattgggatggtattagagagagaatcaggaaagaccaactcatgaagtgaacttggtttgatcttactcaactagaaagcttgaaaacatccctggggattctgaaggcttaattttgcaaaggaggatgcattgtctgaactttgcaacttcatccagtgcaagtttgatgcaagaatgtattaggacataaaatagaggctgaccttaaaagggccaggacagaagcggctgccagctctgaatctttaactgaaatgcacatggcaccaggaggtgtctctcatagttggttgctagcctaaaacatcagaatagaacccaaagggcttaggaaggcctgccaggataacaagaaggccctgtattcattgtgtttcatctgcctaggcctactcattattttagagaatgaatgaagcaacaaggaagagagaccatgactctatcgatgacactgtttatagaaacacaggagaggaagaatttggaatgaaaagcacttcgtcagaaccttctgtgggagccattgagagaaaagcatggtccagtgccttctgagaaaggccagagctttgggctttcctgctctgcttttgggtcgtcaatttgccatctctggttctgtgctataatcagaattgtaattatgttctccagaggccaatttcattaactctgattaattagaatcagctagccagattagtaacctctttgtccagccttgatttacagtgcagggtaaagtgcagaccttaaaaacagctaagtacctagaagagctccctgcaagtgtaaatattaaggatgacctgtgcaaaattatacccacaccagcactagtggtaattattctaaattattgccaaaaagttttttttaatctgtctttcaagtttacagaaaagaaagcagtaaatgcattgatgtcattttattatgtacatatatcatgtgcattcaagctgtgtgacaagatatatcaatataaaaacaaggtatatactttattattttttgaaaacaaggatattgtgatcaattttaccctgtaaaacatatttctgtatttataggtcttaaacatgatgaattttttctattacaagtttatttaaaactgctttctcaagtcgttattgatacagcaagtgaacctgctgcagacagaagcagaggaaagccaagaacagcctttattggtgaagaaaagaatgaatgattctttgtaggcgccatcagccacttttagaagccatcagccagtgtgttgggaaaagaggtttgtcaagtgttggcctatgggaaggtggtcaatgaatgttttgatgaaatgaatgtttttgtataatggccttaaacttttctggaagtatttcaaataaattacattattaagtc

SEQ ID NO: 175956 - DNA, 667 bp, Homo sapiens
  Payload ID: 14545
  Gene Symbol: ARHGEF3
  Gene Name: Rho guanine nucleotide exchange factor (GEF) 3
  ENST ID: ENST00000468727
  CDS Start-End: 115-667
agcccaggggagccgccgccgcagccgccgccgccgcggtgagttttccagcctggagaggccgaaccagcgcgggggtcgaggcctaaacggcagcggcaaaacaactttcccatgtttccctctcctaaagcctggaatttcagagggcgaaaacggaaacagagcacccaagatgaagatgctgttagcctttgcagtctcgacataagtgagcctagtaataaacgggtcaaacccctttcccgagtcacgtcgctagcaaacctcatcccgcccgtgaaggccacgccattaaagcgcttcagtcaaaccctgcagcgctccattagcttccgcagtgagagccgccctgacatcctcgccccccgaccctggtccagaaatgccgccccctcgagcacgaaacggagagatagcaagctgtggagtgagaccttcgatgtgtgcgtcaatcagatgcttacatccaaggaaatcaaacgtcaggaggcgatctttgagctttcccaaggagaagaagacttgatagaagacttgaaattagcaaaaaaggcctatcatgaccccatgctgaaactctccataatgacagaacaagagttgaatcaaatttttggaacactggactctctaattcctctacatgaagagctccttagtcagc

SEQ ID NO: 175957 - DNA, 2693 bp, Homo sapiens
  Payload ID: 14545
  Gene Symbol: ARHGEF3
  Gene Name: Rho guanine nucleotide exchange factor (GEF) 3
  ENST ID: ENST00000465659
  CDS Start-End: 1-709
agtcgagtcctgcccggctagaagccggctgtcggtctccgtgtcgccgccgccgcccggcatcgtggagctggggcccccttttgcctgggagttttgtagtcgcctagggtcagcggtgacatcccaaagggcaggcccggcagccgccatggtggccaaggattaccccttctacctcacggtcaagagagcgaactgcagcctggagctacccccggccagcggtccggccaaggacgctgaggagcctagtaataaacgggtcaaacccctttcccgagtcacgtcgctagcaaacctcatcccgcccgtgaaggccacgccattaaagcgcttcagtcaaaccctgcagcgctccattagcttccgcagtgagagccgccctgacatcctcgccccccgaccctggtccagaaatgccgccccctcgagcacgaaacggagagatagcaagctgtggagtgagaccttcgatgtgtgcgtcaatcagatgcttacatccaaggaaatcaaacgtcaggaggcgatctttgagctttcccaaggagaagaagacttgatagaagacttgaaattagcaaaaaaggcctatcatgaccccatgctgaaactctccataatgacagaacaagagttgaatcaaatttttggaacactggactctctaattcctctacatgaagctcccttgcctcagctcctatgatagctactgcagcaatcaagtagccgccaaagctctgctggaccacaaaaagcaagatcaccgagtccaggatttcctacagcgatgtttagaatccccctttagccgcaaactagatctctggaatttcctcgatattccaagaagccgcctggtaaaataccctctgcttctccgagaaatcttgaggcacacaccaaatgataatccagatcagcagcacttggaagaagctataaatatcattcagggaattgtggcagaaatcaacaccaagactggtgaatctgaatgccgctattataaagagcggcttctttacttggaagaaggccagaaagactccctgatcgacagctctcgagtcttgtgttgtcatggtgaactgaagaacaatcggggcgtgaaactgcatgttttcctgttccaagaagtgcttgtgatcactcgagccgtcacccacaatgagcagctttgctaccagctgtaccgtcagccaatccccgtgaaagacctcctgctggaagacctccaggatggagaagtgaggctgggtggctccctgcgaggggcattcagcaacaatgagagaattaaaaacttcttcagagtcagtttcaaaaatggatcccaaagtcagacccactcgctacaagccaatgacactttcaacaaacagcagtggcttaactgtattcgtcaagccaaagaaacagttttgtgtgctgccgggcaagctggggtgcttgactccgagggatcgttcctaaatcccaccaccgggagcagagagctacagggagaaacaaaacttgagcagatggaccaatcggacagtgagtcagactgtagtatggacacgagtgaggtcagcctcgactgtgagcgcatggaacagacagactcttcctgtggaaacagcaggcacggtgaaagtaacgtctgacagaagcatgtgcacttcgggaagcaggcctgcatcttacctgtacagtatttgcattccacagatggaacggtttggagaagcactttttcatacttttgtgaaagtatacatgttggcccagtctctcgtatctgtacctttgtccctagtactgtaactgccaatctgtctgtgtaagctggaatctgtggcaactattaccctgtgttgtatttcccaagtgtctggatggatggagaggtactcaaacaagttactttcagttgtcctgctggattttaaaaaaatagaaaaagaatctcaaaactactgttttacatagattgtttgaagagtccttcctcttgtgcttctgtaccactttcccagctcttagatgtggtagctaaaggcacggaatttagacggccttgtaaatagggcatgaggaactcatctgtgtattgggatggtattagagagagaatcaggaaagaccaactcatgaagtgaacttggtttgatcttactcaactagaaagcttgaaaacatccctggggattctgaaggcttaattttgcaaaggaggatgcattgtctgaactttgcaacttcatccagtgcaagtttgatgcaagaatgtattaggacataaaatagaggctgaccttaaaagggccaggacagaagcggctgccagctctgaatctttaactgaaatgcacatggcaccaggaggtgtctctcatagttggttgctagcctaaaacatcagaatagaacccaaagggcttaggaaggcctgccaggataacaagaaggccctgtattcattgtgtttcatctgcctaggcctactcattattttagagaatgaatgaagcaacaaggaagagagaccatgactctatcgatgacactgtttatagaaacacaggagaggaagaatttggaatgaaaagcacttcgtcagaaccttctgtgggagccattgagagaaaagcatggtccagtgccttctgagaaaggccagagctttgggctttcctgctctg

SEQ ID NO: 175958 - DNA, 2024 bp, Homo sapiens
  Payload ID: 14545
  Gene Symbol: ARHGEF3
  Gene Name: Rho guanine nucleotide exchange factor (GEF) 3
  ENST ID: ENST00000495373
  CDS Start-End: 152-1402
agtcgagtcctgcccggctagaagccggctgtcggtctccgtgtcgccgccgccgcccggcatcgtggagctggggcccccttttgcctgggagttttgtagtcgcctagggtcagcggtgacatcccaaagggcaggcccggcagccgccatggtggccaaggattaccccttctacctcacggtcaagagagcgaactgcagcctggagctacccccggccagcggtccggccaaggacgctgaggagcctagtaataaacgggtcaaacccctttcccgagtcacgtcgctagcaaacctcatcccgcccgtgaaggccacgccattaaagcgcttcagtcaaaccctgcagcgctccattagcttccgcagtgagagccgccctgacatcctcgccccccgaccctggtccagaaatgccgccccctcgagcacgaaacggagagatagcaagctgtggagtgagaccttcgatgtgtgcgtcaatcagatgcttacatccaaggaaatcaaacgtcaggaggcgatctttgagctttcccaaggagaagaagacttgatagaagacttgaaattagcaaaaaaggcctatcatgaccccatgctgaaactctccataatgacagaacaagagttgaatcaaatttttggaacactggactctctaattcctctacatgaagagctccttagtcagcttcgagatgttaggaagcctgatggctcgactgaacatgttggtcccatcctcgtgggctggctcccttgcctcagctcctatgatagctactgcagcaatcaagtagccgccaaagctctgctggaccacaaaaagcaagatcaccgagtccaggatttcctacagcgatgtttagaatccccctttagccgcaaactagatctctggaatttcctcgatattccaagaagccgcctggtaaaataccctctgcttctccgagaaatcttgaggcacacaccaaatgataatccagatcagcagcacttggaagaagctataaatatcattcagggaattgtggcagaaatcaacaccaagactggtgaatctgaatgccgctattataaagagcggcttctttacttggaagaaggccagaaagactccctgatcgacagctctcgagtcttgtgttgtcatggtgaactgaagaacaatcggggcgtgaaactgcatgttttcctgttccaagaagtgcttgtgatcactcgagccgtcacccacaatgagcagctttgctaccagctgtaccgtcagccaatccccgtgaaagacctcctgctggaagacctccaggatggagaagtgaggctgggtggctccctgcgaggggcattcagcaacaatgagagaagtatggatagcagtcggggttgacctgttgaatgtttttggccgtggtagtttggagggagtgggcagctggtggaaagagaaaagccacggtcttgaagtcaaactgcatttgtatgctatttcatcacttcctgattatgtactttgtttagtccctgtgattctcagtttctcatctccaaaatggaaatgcataggtacctccttcataagattgttataaggatttagtaagataatctaagtgaaactgtctgcacatagttagtgctccttaagttccctttctctgtctttttccattggataaaaacatgcttaataccagatagtccctacatggatgccagttgcgttatggtgggttttgcagctgaactggtaaacttgtccctaaagagacataagaatggtcaactggaatgtggattcatctgtaacattactcagtgggcctaatttaagacttaataaacaaattaactaaaagaagccaagatagcaatatctatcgagtatctaacatgatactcggtgaaacaagcaggtaacttccttcccctatggagcttgcattgtgatggaggagaaagatgataaacaaatgaatactccaggtgttgttaagaaaacttaaaacccg

SEQ ID NO: 175959 - DNA, 514 bp, Homo sapiens
  Payload ID: 14545
  Gene Symbol: ARHGEF3
  Gene Name: Rho guanine nucleotide exchange factor (GEF) 3
  ENST ID: ENST00000468466
  CDS Start-End: 215-514
ttttccagcctggagaggccgaaccagcgcgggggtcgaggtttattgtgtgcatccaccaaggagaatgtaggattcaagaggacagaggtgtgttgtcctgttgactactgactcctgctccatggcatacagcgggtgcacaataactgtcctgagtgaatgaacacccattgactgaagtgaggagacctgagcctgccatactgagtctatggacagttccacagcaatgaatcaatgcagctgtagaggaatggaagaaaacaaggaaaggcctaaacggcagcggcaaaacaactttcccatgtttccctctcctaaagcctggaatttcagagggcgaaaacggaaacagagcacccaagatgaagatgctgttagcctttgcagtctcgacataagtgagcctagtaataaacgggtcaaacccctttcccgagtcacgtcgctagcaaacctcatcccgcccgtgaaggccacgccattaaagcgcttcagtcaaaccctgcag

SEQ ID NO: 175960 - DNA, 2197 bp, Homo sapiens
  Payload ID: 14545
  Gene Symbol: ARHGEF3
  Gene Name: Rho guanine nucleotide exchange factor (GEF) 3
  ENST ID: ENST00000497267
  CDS Start-End: 455-1948
aactgagccttcctagtgttctgagagttttctgctgtctgttcagcttagcacgctaagaagctggagaggtacccagcagcctggttgcattctccgtcttggaaaagtatttaactgctttgagaaatcatggaatcgtttctggccacattgtgagattgtattgaattttctttttaagtttttaaatttttatatgcaaatgctggaaagcttggagacagtctatttcaaagaaggctgttgatttctgagactggcaggggcataaaatgacatgagagtgtctcagcaggattccaaattcacgaaagatttttccaggcacctactatgttcagaacggggatgcagaaatatcctggagaatctgaagttctgccttaaccctcgaaactttgaaagcaatggctgaaaaggaaagatgaatacctagaggctccctctggaaatgattgaggagcctagtaataaacgggtcaaacccctttcccgagtcacgtcgctagcaaacctcatcccgcccgtgaaggccacgccattaaagcgcttcagtcaaaccctgcagcgctccattagcttccgcagtgagagccgccctgacatcctcgccccccgaccctggtccagaaatgccgccccctcgagcacgaaacggagagatagcaagctgtggagtgagaccttcgatgtgtgcgtcaatcagatgcttacatccaaggaaatcaaacgtcaggaggcgatctttgagctttcccaaggagaagaagacttgatagaagacttgaaattagcaaaaaaggcctatcatgaccccatgctgaaactctccataatgacagaacaagagttgaatcaaatttttggaacactggactctctaattcctctacatgaagagctccttagtcagcttcgagatgttaggaagcctgatggctcgactgaacatgttggtcccatcctcgtgggctggctcccttgcctcagctcctatgatagctactgcagcaatcaagtagccgccaaagctctgctggaccacaaaaagcaagatcaccgagtccaggatttcctacagcgatgtttagaatccccctttagccgcaaactagatctctggaatttcctcgatattccaagaagccgcctggtaaaataccctctgcttctccgagaaatcttgaggcacacaccaaatgataatccagatcagcagcacttggaagaagctataaatatcattcagggaattgtggcagaaatcaacaccaagactggtgaatctgaatgccgctattataaagagcggcttctttacttggaagaaggccagaaagactccctgatcgacagctctcgagtcttgtgttgtcatggtgaactgaagaacaatcggggcgtgaaactgcatgttttcctgttccaagaagtgcttgtgatcactcgagccgtcacccacaatgagcagctttgctaccagctgtaccgtcagccaatccccgtgaaagacctcctgctggaagacctccaggatggagaagtgaggctgggtggctccctgcgaggggcattcagcaacaatgagagaattaaaaacttcttcagagtcagtttcaaaaatggatcccaaagtcagacccactcgctacaagccaatgacactttcaacaaacagcagtggcttaactgtattcgtcaagccaaagaaacagttttgtgtgctgccgggcaagctggggtgcttgactccgagggatcgttcctaaatcccaccaccgggagcagagagctacagggagaaacaaaacttgagcagatggaccaatcggacagtgagtcagactgtagtatggacacgagtgaggtcagcctcgactgtgagcgcatggaacagacagactcttcctgtggaaacagcaggcacggtgaaagtaacgtctgacagaagcatgtgcacttcgggaagcaggcctgcatcttacctgtacagtatttgcattccacagatggaacggtttggagaagcactttttcatacttttgtgaaagtatacatgttggcccagtctctcgtatctgtacctttgtccctagtactgtaactgccaatctgtctgtgtaagctggaatctgtggcaactattaccctgtgttgtatttcccaagtgtctggatggatggagaggtactc

SEQ ID NO: 175961 - DNA, 757 bp, Homo sapiens
  Payload ID: 14545
  Gene Symbol: ARHGEF3
  Gene Name: Rho guanine nucleotide exchange factor (GEF) 3
  ENST ID: ENST00000477833
  CDS Start-End: 132-284
tccccgcccccggccccgcccagcccaggggagccgccgccgcagccgccgccgccgcggtgagttttccagcctggagaggccgaaccagcgcgggggtcgaggagacctgagcctgccatactgagtctatggacagttccacagcaatgaatcaatgcagctgtagaggaatggaagaaaacaaggaaagggctgttggaggtgtttctggaaccagcgcaatcaatggcaggaacaactggtttttcaggctattgagaaagtctgatttatgtggctgaagtatggtgttattgacccccccaccttcgactcctaagattccagaacaaactgagaattcatgcctaaacggcagcggcaaaacaactttcccatgtttccctctcctaaagcctggaatttcagagggcgaaaacggaaacagagcacccaagatgaagatgctgttagcctttgcagtctcgacataagtgagcctagtaataaacgggtcaaacccctttcccgagtcacgtcgctagcaaacctcatcccgcccgtgaaggccacgccattaaagcgcttcagtcaaaccctgcagcgctccattagcttccgcagtgagagccgccctgacatcctcgccccccgaccctggtccagaaatgccgccccctcgagcacgaaacggagagatagcaagctgtggagtgagaccttcgatgtgtgcgtcaatcagatgcttacatccaaggaaatcaaacgtcaggag

SEQ ID NO: 175962 - DNA, 669 bp, Homo sapiens
  Payload ID: 14545
  Gene Symbol: ARHGEF3
  Gene Name: Rho guanine nucleotide exchange factor (GEF) 3
  ENST ID: ENST00000473779
  CDS Start-End: 81-669
aggagcccatctggtgagctgagagttagtgaggggcccaagagaatggggcttgctctgccctgtgctttagatggaccatgtttgatagaaatatttggcctaaacggcagcggcaaaacaactttcccatgtttccctctcctaaagcctggaatttcagagggcgaaaacggaaacagagcacccaagatgaagatgctgttagcctttgcagtctcgacataagtgagcctagtaataaacgggtcaaacccctttcccgagtcacgtcgctagcaaacctcatcccgcccgtgaaggccacgccattaaagcgcttcagtcaaaccctgcagcgctccattagcttccgcagtgagagccgccctgacatcctcgccccccgaccctggtccagaaatgccgccccctcgagcacgaaacggagagatagcaagctgtggagtgagaccttcgatgtgtgcgtcaatcagatgcttacatccaaggaaatcaaacgtcaggaggcgatctttgagctttcccaaggagaagaagacttgatagaagacttgaaattagcaaaaaaggcctatcatgaccccatgctgaaactctccataatgacagaacaagagttgaatcaaatttttggaacactggactctctaattcctctacatgaag

SEQ ID NO: 175963 - DNA, 1994 bp, Homo sapiens
  Payload ID: 14545
  Gene Symbol: ARHGEF3
  Gene Name: Rho guanine nucleotide exchange factor (GEF) 3
  ENST ID: ENST00000496106
  CDS Start-End: 113-1711
atgcagcccaagtggcggggaggagttccttcagggaaactatgctcagccctgttcagagaatcctgtgcacagggctccactgcagttaggagccggtgagtccgggtggatgaggtcagagcgccccatggtgtggtgctgcctctttgtccgttcgcagcgaaaacggaaacagagcacccaagatgaagatgctgttagcctttgcagtctcgacataagtgagcctagtaataaacgggtcaaacccctttcccgagtcacgtcgctagcaaacctcatcccgcccgtgaaggccacgccattaaagcgcttcagtcaaaccctgcagcgctccattagcttccgcagtgagagccgccctgacatcctcgccccccgaccctggtccagaaatgccgccccctcgagcacgaaacggagagatagcaagctgtggagtgagaccttcgatgtgtgcgtcaatcagatgcttacatccaaggaaatcaaacgtcaggaggcgatctttgagctttcccaaggagaagaagacttgatagaagacttgaaattagcaaaaaaggcctatcatgaccccatgctgaaactctccataatgacagaacaagagttgaatcaaatttttggaacactggactctctaattcctctacatgaagagctccttagtcagcttcgagatgttaggaagcctgatggctcgactgaacatgttggtcccatcctcgtgggctggctcccttgcctcagctcctatgatagctactgcagcaatcaagtagccgccaaagctctgctggaccacaaaaagcaagatcaccgagtccaggatttcctacagcgatgtttagaatccccctttagccgcaaactagatctctggaatttcctcgatattccaagaagccgcctggtaaaataccctctgcttctccgagaaatcttgaggcacacaccaaatgataatccagatcagcagcacttggaagaagctataaatatcattcagggaattgtggcagaaatcaacaccaagactggtgaatctgaatgccgctattataaagagcggcttctttacttggaagaaggccagaaagactccctgatcgacagctctcgagtcttgtgttgtcatggtgaactgaagaacaatcggggcgtgaaactgcatgttttcctgttccaagaagtgcttgtgatcactcgagccgtcacccacaatgagcagctttgctaccagctgtaccgtcagccaatccccgtgaaagacctcctgctggaagacctccaggatggagaagtgaggctgggtggctccctgcgaggggcattcagcaacaatgagagaattaaaaacttcttcagagtcagtttcaaaaatggatcccaaagtcagacccactcgctacaagccaatgacactttcaacaaacagcagtggcttaactgtattcgtcaagccaaagaaacagttttgtgtgctgccgggcaagctggggtgcttgactccgagggatcgttcctaaatcccaccaccgggagcagagagctacagggagaaacaaaacttgagcagatggaccaatcggacagtgagtcagactgtagtatggacacgagtgaggtcagcctcgactgtgagcgcatggaacagacagactcttcctgtggaaacagcaggcacggtgaaagtaacgtctgacagaagcatgtgcacttcgggaagcaggcctgcatcttacctgtacagtatttgcattccacagatggaacggtttggagaagcactttttcatacttttgtgaaagtatacatgttggcccagtctctcgtatctgtacctttgtccctagtactgtaactgccaatctgtctgtgtaagctggaatctgtggcaactattaccctgtgttgtatttcccaagtgtctggatggatggagaggtactcaaacaagttactttcagttgtcctgctggatttt

SEQ ID NO: 175964 - DNA, 428 bp, Homo sapiens
  Payload ID: 14545
  Gene Symbol: ARHGEF3
  Gene Name: Rho guanine nucleotide exchange factor (GEF) 3
  ENST ID: ENST00000486829
  CDS Start-End: 81-293
aggagcccatctggtgagctgagagttagtgaggggcccaagagaatggggcttgctctgccctgtgctttagatggaccatgtttgatagaaatatttgtcctgttatacttcatgtaaagagaaccaactcagtattggctctgcgcctggtacatagcctaaacggcagcggcaaaacaactttcccatgtttccctctcctaaagcctggaatttcagagggttcttccagggatcaccccagaagaaaacagctgatacttacatctttgctccaggatctgctttaggggaactccaaactaacagcagcgaaaacggaaacagagcacccaagatgaagatgctgttagcctttgcagtctcgacataagtgagcctagtaataaacgggtcaaacccctttcccgagtcacgtcgctagc

SEQ ID NO: 175965 - DNA, 4300 bp, Homo sapiens
  Payload ID: 14546
  Gene Symbol: ARHGEF33
  Gene Name: Rho guanine nucleotide exchange factor (GEF) 33
  Uniprot ID: A8MVX0
  ENST ID: ENST00000398800
  CDS Start-End: 86-2698
gtgcagggaagaggaggtggcctgagccaggacgatgaggatgcaatgttgaagaataagctggagaagagaagtaaccggcactatggaaaaaaccaaaacaaagcaaggagagaatgaacatatgccggtgaataatccttccacgcagatttaccagttgcaggccctagcctccgaactcaaaactggtttcacagaagcaatgcaagaactgtcaagaattcaacatggagaatatgctttggaagaaaaggttaagagctgcagatgttccatggaagaaaaagttactgagatgaagaattcattaaactatttcaaggaagagctgagcaatgccatgtcgatgatccaagccatcacttccaaacaagaagaaatgcaacagaaaatcgagcagcttcaacaggagaagcgaagagaatctcgaaaagttaaagccaagaaaactcaaaaagaagagcacagctcacaggccgggcctgcccaagcacaaggaagtccttttcgttctatcaatatccctgagcctgttcttccaagcgaagactttaccaaccttttgccttctcaggcctacgagaaagcccaagagtccagatctgttcatgtaggagacagtaatgtaaaaggaatgatgggtcctggagtgaacccaacaactccagaagcagaagaaaacctcaagtcttgcctctcggctgatatccagtccaagggccatctcccatctggcatgtggaggcagcctaaggatggtaaagaatggggtgaagaatacgtcacaaaagaccacccagataaactcaaggaggctggccagggtagacacagctccttggaaaacgttttatgtgaaacctccttagctgctaaaagacagactgtggccctggaactgcttgaatctgaaagaaaatatgtcattaacatctctctgatcttgaagataaaagccacattccaggggtcagatggaaagaggaattccaaagagagaagcctcttccctggctctttacggtacctcgtccagcagcacctggatctgcttcacgcactgcaggaaagggtcctgaagtggccacgccaaggcgttcttggagatttattccttaagttaacaaatgacgagaataatttcttggattattatgttgcctacctaagggacctgcctgagtgcatctcattggttcatgttgtagtcctgaaagagggtgatgaagagattaaatctgacatctacacgttgttttttcacatagtccagcgcatccctgaatatctgatacatctgcagaacgtcctgaagttcacagagcaggagcaccctgactattatctactactggtgtgtgtccagcgcctccgagtatttatctcacactacaccctgctgtttcaatgcaatgaagatttgcttattcagaaacggaaaaagctcaagaagtcatccatggcgaagctgtacaaagggctggcttcccagtgtgccaatgctgggcaagatgcttcccccactgcaggtcctgaggctgtccgtgacactgggatccactcagaagagttgctgcaaccctacccttctgctcccagttctggccctgccatcacacatctgatgcccccagtgaagaaaagccaacagcagcaaagcctgatggagagcatgcagcccgggaagcccagtgactgggagctggagggcaggaagcacgagcggcccgagagccttctggcaccgacgcagttctgcgcggccgagcaggacgtgaaggcgctggccgggcccctgcaggccatcccggagatggacttcgagtcctctccggcggagccgctgggcaacgtggagcgctccctgcgcgccccggccgagctcctgcccgatgcccgcggcttcgtgcccgcggcctacgaagagttcgagtacggcggcgagatcttcgcgctgcccgcgccctacgacgaggagccgttccaggctccggccctcttcgagaactgctcgcctgcctcctccgagtccagcctggacatctgcttcctgcggcccgtcagcttcgccatggaggccgagcggccggagcacccgctgcagccgctgcccaagagcgctacgtcgccggcgggcagcagcagcgcctacaaactggaggcggcggcgcaggcgcacggcaaggccaagccgctgagccgctctctcaaagagttcccgcgtgcgccgccagccgacggcgtggccccacgcctctacagcacgcgcagcagcagcggcggccgcgcgcccatcaaggccgagcgcgccgcgcaggcgcacggcccggccgccgccgccgtcgccgcccgcggcgcatccaggaccttcttcccccaacagaggtcccaaagcgaaaaacagacctatttggaagtaaggagggagatgcatttagaagatactaccagattctgtcccaaagaagaaagagaaagtgaacaaacatctttcagcgatcaaaatcccaggcaagaccagaaggggggctttcgcagctccttccgcaagctctttaaaaagaagtccagtggatcagaatacagggaaaaaactaatgagaatccctcaatggatccttcacccaccaaacaagatttcttcagaaaccgacttgctcttgcaaatgaccttgaccaaggaacagctgtgtaaaacatacttaaagttgtattgtcaagtggtaagatgaggataaaaagcttgtatatatctgtgtaggaatatatatatatatctatatctatatatatatatatatcgatgtataaatccctgaggaaaactaatataaatacttacatatgaaactaaacatacaagacattgaagagatgaagattagtttctggttaagatctggctttttgaacctcaacactggggaaaagggaaatgaagacttttcacatcattacagaaaaacacaataaatttggaggaaaataaatgtttgtaagaatgaaaacttccaacttgaagtcattccccgagtataatactgagcatgttcatatttaacatggatttgaattttatgcttcctaggcatttaacttattaactcatccagtgttcttaaactaatatacactatgttaggggccagttctgtcttgcttcatgtcttccaaaaaccctaaggcaatatctaacatcccttaaggcaaaggattaattaacagaactgtattttatatgttgcatatctgagttatggagaatttgtgcttaaaccatgattcagaaggttcaaagcttaaaaacacattgatctccaaacttgttctgtggttatggaaatcagtaaagggaacaaggatttctgtagaaactggggagagaggaaggcaaagaaacattttcccttgtgtgggttgagctgaggatggaaacagtccagtctgtgttttattgagtactcagtattcaagacccactcgtgatcttgagtgtcacacacactcacaaccagatggactaggaaaaaagcagtgatttagccacatcttgttaaaaagactttctgcagcctgaaaagaaggtggcaatagcaccaaaacttcaatggctcacacacagcagttgctacaaacagcaggtcaaagtgaaaattcaggattgcagcacttgactgttttcctattttgtaaagaaaccaagctcttaaagcttagaggaatcagattgcaacgaggcctgcctggctctggggtgataaaatgtgctctgtttccacatggatatgtgcaagatggtcagcatccttgatatgccccaaacatcagatttataatagaaaaaaaattgggtttaaacaatttgtctttattcccaggcagttcggtatagtaaattaggggtatttggtttctgttcattcaaaatcttggtactcaaactggtgtcttcagaagctgttcctctattgaagcgtttgttgataaaataggcaaaggttcacatgtaagtgttgcaagttttcttctccttgtctgatgacaaattaggaactcacctactgcgttttgaatagtagttgtctggaacacataaaggatcactgccaagttttttgagtttccaggatctaagtttaagccaagatttttgtttcccagaagtttatgaattcatttgaaattagatttttctcttattatgtggccggcagtgcttgcaagcacaacgccaaatcgactggacgtggaaagtgaaatactacagaagtcacaatctattaaataaaatgttaac

SEQ ID NO: 175966 - DNA, 4484 bp, Homo sapiens
  Payload ID: 14546
  Gene Symbol: ARHGEF33
  Gene Name: Rho guanine nucleotide exchange factor (GEF) 33
  Uniprot ID: A8MVX0
  ENST ID: ENST00000409978
  CDS Start-End: 266-2878
aggggaagtcaagcctctctactgcttctttttataacctttaagttaattcagaacccagataagccttgatctgaggatgatataaccaccgcaggcaacatgggaacttctagagaaaacaagaagaagacttcaaaaaacatgctgtgatgtctcccagtggagacagggcacgaggtgcagggaagaggaggtggcctgagccaggacgatgaggatgcaatgttgaagaataagctggagaagagaagtaaccggcactatggaaaaaaccaaaacaaagcaaggagagaatgaacatatgccggtgaataatccttccacgcagatttaccagttgcaggccctagcctccgaactcaaaactggtttcacagaagcaatgcaagaactgtcaagaattcaacatggagaatatgctttggaagaaaaggttaagagctgcagatgttccatggaagaaaaagttactgagatgaagaattcattaaactatttcaaggaagagctgagcaatgccatgtcgatgatccaagccatcacttccaaacaagaagaaatgcaacagaaaatcgagcagcttcaacaggagaagcgaagagaatctcgaaaagttaaagccaagaaaactcaaaaagaagagcacagctcacaggccgggcctgcccaagcacaaggaagtccttttcgttctatcaatatccctgagcctgttcttccaagcgaagactttaccaaccttttgccttctcaggcctacgagaaagcccaagagtccagatctgttcatgtaggagacagtaatgtaaaaggaatgatgggtcctggagtgaacccaacaactccagaagcagaagaaaacctcaagtcttgcctctcggctgatatccagtccaagggccatctcccatctggcatgtggaggcagcctaaggatggtaaagaatggggtgaagaatacgtcacaaaagaccacccagataaactcaaggaggctggccagggtagacacagctccttggaaaacgttttatgtgaaacctccttagctgctaaaagacagactgtggccctggaactgcttgaatctgaaagaaaatatgtcattaacatctctctgatcttgaagataaaagccacattccaggggtcagatggaaagaggaattccaaagagagaagcctcttccctggctctttacggtacctcgtccagcagcacctggatctgcttcacgcactgcaggaaagggtcctgaagtggccacgccaaggcgttcttggagatttattccttaagttaacaaatgacgagaataatttcttggattattatgttgcctacctaagggacctgcctgagtgcatctcattggttcatgttgtagtcctgaaagagggtgatgaagagattaaatctgacatctacacgttgttttttcacatagtccagcgcatccctgaatatctgatacatctgcagaacgtcctgaagttcacagagcaggagcaccctgactattatctactactggtgtgtgtccagcgcctccgagtatttatctcacactacaccctgctgtttcaatgcaatgaagatttgcttattcagaaacggaaaaagctcaagaagtcatccatggcgaagctgtacaaagggctggcttcccagtgtgccaatgctgggcaagatgcttcccccactgcaggtcctgaggctgtccgtgacactgggatccactcagaagagttgctgcaaccctacccttctgctcccagttctggccctgccatcacacatctgatgcccccagtgaagaaaagccaacagcagcaaagcctgatggagagcatgcagcccgggaagcccagtgactgggagctggagggcaggaagcacgagcggcccgagagccttctggcaccgacgcagttctgcgcggccgagcaggacgtgaaggcgctggccgggcccctgcaggccatcccggagatggacttcgagtcctctccggcggagccgctgggcaacgtggagcgctccctgcgcgccccggccgagctcctgcccgatgcccgcggcttcgtgcccgcggcctacgaagagttcgagtacggcggcgagatcttcgcgctgcccgcgccctacgacgaggagccgttccaggctccggccctcttcgagaactgctcgcctgcctcctccgagtccagcctggacatctgcttcctgcggcccgtcagcttcgccatggaggccgagcggccggagcacccgctgcagccgctgcccaagagcgctacgtcgccggcgggcagcagcagcgcctacaaactggaggcggcggcgcaggcgcacggcaaggccaagccgctgagccgctctctcaaagagttcccgcgtgcgccgccagccgacggcgtggccccacgcctctacagcacgcgcagcagcagcggcggccgcgcgcccatcaaggccgagcgcgccgcgcaggcgcacggcccggccgccgccgccgtcgccgcccgcggcgcatccaggaccttcttcccccaacagaggtcccaaagcgaaaaacagacctatttggaagtaaggagggagatgcatttagaagatactaccagattctgtcccaaagaagaaagagaaagtgaacaaacatctttcagcgatcaaaatcccaggcaagaccagaaggggggctttcgcagctccttccgcaagctctttaaaaagaagtccagtggatcagaatacagggaaaaaactaatgagaatccctcaatggatccttcacccaccaaacaagatttcttcagaaaccgacttgctcttgcaaatgaccttgaccaaggaacagctgtgtaaaacatacttaaagttgtattgtcaagtggtaagatgaggataaaaagcttgtatatatctgtgtaggaatatatatatatatctatatctatatatatatatatatcgatgtataaatccctgaggaaaactaatataaatacttacatatgaaactaaacatacaagacattgaagagatgaagattagtttctggttaagatctggctttttgaacctcaacactggggaaaagggaaatgaagacttttcacatcattacagaaaaacacaataaatttggaggaaaataaatgtttgtaagaatgaaaacttccaacttgaagtcattccccgagtataatactgagcatgttcatatttaacatggatttgaattttatgcttcctaggcatttaacttattaactcatccagtgttcttaaactaatatacactatgttaggggccagttctgtcttgcttcatgtcttccaaaaaccctaaggcaatatctaacatcccttaaggcaaaggattaattaacagaactgtattttatatgttgcatatctgagttatggagaatttgtgcttaaaccatgattcagaaggttcaaagcttaaaaacacattgatctccaaacttgttctgtggttatggaaatcagtaaagggaacaaggatttctgtagaaactggggagagaggaaggcaaagaaacattttcccttgtgtgggttgagctgaggatggaaacagtccagtctgtgttttattgagtactcagtattcaagacccactcgtgatcttgagtgtcacacacactcacaaccagatggactaggaaaaaagcagtgatttagccacatcttgttaaaaagactttctgcagcctgaaaagaaggtggcaatagcaccaaaacttcaatggctcacacacagcagttgctacaaacagcaggtcaaagtgaaaattcaggattgcagcacttgactgttttcctattttgtaaagaaaccaagctcttaaagcttagaggaatcagattgcaacgaggcctgcctggctctggggtgataaaatgtgctctgtttccacatggatatgtgcaagatggtcagcatccttgatatgccccaaacatcagatttataatagaaaaaaaattgggtttaaacaatttgtctttattcccaggcagttcggtatagtaaattaggggtatttggtttctgttcattcaaaatcttggtactcaaactggtgtcttcagaagctgttcctctattgaagcgtttgttgataaaataggcaaaggttcacatgtaagtgttgcaagttttcttctccttgtctgatgacaaattaggaactcacctactgcgttttgaatagtagttgtctggaacacataaaggatcactgccaagttttttgagtttccaggatctaagtttaagccaagatttttgtttcccagaagtttatgaattcatttgaaattagatttttctcttattatgtggccggcagtgcttgcaagcacaacgccaaatcgactggacgtggaaagtgaaatactacagaagtcacaatctattaaataaaatgttaacataa

SEQ ID NO: 175967 - DNA, 514 bp, Homo sapiens
  Payload ID: 14546
  Gene Symbol: ARHGEF33
  Gene Name: Rho guanine nucleotide exchange factor (GEF) 33
  ENST ID: ENST00000411874
  CDS Start-End: 1-328
cggccgcgcgcccatcaaggccgagcgcgccgcgcaggcgcacggcccggccgccgccgccgtcgccgcccgcggcgcatccaggaccttcttcccccaacagaggtcccaaagcgaaaaacagacctatttggaagagatgcatttagaagatactaccagattctgtcccaaagaagaaagagaaagtgaacaaacatctttcagcgatcaaaatcccaggcaagaccagaaggggggctttcgcagctccttccgcaagctctttaaaaagaaaaatgggaacgcaactggtgaagatttctgtggtccttggggctggtggtgacatcaaagctttcctattttcagattttaggtccagtggatcagaatacagggaaaaaactaatgagaatccctcaatggatccttcacccaccaaacaagatttcttcagaaaccgacttgctcttgcaaatgaccttgaccaaggaacagctgtgtaaaacatacttaaagttgtattgtcaag

SEQ ID NO: 175968 - DNA, 594 bp, Homo sapiens
  Payload ID: 14546
  Gene Symbol: ARHGEF33
  Gene Name: Rho guanine nucleotide exchange factor (GEF) 33
  ENST ID: ENST00000433605
  CDS Start-End: 1-327
ggccgcgcgcccatcaaggccgagcgcgccgcgcaggcgcacggcccggccgccgccgccgtcgccgcccgcggcgcatccaggaccttcttcccccaacagaggtcccaaagcgaaaaacagacctatttggaagagatgcatttagaagatactaccagattctgtcccaaagaagaaagagaaagtgaacaaacatctttcagcgatcaaaatcccaggcaagaccagaaggggggctttcgcagctccttccgcaagctctttaaaaagaaaaatgggaacgcaactggtgaagatttctgtggtccttggggctggtggtgacatcaaagctttcctattttcagggacttctgacatgagaaaactggagaaggtgcagagctggaatggattacccaagtggcttaagcaagataaaggaagaatgcaccctcgactggggactcaaatggactgatctgagttgttgactattgattggctttggtctcttttgtggtggttgagattatagtatctctgcaatctgattactgtacgaatttctgcattctaccaaatgtagcatatatgtgtggttggcttcaa

SEQ ID NO: 175969 - DNA, 2431 bp, Homo sapiens
  Payload ID: 14547
  Gene Symbol: ARHGEF35
  Gene Name: Rho guanine nucleotide exchange factor (GEF) 35
  Uniprot ID: A5YM69
  ENST ID: ENST00000378115
  CDS Start-End: 131-1585
caggggcgggccgcgggtggggcggccgggcctgcgctggggacggctctggggactgcggccggcgccgggacctggaggggacgctggggccgaagcagcatgtgacaccgaccaggattcagccctgatggaggctgaggaggcccagcatggagcctctcctcccatctctgccatagaggaattcagcattatccctgaggctcccatgaggagcagccaggtctctgccttggggcttgaagctcaagaagatgaggacccatcctataagtggagagaggaacacagactctcagcaactcagcagagtgagttaagggatgtgtgtgactatgcgattgagacgatgccctcttttcccaaggaaggttctgcagatgtggagcccaatcaggaaagccttgtggctgaggcctgtgacactccggaacactgggaggcagtaccccagagcctagcaggccgacaagcaaggactctagctcccccagagctctgggcctgccccattcagagtgagcatctagacatggccccattttccagtgacctgggaagcgaagaagaggaggtggaattttggccaggacttacttctttgacattgggatctggacaggcagaagaagaagaggaaacctcttcagataactctggtcagaccagatattattctccctgcgaagagcatcctgcagagaccaaccagaatgaaggcgctgaaagtgggactatcaggcagggggaagagctgccatctgaggagctgcaggaaagtcaagggctcttgcatccccaggaggtccaagttctggaggagcagggacagcaggaagcaggatttcggggggaaggaactctgagggaggatgtttgtgccgatgggctattaggggaggaacagatgatagagcaggttaatgatgaaaagggagaacagaagcaaaaacaggaacaggtacaagatgtgatgcttgggagacaaggagaaagaatggggctcactggggagccagagggtctgaatgacggtgagtgggagcaggaggatatggagaggaaggctcagggtcagggaggtccagaacagggagaagagaggaagagggagctgcaggtgccagaagagaacagggcggactctcaggacgaaaagagtcaaacctttttgggaaaatcagaggaagtaactggaaagcaagaagatcatggtataaaggagaaaggggtcccagtcagcgggcaggaggcgaaagagccagagagttgggatgggggcaggctgggggcagtgggaagagcgaggagcagggaagaggagaatgagcatcatgggccttcaatgcccgctctgatagcccctgaggactctcctcactgtgacctgtttccaggtgcctcatatctcgtgactcagattcccgggactcagacagagtccagggctgaggaactgtcccccgcagctctgtctcccttgctagagcccatcagatgctctcaccagcccatttctctactgggctcctttttgactgaggagtcacctgacaaggaaaaacttctatcagtactttgatatgtcacagtttcatgtttatccagttcaatgtatttttaaatttttccttgagacttctttgactgatagattattgtgaagtgtgtttttaaatttccaaatgtttagggattttcatatctttcttatgctgatttccaattggattccctacaatgatttctggttttcatctgctctggatgattactatctcttttaaatttgttgtggcgagttttagggcctaggacagctctatcttgccatgtgtttcgtcagcactcaaaaaaaatatgtgtattctgctgttactgtgtggaatattctgtaaatgccaaatagattcttttggttaatggcattttgagttgttttatattcttgttgattttcttttttttcctctttttaaaaacatgaaatgcttcacaaaattttgtgtaatctatattcaagaaccattttaatcttgttggcatcattctgattttagaaagtgctgccaaagccaacactccttgctgattttctgtctagttctatcaattattgaaaaaggcatgaggaaatttctaactataattgtggattcatctatatctcctttcagttttctttttttaaaaaaaatcaatgaaaatttattaaattaagcataaagttactttcacatttatctacaaccacagtgaatacagttcttggcatgaagacaccacaacctttagaatttaaagcctcctcacctgcaagattacatatataaaactcccactattgtttctctaagagtggattagttcaccaagttaaaagttatatgatctagaatataataaaatggaaatgatttactcataa

SEQ ID NO: 175970 - DNA, 4968 bp, Homo sapiens
  Payload ID: 14548
  Gene Symbol: ARHGEF37
  Gene Name: Rho guanine nucleotide exchange factor (GEF) 37
  Uniprot ID: A1IGU5
  ENST ID: ENST00000333677
  CDS Start-End: 164-2191
agccgcgcccgccagcgccctcggtgggcacagccacccggagcggcgcgggtgccgggagctgggcgacgcgcccctcctgccccggctgcgctgttgcccgggcggccgacctccgtgcgtgagcgccggcaggcaccttgcgcgcgcggaacctgctgacatggccaagcatggagccgacgagccatcctccaggtcagggagtccggacagggaaggtagggcctctgaggacagatcgctgcttcatcagaggctggctgtccgggagctcatcgacactgaggtctcctacttgcacatgctccagctctgtgcctctgacatcaggagccgcctccagcagttgccgcagggagatctggatgtcctgttctcaaacattgatgatatcatcaaagtgaacagcagattcctccatgatctgcaggagacagcctccaaggaagaggaacaagtgcagctagttggtaacatatttctggaattccaagaggagttggagcaagtctataaggtctactgtgccagctacgaccaggccttgctactggtggacacgtaccggaaggagccggagctgcagcggcacatccagggcatcgttgaggcggtggtgccgcaagctggatcttcaggcctcagtttcttgctggtaattcctctgcagaggatcaccaggtacccactgctgctgcagaaaatcctggagaacacagtccctgatgccagtgcctatcctgtccttcagagggctgtctctgccctccaggacgtgaacaccaatatcaatgagtacaagatgcgcaaggaagtggcctccaagtacaccaaggtagagcagctgaccctccgggagcggctggcccgcatcaacacacacaccctctccaagaagaccacccggctgagccagctgctgaagcaggaggcggggctgatccccaggacagaagacaaggaatttgatgatttagaagagaggttccagtgggtgtctctgtgtgtgactgagctgaagaacaacgtggctgcttacctggacaatctgcaggctttcctctacttcaggccgcacgaatacaatctggacatccccgaggggcctgcagtgcagtattgcaatttggcaagagaccttcaccttgaggccttcctgaaatttaagcaacggctagaaggcctggtgtggcagccactgtgcagcctggccaaagccctgcttggccctcagaacctgatcaagaagcgtctggacaagctactggactttgagcgggtggaagagaagctgctggaggtgggcagtgtgacctaccaggaggaggccgcccggcacacataccaggcactcaactcgctgctagtggctgagctcccacagtttaaccagctggtcatgcagtggctgggccagatcatgtgcacattcgtgaccctccagagggaccttgcaaagcaagtgctgcagagggcagagggaagcatggcccagctgccccaccaccacgtcccagagcctgccttcaggaagctggtggaggacgcactgggccggacgagtaaccagcttcgctcctttcaagagacctttgagaaagtgcagccacctcccaccacacaaccgctccttccagggtctgaacgccaggtgcaggctctcctgagcaggtatggccctgggaagctgtaccaggtgacaagcaacatcagtgggactgggactctggacctgactctgcctcggggccaaatcgtggccatccttcaaaacaaggacaccaaaggcaacagcggccgctggctggtggacaccgggggacatcgtgggtatgtgccggctgggaaactacagctgtaccatgtggtccccagtgcagaggagctcagaaggcaggcggggctgaacaaagacccccgatgtctaacaccggagcccagcccagctctagtgccctctattcccaccatgaaccaggtcatagccgcgtacccttttgtggccagaagcagccatgaagtgagcctgcaggcaggccagcctgtgaccatcctggaggcccaggacaagaaggggaaccctgagtggagcctggtggaagtgaatggacagaggggttatgtgccttctggcttcttggccagggctcggagcccagttctgtggggctggagtctgccctcttagggtaccctctttggagcctacattgccaaatgatgggggaggcttagaggctctgaccctggggggaaaagaagcaaaggaaaggtggaggtggaagggaagaccaggccagggtgggtgaagcacactcaggaggcagccagaagacatgggcgggcctcgcagagtgcttggtgtggtgggggcacaggaggctccagccaggactgctcattatgtctgcataaagaactcattccgacctggggtcacaatgcacttggacagcaggtcacagctgattggccaggactctccataggttatggccagtcttagctgtgcctgcatccgggcctgcctgtgggcgtgggtcacacgggataatgttacctgcgtgctgtgtggttgcaggaagcgggttctggaggagtccagaactgcctggtcagacagttcacttcctacacatggtatcaggagacatcataaccaatgagtcagcttttatttctctatgctggaagctgagtttatcttgggcagtgacccactgggagccctctcaagtggggaagccatggatttatcggtgtagcagagaggttcccaagactcttgactggtcctgggagtgggtgtgaccaagtcatagttctggaatgtgtgtaggcaaattcagaggctgttccagggaagaggggattttgatactgtgttaggtggggtgtgtgaggctgttggcagcaggtgaacagctactgctgtgttctcaggactagggaacaaaggggtatgcaaatcatagaggaaactctgggaaggcggtgataaggcctggtgggtggggaggttagggaatggcttgctttcctgtttctggttagaaggggagccagggggaacccccagtggtttcaggtggcccctgaggtcctggaggcagccgtggatgtgatgcaattggctgtgggaccttagatgtaggacacaacttcagtgttcccatccagaaagacctcactcacagggttgtgctgagaatgacgtggggctaagcatgcagagctccctgtaaactgtgaagtgtgatacaaatgtaaatgacagcagtgatctcggggtggcccccggcatgctgccctcccccacgcccatgcctgtggcagcaaaccttgttcatcagtatagctttctttcctgtaacccaggatctaccttggggggcttctcaatactgcattctatgtagccagcctctttaacttggtaagtgagccaccccattctagaacctggaaattggagcccctcaaaaacagttcctgttcaaggaggactgacctgctggggcaatgttgggtgcagtgcagtccctgcttggggtggtcatgtctaggctgttgctctgggcaaagataagttgcaagattcacagaaatgggaaaatgtgaccaagtgtgatcttaacaactgacaaagtttgtaaccaacccaagttagaatgtgtgtcaaacaggaggtagtttagatatgcttccaagaacatgtctgtgttataaccatagtgcctaagcagtgagctctggtttttgaagggcttttaagaaatatatacatgtctgtgtcagtctataacttgcctcctctgggcctgttaaagcatgaagactgcatgacacaagagaaatgcaagccctacggttcctttctcagcagcgaattcacttgagaggatgctcttgactcattctctctgctctttcctgctcagatttctgataaaaatagagagcataggggaacagataatgaaataggaaacccactcgtgggttccacagatacctaccgaaggcctactgtgtgctagaattgtagctcaggagttctcagtgtagctgctcactgaagttaccatggcaggtttcaactggcagaatccaggctccgtcccacccagagattctgatgaaattggtttagggtgtggctcgggcctcaggaattcagaaagcttcccaggtgcttccaatgtgcagccagggttagggacctctaccctagacacaaagtattggacagatagacctggtgccagagatggccatgagctgtaagctaggacgtgccccacctgagctctgcactagctagttcaaacaggcgctttaaaggcagtgtgaaaggggacagcctgttctgccaggtctcagaatgtatatttattaagtgccattaaaagggacctgaacaaaattggatgtcttgtaggcataagggaggaaaataaaatatacttggaaccaagtctatgtcatgaagggaaaataaaaatgtattcagtagcacgtgggttatggtttctcatagaccaggggataagattaaaagtcactgaagagtgggaaaatgcatgttgagaagatgagaatggcctgtattttctccaggggaatctgtgtaatgtgccttttccctctccaaatgcctagaaccatggcactgtgtcttatttatttaaccgttgggctgtctcatactaaacttgcaaagatatttgcctatgaactgaacaagacttccaggagttgaagtctggttcacaagggtaccccttgcctcctgtgatggagtgagaactcttaaacccctcaggccccaactcagttgtggagatgaggacaagattacaatatcaaaagaaagatgaatgaattcttggttaatatgacgaaccccagctcaatgagtaactgatgtgaactgctgggaataaaggacttcaaagatggaaa

SEQ ID NO: 175971 - DNA, 498 bp, Homo sapiens
  Payload ID: 14548
  Gene Symbol: ARHGEF37
  Gene Name: Rho guanine nucleotide exchange factor (GEF) 37
  ENST ID: ENST00000505810
  CDS Start-End: 189-498
gttgtagcagagcctagctaattacccttcataattagaattgtcctatctactacggagtgttatagaccctctttccacaggaggggaagaaagaaagaagccggaatccccctgccatcctatgtctttgcattattgcctcactaccacatatgatcttcagaagaaaacctgaacctgctgacatggccaagcatggagccgacgagccatcctccaggtcagggagtccggacagggaaggtagggcctctgaggacagatcgctgcttcatcagaggctggctgtccgggagctcatcgacactgaggtctcctacttgcacatgctccagctctgtgcctctgacatcaggagccgcctccagcagttgccgcagggagatctggatgtcctgttctcaaacattgatgatatcatcaaagtgaacagcagattcctccatgatctgcaggagacagcctccaaggaagaggaacaagtgcagctagttg

SEQ ID NO: 175972 - DNA, 1437 bp, Homo sapiens
  Payload ID: 14549
  Gene Symbol: ARHGEF38
  Gene Name: Rho guanine nucleotide exchange factor (GEF) 38
  Uniprot ID: Q9NXL2
  ENST ID: ENST00000265154
  CDS Start-End: 147-806
agtcacagccaggtaaccctggagtgaagcggtttagttagaagggagcagataaactcgtcactctagtagctttaaccctcaccctgaggcaccttagcaatcagccattgcctgcaagcctccaaagcttgtctttgcctaatatggagcccaaagaagccactgggaaagaaaacatggtcaccaagaaaaagaatctggccttcttgaggtctagactctatatgctggagagaaggaagactgacactgtggttgagagcagtgtttctggggaccactctggcaccttgaggaggagccaatctgacaggaccgaatacaaccagaaattacaagaaaagatgactccacagggtgagtgttctgtagctgagaccttaaccccagaggaagagcatcatatgaagaggatgatggcaaagcgggaaaagatcattaaggagctgatacagacagaaaaggattatctcaatgatctagagctgtgtgttagggaagtggttcagcccctgagaaataaaaagactgataggctggatgtggatagcttgtttagcaacattgagtccgtgcatcagatatcagccaagctgctgtcattgttggaagaggccacaacagacgtggaaccggccatgcaagtaattggagaagtattcttgcagattaaagggccactggaagatatttataaaatctactgctatcaccatgatgaagcacatagtatactggagtcctatgaaaaggaagaagagctgaaggaacatttgagccactgtatccagtccttaaagtaaggccttttcaaatgatgattcccatctcctctcagttgcctagcagggaacattttaaatggatgtagatgaaaggtctcacataaatcctatgttttatgagacttgctgggagctctgctttgcattccctttataaaaagctgacatgccagaagccctgattgactttttttccccctgcgagaatgactaaaaataacatggaagaagatttagagctctgcagcgattgaaaaatgcaatatcaaaatataaaatgtggaagaaaagcctcttcttaaagctattgtaacttgcctggccccacgtagttcaaggattatgtgagataacacgtggccccatgaccactggagcacatgggttaatggagttaggggaatggcctacaactctgcatggccgtcttctttccccaaactcactgtggggagatgggtgaagacaagtcaggccttgttaaagttagtttcagaacaattactcatgccttcctttctcatccctaaaacattggtgggggagctacacaatgtactttttcttttctagaggaagtatctattcactgtgaaaatctgaaaaatataacaaagtatgtgtaagataaaaaccccttgctatttca

SEQ ID NO: 175973 - DNA, 5454 bp, Homo sapiens
  Payload ID: 14549
  Gene Symbol: ARHGEF38
  Gene Name: Rho guanine nucleotide exchange factor (GEF) 38
  Uniprot ID: Q9NXL2
  ENST ID: ENST00000420470
  CDS Start-End: 145-2478
tcacagccaggtaaccctggagtgaagcggtttagttagaagggagcagataaactcgtcactctagtagctttaaccctcaccctgaggcaccttagcaatcagccattgcctgcaagcctccaaagcttgtctttgcctaatatggagcccaaagaagccactgggaaagaaaacatggtcaccaagaaaaagaatctggccttcttgaggtctagactctatatgctggagagaaggaagactgacactgtggttgagagcagtgtttctggggaccactctggcaccttgaggaggagccaatctgacaggaccgaatacaaccagaaattacaagaaaagatgactccacagggtgagtgttctgtagctgagaccttaaccccagaggaagagcatcatatgaagaggatgatggcaaagcgggaaaagatcattaaggagctgatacagacagaaaaggattatctcaatgatctagagctgtgtgttagggaagtggttcagcccctgagaaataaaaagactgataggctggatgtggatagcttgtttagcaacattgagtccgtgcatcagatatcagccaagctgctgtcattgttggaagaggccacaacagacgtggaaccggccatgcaagtaattggagaagtattcttgcagattaaagggccactggaagatatttataaaatctactgctatcaccatgatgaagcacatagtatactggagtcctatgaaaaggaagaagagctgaaggaacatttgagccactgtatccagtccttaaagaaaatatacatgcaagaaggcaaaccaaacttattggacatgggctctttgatgatcaaaccaattcaacgtgtgatgaaataccccctattactgtgcgaacttcggaattccacccctccctctcacccagattacagagcactggacgatgcctttgctgctgtgaaggacattaatgttaacatcaatgaacttaaaagaaggaaagatttagttctaaaatacaagaagaatgacgaggatgaatcacttaaagacaaattgtctaaactaaatattcattcaattagcaagaaatcaaaaagagtgacaaatcatctgaagattctgaccagaggagaatcacaggttaaagacaatacctttaacagagaagaaaagctgtttagagctttagaaaagactgtgaggctttgtgtgaagaacatttcactctgtcttcaacacatacaggatgccatgcccctggctctgcagagtgtgatggaccttcaggagatttcatacaacaaagacgatgagatggactattctgagaccctaagtaatgccttaaattcgtgtcatgactttgcatctcacttacagagactcatcctgacccccttgtcagccctgctgtccttattcccagggcctcacaagctcatccagaaacgctatgacaaactgctggattgcaacagctacctgcagcgatcaacgggagaggagtcagacttggccaaaaaggagtatgaggccctcaacgcccagcttgtggaggagctccaggcattcaaccaggctgctcggaagattctgttgaactgtctatgcagcttcattaccctccttagggacctgatgctcgtggcacagcaggcttactccacacttgtgccgatgccactgttggtttcaagcatttctgagattcagaatcaagtactagaagagatccaaaatttgaattgtgtgaaagaaaacagtgccacctttattgagaggaaactcagttttgaaaagaagaaacctgtgcagattctgccagaaatgccacatcaaactgacattcatcgctccaaacttctatccacatatagtgcagaggaactctatcaagctaagcgcaagtgcaatgctacacaagaatatgacatcaatcttctggaaggagacttggtggctgtgatagaacagaaagatccactggggagtacaagcaggtggcttgtggacacaggaaatgtgaaaggatatgtttattcctccttcctaaaaccctacaatccagcaaaaatgcagaaagtggatgctgagaacaggttctgtgacgatgattttgagaacatcagcctcttcgtgtcttcacggccagctagtgacagtgtcacaggcacctcagaaagcagcattggtgatagcagctcatctcttagtggcacatgtggaaagtttgaaacaaatggtactgatgttgacagttttcaagaagtagacgaacagattttctatgcagttcatgcttttcaagcacggagtgaccatgaactcagccttcaggaataccagagagttcatatactcaggttttgtgacctaagtggcaataaagagtggtggttagctgaagctcaagggcagaaaggatacgtgccagctaactaccttggaaagatgacttatgcttaagaaaataagccttcaacttttattttccagcaagttgttgattgactacctcataaaactgacattacaaaactttggaccagaaagcaagaaacctctgaactacagaaactgatactgtactgggttttcaggaatactgtacttcctaacaggattattgcatgaatgtattataaaggatacatgttgaaagaaatactaagccaacagaaatagcaaagcaaatgacccaagcttcaactatcaactatttaaaagtgaagatcttttgaaggagtaattatattcttttatcatcaagaaaggttggatccaaaggtttttcaatttacttttttttttactgtatgatgtattttgccttaaatgtttttgtttttcatattgctctcttgcaaatgcatacatgtttatatacatacatataaaccatatatattatgtagctttatacacgtatgtggataatatgaattatacacctatatgtataaatcagagtatacaccaaatatacataagaagaatataccaccaactagaagtctttgataatatattttgttaatgtttcgtttatatgttttgaactaaaactgaataacttgatattaacatgtaacattactgaatgcacactatatgccagacattgttctaagtgctttatatgtagtaacttgtttaatattcaaaacattatgaagaaaccatggcccaaaaaggtgaagtaatttaatccaaatcacattgctattaagtggtgggcctggacttaaacctaggtagtgtaaaccaaaaataaaattctaaggcttccaaccatctaaatagacttccccttcagccagggcttttttctttcttttcttgttgtttttttttttttttaaagagacaataaaaggaggtttttttattcaaaggtataactggataagtagatttgtttacaatcattcttgtgaaatacttttttaaaaaaatacgatcaacttctttgcaaatagtagacacatacctcaacaatgatgacctaatttttgatccataatgtaagattaggtagaaataggcaagctcacactgctaaattaactatcaaatactcagtcaaaactccatttgtggcccccacttcttgatctatttctgttccacttcgtcttctaccatcttgccgactttcctgagcaactgctttgtcgactctctctacctgaccaattgccagatcgacaacctgactggcctgaccagccactcctctgtctggaattaaaagatgtttccatcataatattctttaatttcaggtaatttagctggcactgagagtatccagccggaatcatgccactttgcctgtaacctttgactcaattggaggaatatcaaagcaaacacccatatttcctttcaggaggcacactctggtaatctgagacactgcattactattcagctttctaagttctttccaagcacagctgacatcctgtatttcctctaggctttccagagtcatggtcacaaaccccttatcagagttgattaaagatcatggttcaaagcttgatacaccagaaatgtgggctaaagctgcagccaatgcatctatcgcccctttctcttctatcagtatctgagctgatggttggaaaaaaatcaacagcagcataagaaatggaagccagagaccttatggcatccatgcttttaaatttaactaaatccattgtagaaggaacacctacacatttaaaagtaatttgtgttttttgttccacatgtcttagttgacctttctcttggttgataaaaacatatacaaacccctgtctgtccagctttacccacgcatccagagagatggatataggactcaatatcctgaggaggagaactttgaatcaccaggtcaactacaggaatgtccaaaccacgaggagccacattggttgccaccaaaactttataattacctctctgaagccttttagtgtaatttctctttgtgactgtgcaatgtccccatgtaaacacagtgcattctgttttgtgcggattcatggccatgtcagttacattcttcttcgtctcacagaaaataatagccctcccttcagatccactgtagacttgaaggacatctcattttcatctgtgttttataaaggaggaaattgaggacctcacatggagggactggaatttaaaaccaggtcttctgactttaaggcctttcttttagtgttttcccttttcttttccttaagtcactaaaatctgtagttatataatcttacataaagcatatgcaaaatagaaaaatgatagtcaccacatatctactaatgggattaaaatgtacaatcctaaaagcttacttgttagcacacttgcttatctgtccattcattcattgaaccagtaagtatttattgagagttagtgggaatacaatgctgtgcaagacaaacaagatccctccattcataccacttaaattctagtggggaaaacatctgcacataacaaactaaataaaatgatcataaaataataaatgctatttatataaaactggctactttcattactgctcagttaaagggtcttgtagctcattttatgacatgaaaaaaatcaaggtctaaaagctccttgagacaatttaaactctaataccaaatatacctctataaaataccaaactgagctaaatacggtatatgtgtacttatacatatgtacataacctaaatatacgtgtgcacacattatctatacaaagagccatactcagtgaaagataaattacctcctaaactaaagtcccctctgaggtacaacagaaattaaaataattgcttctcttctcaactctatgtagcacgtattttccatgatgggataaatgttttcatttcaagtgccaatgtgtgaactgtaataaacattactgctttc

SEQ ID NO: 175974 - DNA, 3769 bp, Homo sapiens
  Payload ID: 14550
  Gene Symbol: ARHGEF39
  Gene Name: Rho guanine nucleotide exchange factor (GEF) 39
  Uniprot ID: Q8N4T4
  ENST ID: ENST00000378387
  CDS Start-End: 119-1126
atgctccttcctgcgcgctgccctccccggccccgcctccgcggctcccgcccgcgagcggttgggatttgaatctgccgcggactgcagccggaagtgtcgatccctcagccagggcatggagctctcctgccccggttcgcggtgcccggtgcaagagcagcgtgcccgctgggagcggaaacgcgcctgcaccgcccgggagctgctagagaccgagcggcgctaccaagaacagctggggctggtggccacgtactttttggggatcctgaaagccaaggggaccctgcgaccacctgagcgccaggccctgtttggctcctgggagctcatctacggcgccagccaggagctgcttccctacctggaaggaggatgctggggccaagggctggagggcttctgccgccacttggagctctataaccaatttgctgccaactcagagaggtcccagaccaccctgcaggagcagctaaagaaaaataaaggtttccggaggtttgtacggcttcaggaaggccgccctgagtttgggggccttcagctccaggacctgctccctctgcctctgcaacggctccagcagtatgagaatctcgtcgtagctttggctgaaaacacaggtcccaacagccctgaccatcaacagctcacacgggctgcccgactgataagtgagactgcccagagagtccatactattggtcagaaacagaagaatgaccagcaccttcggcgtgtccaggctctgctcagtggacgccaggcaaaggggctgacctcagggcgctggttcctacgccagggctggctgttagtggtgcctccccatggggagcctcggccccgcatgttcttcctcttcactgatgtgctcctcatggccaagcctcggcctccactgcacctgctgcggagtggcacctttgcctgcaaggccctctaccccatggcccagtgtcatctcagcagggtctttggccactcaggaggcccttgtggtgggttgctcagtctgtccttccctcatgagaagctactgcttatgtccacagaccaggaggagctgtcacgctggtaccacagtctgacttgggctatcagcagccagaaaaactagaggaatcttatagattccagaactcaggatacctcagggataggtcacagccaagagtacaaaggaatcttcagtactgaacaaaacagaacccttcatgatttgacaaaggtcactttctgtttgcctggaccaagctactccagatcatctgaccaactcttaaaaatcacggccaggcacagtggctcatgcctgtaatcccagcactttgggaagcagaggtggcaggatcattccagcccaggagttcaagaccagcctgggcaacacagtgagtgagaccctgtctctatttaagaaaaaataattaagaaattttattaaaaaagaagaatcaggaaaccaagtccaacccaactaaacctcaaatgaaccagcccctaacacagatgaggggatttgggactgataagctctgtgctgtgtccatggcccgtcatttatcaaggctgcagctttgtaaatgtggctatttttatgttgtgtatagtttctatcatttatttttccactggatttgagtaaagttttttttcttttttttgggaaagacccttctgtctcagttttgctatgagaaaagggatttttgggccctgaacgcgggcatgctggtggcctcaggaatacgaggaaaagagctggagctccctctatcttctctgctgtcacactggaaggcagcctctttttgtcctaataaggacagctcttcaagaaggcccagttgtccttaggcacctagtatgggtgtgtacaaccaactaggatcgaaaaaacacacaggagcactccatcatgaaaacagactttgttttagtcgaccttcagctgtcgtccctccttcccagccaaggctgtgactggggccctttgccacagcctggctgcaccttctccgtagtccccgccccacctcccaggaagtagctaggttccatgtctctgtgctccagtttgtgggctcctcccaggcctgactgtcaccaatctcctcctcgtcctcctttaaacagaagtcctcaggaagaggtctgctggcctctgtgtggggagagatcaggaatgttccagtttcagagactttgtctccacctccagcagactcgcctcccgagccttcacctggttctgaagcctccatatccttgtccggcttgctatcttgcagcagctcgtggatggtccatagcttcatgttcagaagctcctgctgggctccagccagagtagtcacactgaagaaatgtccactcagtggctcccaacctatgtccccattcctccctcctgccacaaattccccaaaaattcacagaatcattgctctcctcaccgctcaaaaagggggtccagctgggccatcaggttgttcaggtgctgctctgtctgggccagctgttgtgtcaactgggccagctgttgctctggggataagggaaaaaagggggcagaagtggttatgtatcttctgctgtcccctaaactcccccgacccagcacagacttctgctaaacccacctgactgcagtggctgctgcttgcttgcctcctcgtggagaaccgcagtttcatctttcccctgttgtggaagaaggaaagggcagtactgaagcaacaaggttctgctccatcacctcagtctccagagccagccaagagagagtgcaatttgagatggagacagtgattgggtttttacctcagagaatcacaatcctagtctatctagctcctcacccagcatatgaagcgacgtcctatgtcccacacatggtcagtttgctgaaacacctccaggaatgagcaactccctccggtttgaaaaaagctctggtggctgagtgctgtggctcacacctgtaatcccagcacttcgggaagccaaggtgggtggatcacctgaggtcaggagtttgagaccagcctggccaacacggtgaaaccctgtctctattaaaaatacaaaaattagccgggcgtggtggcaggtgcctgtaatcccagttacttgagaggctgaggcaggagaatcgcttgaacctgggagccagaggttgcagtgagccgagattgcgccgctgcactccagcctgggtgacagagcgagactccatctcgaaaaaaacaaaaactttggttgttagacagttcatgcacaaagccaaaatttgtcctttatgtatcttctttccatagtgcttactggagccttccaaaataatgtctcctcaaggtgacagcccctcaggaatttgaaggcaatggtcacaccctcacccactttcctgagttttttctggtttattaacgtcagtctttacagtcagtgctcattgacggtggttttctctggttgtttcctgaacacgtagtgctcttaaagcaatgccctgaggagaatacaattctccaggggcattctgattggcaggtgaagcacagtgccatgttcccagcactgatttgggaagtggcttgtcacatcccacagtgaactcagtcaactggaatgcctaactctctttcataagacctcctgctacattatgtttctcccagactgtactcaggtccaagaacagaatttactagtctatccttctcaaagttcatcattaaattcagtcattcatcct

SEQ ID NO: 175975 - DNA, 2862 bp, Homo sapiens
  Payload ID: 14550
  Gene Symbol: ARHGEF39
  Gene Name: Rho guanine nucleotide exchange factor (GEF) 39
  Uniprot ID: Q8N4T4
  ENST ID: ENST00000475323
  CDS Start-End: 24-584
agtgtcgatccctcagccagggcatggagctctcctgccccggttcgcggtgcccggtgcaagagcagcgtgcccgctgggagcggaaacgcgcctgcaccgcccgggagctgctagagaccgagcggcgctaccaagaacagctggggctggtggccacgtactttttggggatcctgaaagccaaggggaccctgcgaccacctgagcgccaggccctgtttggctcctgggagctcatctacggcgccagccaggagctgcttccctacctggaaggaggatgctggggccaagggctggagggcttctgccgccacttggagctctataaccaatttgctgccaactcagagaggtcccagaccaccctgcaggagcagctaaagaaaaataaaggtttccggaggtttgtacggcttcaggaaggccgccctgagtttgggggccttcagctccaggacctgctccctctgcctctgcaacggctccagcagtatgagaatctcgtcgtagctttggctgaaaacacaggtcccaacagccctgaccatcaacagctcacacctgtccttccctcatgagaagctactgcttatgtccacagaccaggaggagctgtcacgctggtaccacagtctgacttgggctatcagcagccagaaaaactagaggaatcttatagattccagaactcaggatacctcagggataggtcacagccaagagtacaaaggaatcttcagtactgaacaaaacagaacccttcatgatttgacaaaggtcactttctgtttgcctggaccaagctactccagatcatctgaccaactcttaaaaatcacggccaggcacagtggctcatgcctgtaatcccagcactttgggaagcagaggtggcaggatcattccagcccaggagttcaagaccagcctgggcaacacagtgagtgagaccctgtctctatttaagaaaaaataattaagaaattttattaaaaaagaagaatcaggaaaccaagtccaacccaactaaacctcaaatgaaccagcccctaacacagatgaggggatttgggactgataagctctgtgctgtgtccatggcccgtcatttatcaaggctgcagctttgtaaatgtggctatttttatgttgtgtatagtttctatcatttatttttccactggatttgagtaaagttttttttcttttttttgggaaagacccttctgtctcagttttgctatgagaaaagggatttttgggccctgaacgcgggcatgctggtggcctcaggaatacgaggaaaagagctggagctccctctatcttctctgctgtcacactggaaggcagcctctttttgtcctaataaggacagctcttcaagaaggcccagttgtccttaggcacctagtatgggtgtgtacaaccaactaggatcgaaaaaacacacaggagcactccatcatgaaaacagactttgttttagtcgaccttcagctgtcgtccctccttcccagccaaggctgtgactggggccctttgccacagcctggctgcaccttctccgtagtccccgccccacctcccaggaagtagctaggttccatgtctctgtgctccagtttgtgggctcctcccaggcctgactgtcaccaatctcctcctcgtcctcctttaaacagaagtcctcaggaagaggtctgctggcctctgtgtggggagagatcaggaatgttccagtttcagagactttgtctccacctccagcagactcgcctcccgagccttcacctggttctgaagcctccatatccttgtccggcttgctatcttgcagcagctcgtggatggtccatagcttcatgttcagaagctcctgctgggctccagccagagtagtcacactgaagaaatgtccactcagtggctcccaacctatgtccccattcctccctcctgccacaaattccccaaaaattcacagaatcattgctctcctcaccgctcaaaaagggggtccagctgggccatcaggttgttcaggtgctgctctgtctgggccagctgttgtgtcaactgggccagctgttgctctggggataagggaaaaaagggggcagaagtggttatgtatcttctgctgtcccctaaactcccccgacccagcacagacttctgctaaacccacctgactgcagtggctgctgcttgcttgcctcctcgtggagaaccgcagtttcatctttcccctgttgtggaagaaggaaagggcagtactgaagcaacaaggttctgctccatcacctcagtctccagagccagccaagagagagtgcaatttgagatggagacagtgattgggtttttacctcagagaatcacaatcctagtctatctagctcctcacccagcatatgaagcgacgtcctatgtcccacacatggtcagtttgctgaaacacctccaggaatgagcaactccctccggtttgaaaaaagctctggtggctgagtgctgtggctcacacctgtaatcccagcacttcgggaagccaagggcctcctcccaaggagaacatgagaccacttcatatctggaactctagaaacactggctgcagcaatcaacctcctgtgccaaggctggccccactcttgtagcatggacactgctagctgggttcaaatcccagctccagcagttgccagcgctgggtgacctcgagcaagtgactactcctcactggattgtaggagaactaaatgtgatagtcattatttacagttcaccacacgctcttcacatccgttacctccctggatcctcaaaataacctcataatattggaaggcc

SEQ ID NO: 175976 - DNA, 4498 bp, Homo sapiens
  Payload ID: 14550
  Gene Symbol: ARHGEF39
  Gene Name: Rho guanine nucleotide exchange factor (GEF) 39
  Uniprot ID: Q8N4T4
  ENST ID: ENST00000490638
  CDS Start-End: 2152-3051
agggggcgcagggccgggcagaaggcggcgagctgggggcggatatccaccggggactggaagcggcccgcgcaggctggggacacccggggccagggcgggtcgcctggggtgggagagtatagtgaggaagtctgacgcctaggtcaggaacttagggaacccgggtagaaaaggtgagggggtgggacggtgggcggcgggtgggacgcccgggaccagtgttcagggacggctgtaggggagatccacagagctgggttcccagattgggtctgtgcagcgggtgggtgtctcacctccatagcgccaatgactctggtcatcccctgtataaatgaaaaggatgaaccgctcaagcttagagccccaatcccttcctggcgaccaaaacgatgtcacaaacgcagatgccttacaggagcattacgggtaacaaatgccttaagcgggccaggtgcaaagcacaggagaccgcacccaaactcaacaccgcagctgggtgggccaaacagcaatcctaccagcttgcaatcattgtcttagggtctgtaaaagtgagtggctgcttcaggccaggcgctgtggctcacgcctataatcccagcactttgggaggccagggtggttggatcacctgagatcaggagttcgagaccagcctgaccaacatggcgaaaccccgtctctactaaaaatacaaaaattagccgggcgtggtggcgcatgcctgtaatcgcagctacttggctagaggctgaggcaggagaatcacttgaacccgggaggtggaggttgcagtgagccgagatcgcgccattgcactccagcctgggcaacaaaagtgaaagtttgtctcaaaaaaaaaaaaaaaaaaagtgagtgggcacttcagtcctgagtcccaaatgagtgagtacaccatctttcctttctcccttctttcttctccccactcatccctctgccttgtatggtctccaacccctttccccaaattcctggcttgggagtcaagaagccacgtttctctacctgctgtgtcccttcttcctaggtctcaatttcctcattgtagcctaagatgagatgacttctaccagctcttcttgcttgtctctggtacccacttcacctcccaagctttccttttctcttcccctcaaactctctgactctccttctccacctatttttttcctctgtctgcacattttttctctcatctgcagttctcatccctttctcttctccagcctcccccttctctcccatctcatccagctcacctctctccttttgcaccctttttattttctctccacatctgtccctttctacctccgagagtggggatggggatattggtatgggacctctggaagggcttctgtggggagtacagtctcccctccttccctgagtgaacagagcctaggctggggtatgggaggggagtcatgaacctcctggaacctggatttggagattgatgaccacttaccttctttgtccctgtgggcattattctggggttcttgaggatctccaggagcctcaacagtaggtagatcctctaacttcagggagccctcttcttctgatttaggcttaacttcaggtagatcctcctctccaggtagatcctcctctccaggtagatcctcctctccgggtggatcctcctctctgggtgaatcctcttcactgggcagatcctcctcgcccagtgggtcatcttccccagaagagcctcctcccaagggggaatcctcctgcatccggggcaacctctggggatggacaggcaccagaagcagcagtgacagcagcagttgcacagtgaggcctggagcaggggccgggatcaacagagggagccaggggctggggcacaggggagccatgcggctgactgtggggtgtcccagcacacggtgtgtacgggctgtacgtgcattggaaacgagagctgggtgggggaggagcaagcctggaggggagcaggctgactcacagagcgcccttttgcagagatggagccaaagtctcacagctcactcatttttcaaatgcgattccctatggctctgtttctctgtctctctcgtctctggtctgagtggagaatgtggactctgaccctggatcatgctgggagtctgccaaaccctcaaacagtactttttggggatcctgaaagccaaggggaccctgcgaccacctgagcgccaggccctgtttggctcctgggagctcatctacggcgccagccaggagctgcttccctacctggaaggaggatgctggggccaagggctggagggcttctgccgccacttggagctctataaccaatttgctgccaactcagagaggtcccagaccaccctgcaggagcagctaaagaaaaataaaggtttccggaggtttgtacggcttcaggaaggccgccctgagtttgggggccttcagctccaggacctgctccctctgcctctgcaacggctccagcagtatgagaatctcgtcgtagctttggctgaaaacacaggtcccaacagccctgaccatcaacagctcacacgggctgcccgactgataagtgagactgcccagagagtccatactattggtcagaaacagaagaatgaccagcaccttcggcgtgtccaggctctgctcagtggacgccaggcaaaggggctgacctcagggcgctggttcctacgccagggctggctgttagtggtgcctccccatggggagcctcggccccgcatgttcttcctcttcactgatgtgctcctcatggccaagcctcggcctccactgcacctgctgcggagtggcacctttgcctgcaaggccctctaccccatggcccagtgtcatctcagcagggtctttggccactcaggaggcccttgtggtgggttgctcagtctgtccttccctcatgagaagctactgcttatgtccacagaccaggaggagctgtcacgctggtaccacagtctgacttgggctatcagcagccagaaaaactagaggaatcttatagattccagaactcaggatacctcagggataggtcacagccaagagtacaaaggaatcttcagtactgaacaaaacagaacccttcatgatttgacaaaggtcactttctgtttgcctggaccaagctactccagatcatctgaccaactcttaaaaatcacggccaggcacagtggctcatgcctgtaatcccagcactttgggaagcagaggtggcaggatcattccagcccaggagttcaagaccagcctgggcaacacaaagtcctcaggaagaggtctgctggcctctgtgtggggagagatcaggaatgttccagtttcagagactttgtctccacctccagcagactcgcctcccgagccttcacctggttctgaagcctccatatccttgtccggcttgctatcttgcagcagctcgtggatggtccatagcttcatgttcagaagctcctgctgggctccagccagagtagtcacactgaagaaatgtccactcagtggctcccaacctatgtccccattcctccctcctgccacaaattccccaaaaattcacagaatcattgctctcctcaccgctcaaaaagggggtccagctgggccatcaggttgttcaggtgctgctctgtctgggccagctgttgtgtcaactgggccagctgttgctctggggataagggaaaaaagggggcagaagtggttatgtatcttctgctgtcccctaaactcccccgacccagcacagacttctgctaaacccacctgactgcagtggctgctgcttgcttgcctcctcgtggagaaccgcagtttcatctttcccctgttgtggaagaaggaaagggcagtactgaagcaacaaggttctgctccatcacctcagtctccagagccagccaagagagagtgcaatttgagatggagacagtgattgggtttttacctcagagaatcacaatcctagtctatctagctcctcacccagcatatgaagcgacgtcctatgtcccacacatggtcagtttgctgaaacacctccaggaatgagcaactccctccggtttgaaaaaagctctggtggctgagtgctgtggctcacacctgtaatcccagcacttcgggaagccaagggcctcctcccaaggagaacatgagaccacttcatatctggaactctagaaacactggctgcagcaatcaacctcctgtgccaaggctggccccactcttgtagcatggacactgctagctgggttcaaatcccagctccagcagttgccagcgctgggtgacctcgagcaagtgactactcctcactggattgtaggagaactaaatgtgatagtcattatttacagttcaccacacgctcttcacatccgttacctccctggatcctcaaaataacctcataatattggaaggccaa

SEQ ID NO: 175977 - DNA, 3656 bp, Homo sapiens
  Payload ID: 14551
  Gene Symbol: ARHGEF4
  Gene Name: Rho guanine nucleotide exchange factor (GEF) 4
  Uniprot ID: Q9NR80
  ENST ID: ENST00000326016
  CDS Start-End: 520-2592
agaaaaaactcagggcaaggttggccttggctcataagaccttttcaaactttattgagtcaatagttctagagaaagagaacacccatgaacgttccccaagttctcccaagggcgagaaggagaagagcaggctgcgccagggttcctggcgggcgtttctgaaaagcaaagatgccggaagccccaaaaagcccaccctagtgagtctgcctctaggacccgaagttctctccccagcagagaccgacagccactgtgaggaacgggcggaggacaaagagggctatgtttttagcgatcactgggcacccccacttgcctccacacctttgtcctccagtttagtttctccagaacacaggaggaaaagtgaaccgaccatcaagtgcacagccacccaggaaggcgacgctaaaccaagatgagcagaaggaagagagcagggaaggaggccagggtccgcgcggcttgggcacagtgccctggctcagggaccttcctgggagtgagaaccacatgccctgggaagaaccagcaggtgagaagcccagttgctctcacagtcagaaggcgttccacatggagcctgcccagaagccctgcttcaccactgacatggtgacatgggccctcctctgcatctctgcagagactgtgcgtggggaggctccttcacagcctaggggcatccctcaccgctcgcccgtcagtgtggatgacctgtggctggagaagacacagagaaagaagttgcagaagcaggcccacgtcgaaaggaggctgcacataggggcagtgcacaaagatggagtcaagtgctggagaaagacgatcattacctctccagagtctttgaatctccctagaagaagccatccactctcccagagtgctccaacgggactgaaccacatgggctggccagagcacacaccaggcactgccatgcctgatggagctctggacacagctgtctgcgctgacgaagtggggagcgaggaggacctgtatgatgacctgcacagctccagccaccactacagccaccctggagggggtggggagcagctggctatcaatgagctcatcagcgatggcagtgtggtctgcgctgaagcactctgggaccatgtcaccatggacgaccaggagctgggcttcaaagctggggacgtcatcgaagtgatggatgccaccaacagagagtggtggtggggccgggtcgccgatggcgagggctggtttccagccagcttcgttcggctgagggtgaatcaggacgagcccgcggatgacgacgcccctctggccgggaacagcggagcggaggacggcggggcggaggcgcagagcagcaaggaccagatgcggaccaacgtcatcaacgagatcctcagcactgagcgggactacatcaagcacctgcgcgacatctgcgagggctacgtccggcagtgccgcaagcgcgcagacatgttcagcgaggagcagctgcgtaccatcttcgggaacatcgaggacatctaccgctgccagaaggccttcgtgaaggccctggagcagaggttcaaccgcgagcgcccacacctgagcgagctgggtgcctgcttcctggagcatcaagccgacttccagatctactcggagtactgcaataaccaccccaacgcctgcgtggagctctcccggctcaccaagctcagcaagtacgtgtacttcttcgaggcctgccggctgctgcagaagatgattgacatctccctggatggcttcctgctgactccggtgcagaagatctgcaagtaccctctgcagctggccgagctgctcaaatacacgcacccccagcacagggacttcaaggatgttgaagccgccttgcatgccatgaagaacgtggcccagctcatcaacgagcggaagcggagacttgagaacatcgacaagattgctcagtggcagagctccatagaggactgggagggagaagatctcttggtcaggagctcagaactcatctactcgggggagctgactcgagttacacagcctcaagccaaaagccagcagcgaatgttctttctctttgaccaccagctcatctactgtaagaaggacctgctccgccgcgacgtgttgtactacaagggccggctggacatggacggcctggaggtggtggacctggaggacgggaaggacagagacctccatgtgagcatcaagaacgccttccggctgcaccgtggcgccacaggggacagccacctgctgtgcaccaggaagcccgagcagaagcagcgctggctcaaggcctttgccagggagagggagcaggtgcagctggaccaggagacaggcttctccatcactgaactgcagaggaagcaggccatgctgaatgccagcaagcagcaggtcacagggaagcccaaagctgttggccggccctgctacctgacgcgccagaagcacccagccctgcccagcaaccggccccagcagcaggtcctggtgctggcggagcccaggcgcaagccatctaccttctggcacagcatcagccggctggcacccttccgcaagtgaactggtccctgcctgacagcacctgctgggccttcctgccagtggcccccagtttttcttccccgaggcccactcggcctggccttcctctgcctgcaagtgagcagggatgggctggggagttgcttgtgccaccaagacgtgccaggtctgtactcctgttgtctttttccctgctcctggtgccctgaagagaccagcaagggggcagaccccgcactcgccacaccgccgctgcagcttgggccccatccgccctctggacctgtgtagggcctcactgctggagcggggaaaccgcagctcagcccaggcccagctggggagaaggcgctacctgcgtgggaccctcttctctggaaacctaatcctcctttcatttcctctgggcaggactctctggccttctgtggcctgcaatgccaggccatgtgcccctctgccctctagttctccaagtccccagcccggccagtggtgccaggcagcttgccacttgggagggcagaagccaggaattccacacccttgtgttgcgcccggagcccgcccttcgcctcccagcccctcaagacaccgctggctgctggacaccctcttcacttgtgtgtgtgtgtgtagcggaaaaggacaagacggtgcagtcggctgcatactcccagtcgggagtgtggtcagtctgcctgctgctgtgcggtagctccagaaccacctcgttcctggttttgtttggattttggcatcttgtttttctaacaacaaacaatggagaaaaagaattgattcttagtgacacagaagattgccttacgctcgtgagcgtgagaagccataagagagagaccgaattctgtggctcagcacacaggactgacccacagcccaggcagcgggtgtgtggagatggcgccctgtcctgccaaggggcgccaggagcagagccagggcctggcgagctggcgtggagcccacaggattcagcagcatggacagtcactcttgcactattccttctccaagccagaaaccacatttaatttcataaataaatttatgaaaagtaa

SEQ ID NO: 175978 - DNA, 1872 bp, Homo sapiens
  Payload ID: 14551
  Gene Symbol: ARHGEF4
  Gene Name: Rho guanine nucleotide exchange factor (GEF) 4
  Uniprot ID: Q9NR80
  ENST ID: ENST00000355771
  CDS Start-End: 13-1872
tagagagaggaaatgaggccagatgggcagcaagctttggatgctgtggtaaggagttttgactgtcactctgaagcagctctcaggcagaggaatgatgtgatttattgtagtttaccaaggaccgctcagggtattgtgcagagggaagaccagctggaggttcttgtgtcactccgtgaagtgtgggggcggcggaggggcagagatgggacctgcactggagccatgcctgatggagctctggacacagctgtctgcgctgacgaagtggggagcgaggaggacctgtatgatgacctgcacagctccagccaccactacagccaccctggagggggtggggagcagctggctatcaatgagctcatcagcgatggcagtgtggtctgcgctgaagcactctgggaccatgtcaccatggacgaccaggagctgggcttcaaagctggggacgtcatcgaagtgatggatgccaccaacagagagtggtggtggggccgggtcgccgatggcgagggctggtttccagccagcttcgttcggctgagggtgaatcaggacgagcccgcggatgacgacgcccctctggccgggaacagcggagcggaggacggcggggcggaggcgcagagcagcaaggaccagatgcggaccaacgtcatcaacgagatcctcagcactgagcgggactacatcaagcacctgcgcgacatctgcgagggctacgtccggcagtgccgcaagcgcgcagacatgttcagcgaggagcagctgcgtaccatcttcgggaacatcgaggacatctaccgctgccagaaggccttcgtgaaggccctggagcagaggttcaaccgcgagcgcccacacctgagcgagctgggtgcctgcttcctggagcatcaagccgacttccagatctactcggagtactgcaataaccaccccaacgcctgcgtggagctctcccggctcaccaagctcagcaagtacgtgtacttcttcgaggcctgccggctgctgcagaagatgattgacatctccctggatggcttcctgctgactccggtgcagaagatctgcaagtaccctctgcagctggccgagctgctcaaatacacgcacccccagcacagggacttcaaggatgttgaagccgccttgcatgccatgaagaacgtggcccagctcatcaacgagcggaagcggagacttgagaacatcgacaagattgctcagtggcagagctccatagaggactgggagggagaagatctcttggtcaggagctcagaactcatctactcgggggagctgactcgagttacacagcctcaagccaaaagccagcagcgaatgttctttctctttgaccaccagctcatctactgtaagaaggacctgctccgccgcgacgtgttgtactacaagggccggctggacatggacggcctggaggtggtggacctggaggacgggaaggacagagacctccatgtgagcatcaagaacgccttccggctgcaccgtggcgccacaggggacagccacctgctgtgcaccaggaagcccgagcagaagcagcgctggctcaaggcctttgccagggagagggagcaggtgcagctggaccaggagacaggcttctccatcactgaactgcagaggaagcaggccatgctgaatgccagcaagcagcaggtcacagggaagcccaaagctgttggccggccctgctacctgacgcgccagaagcacccagccctgcccagcaaccggccccagcagcaggtcctggtgctggcggagcccaggcgcaagccatctaccttctggcacagcatcagccggctggcacccttccgcaagtga

SEQ ID NO: 175979 - DNA, 3664 bp, Homo sapiens
  Payload ID: 14551
  Gene Symbol: ARHGEF4
  Gene Name: Rho guanine nucleotide exchange factor (GEF) 4
  ENST ID: ENST00000392953
  CDS Start-End: 619-2781
agaaaaaactcagggcaaggttggccttggctcataagaccttttcaaactttattgagtcaatagttctagagaaagagaacacccatgaacgttccccaagttctcccaagggcgagaaggagaagagcaggctgcgccagggttcctggcgggcgtttctgaaaagcaaagatgccggaagccccaaaaagcccaccctagtgagtctgcctctaggacccgaagttctctccccagcagagaccgacagccactgtgaggaacgggcggaggacaaagagggctatgtttttagcgatcactgggcacccccacttgcctccacacctttgtcctccagtttagtttctccagaacacaggaggaaaagtgaaccgaccatcaagtgcacagccacccaggaaggcgacgctaaaccaagatgagcagaaggaagagagcagggaaggaggccagggtccgcgcggcttgggcacagtgccctggctcagggaccttcctgggagtgagaaccacatgccctgggaagaaccagcaggtgagaagcccagttgctctcacagtcagaaggcgttccacatggagcctgcccagaagccctgcttcaccactgacatggtgacatgggccctcctctgcatctctgcagagactgtgcgtggggaggctccttcacagcctaggggcatccctcaccgctcgcccgtcagtgtggatgacctgtggctggagaagacacagagaaagaagttgcagaagcaggcccacgtcgaaaggaggctgcacataggggcagtgcacaaagatggagtcaagtgctggagaaagacgatcattacctctccagagtctttgaatctccctagaagaagccatccactctcccagagtgctccaacgggactgaaccacatgggctggccagagcacacaccaggcactgccatgcctgatggagctctggacacagctgtctgcgctgacgaagtggggagcgaggaggacctgtatgatgacctgcacagctccagccaccactacagccaccctggagggggtggggagcagctggctatcaatgagctcatcagcgatggcagtgtggtctgcgctgaagcactctgggaccatgtcaccatggacgaccaggagctgggcttcaaagctggggacgtcatcgaagtgatggatgccaccaacagagagtggtggtggggccgggtcgccgatggcgagggctggtttccagccagcttcgttcggctgagggtgaatcaggacgagcccgcggatgacgacgcccctctggccgggaacagcggagcggaggacggcggggcggaggcgcagagcagcaaggaccagatgcggaccaacgtcatcaacgagatcctcagcactgagcgggactacatcaagcacctgcgcgacatctgcgagggctacgtccggcagtgccgcaagcgcgcagacatgttcagcgaggagcagctgcgtaccatcttcgggaacatcgaggacatctaccgctgccagaaggccttcgtgaaggccctggagcagaggttcaaccgcgagcgcccacacctgagcgagctgggtgcctgcttcctggagcatcaagccgacttccagatctactcggagtactgcaataaccaccccaacgcctgcgtggagctctcccggctcaccaagctcagcaagtacgtgtacttcttcgaggcctgccggctgctgcagaagatgattgacatctccctggatggcttcctgctgactccggtgcagaagatctgcaagtaccctctgcagctggccgagctgctcaaatacacgcacccccagcacagggacttcaaggatgttgaagccgccttgcatgccatgaagaacgtggcccagctcatcaacgagcggaagcggagacttgagaacatcgacaagattgctcagtggcagagctccatagaggactgggagggagaagatctcttggtcaggagctcagaactcatctactcgggggagctgactcgagttacacagcctcaagccaaaagccagcagcgaatgttctttctctttgaccaccagctcatctactgtaagaaggacctgctccgccgcgacgtgttgtactacaagggccggctggacatggacggcctggaggtggtggacctggaggacgggaaggacagagacctccatgtgagcatcaagaacgccttccggctgcaccgtggcgccacaggggacagccacctgctgtgcaccaggaagcccgagcagaagcagcgctggctcaaggcctttgccagggagagggagcaggtgcagctggaccaggagacaggcttctccatcactgaactgcagaggaagcaggccatgctgaatgccagcaagcagcaggtcacagggaagcccaaagctgttggccggccctgctacctgacgcgccagaagcacccagccctgcccagcaaccggccccagcagcaggtcctggtgctggcggagccaggcgcaagcatctaccttctggcacagcatcagccggctggcacccttccgcaagtgaactggtccctgcctgacagcacctgctgggccttcctgccagtggcccccagtttttcttccccgaggcccactcggcctggccttcctctgcctgcaagtgagcagggatgggctggggagttgcttgtgccaccaagacgtgccaggtctgtactcctgttgtctttttccctgctcctggtgccctgaagagaccagcaagggggcagaccccgcactcgccacaccgccgctgcagcttgggccccatccgccctctggacctgtgtagggcctcactgctggagcggggaaaccgcagctcagcccaggcccagctggggagaaggcgctacctgcgtgggaccctcttctctggaaacctaatcctcctttcatttcctctgggcaggactctctggccttctgtggcctgcaatgccaggccatgtgcccctctgccctctagttctccaagtccccagcccggccagtggtgccaggcagcttgccacttgggagggcagaagccaggaattccacacccttgtgttgcgcccggagcccgcccttcgcctcccagcccctcaagacaccgctggctgctggacaccctcttcacttgtgtgtgtgtgtgtagcggaaaaggacaagacggtgcagtcggctgcatactcccagtcgggagtgtggtcagtctgcctgctgctgtgcggtagctccagaaccacctcgttcctggttttgtttggattttggcatcttgtttttctaacaacaaacaatggagaaaaagaattgattcttagtgacacagaagattgccttacgctcgtgagcgtgagaagccataagagagagaccgaattctgtggctcagcacacaggactgacccacagcccaggcagcgggtgtgtggagatggcgccctgtcctgccaaggggcgccaggagcagagccagggcctggcgagctggcgtggagcccacaggattcagcagcatggacagtcactcttgcactattccttctccaagccagaaaccacatttaatttcataaataaatttatgaaaagtaacctggctgct

SEQ ID NO: 175980 - DNA, 4788 bp, Homo sapiens
  Payload ID: 14551
  Gene Symbol: ARHGEF4
  Gene Name: Rho guanine nucleotide exchange factor (GEF) 4
  ENST ID: ENST00000409359
  CDS Start-End: 1199-4243
attccccaggctgagagtacgcgagggcgcagcagcggcaaggggctggaactggggtcggggctgttgggctcctgctcggggtgccccctctctggcccgatttccgggcccgctcaccatccgggacccactcagttgggacgcctccacctcgctgcccccacaggaaccccaagatgggccgggggctccggggcactgtcaggggtggccggccacaggttgccaagcccgacctccccagactccagagccaggtgcacacctgccaggtgaaggtgagattgaagataaccagctccccacatcccctgcagaacaagtggagcagggatggaaccagcaaacagaccgcgatgattctgaaacgctgtcccagcagagtgaaagtggatcagacacaaaaactgacccctttgaaagtgcctctgacacagagtccttgtctgggtacctcccgaggggagtcttccaccctctaagaggtactcccgtagatatagaagcaccttgggaataccctgatgtctcagcaactggaccccctcaggagcagcatttgaccagtgttcctgggcttcatgcaaaggaagaactcgatttgtcccctagcttagaggatgactcttgcaaaaatgggtggcgagcctttgccacagttgctggagaacaggaggcaggacacctctgggactgcgcgaccagcctggagcgagagtctttgctggcaggggttccccgacacacagggtgctgcttacagagggccacagacagcagtggtcctgagccagtacagggggtggctgttcaagacctcagagggctctccagtgtttctcttcagaaatccaggtctgagagctatctgggcatcccagtggtctggcccttccttctctggtgctgtgaactgggtcggagttggccacatatccacaacagggccagggcactggtgctacctagcagaggcccactggacaacacagcccctctggggaccaggacaaagaaggaaagtactctaggccctgcaggggacacagaattgctctggtcccagccccactcggatgtcccctgccagcctcctttgaggacatcttgcctcctacgcaccaaccgtcaccatagtgccccagaaactactggtgacaagaacagggcatcccccagactcaactgtgggcacatgagggcactggtcagggcccattccatagcagggttttcaccagagtgccccgaggatcccgtgggacagaatgttgtgaagtctgggacccatgtgaaggaaggggccaaaaatgaacgagatccaagaatacaaaacatcccttcccctgcacccacccagctgtctggcccgattcctgcttttcagagtggggctccccatctgcagggtccctgcaagcctggtgggtttcgcttgcaaagggcctctcaggacactccttctgcaggtctcctgggggaaaaccagttaagacaggattccaggtcatgtctggtggcttcatgcctcacctcagagttagtgaagctcagtgcagaggaagtgcctgagcccgctgagtgcaagtcagagcaaagcccagaaagcagaacccaggaaccccaaggcacccaactcgcaccaagagctgctgatgagagagagacacagaagcacctctggggcatttctgtccaggcaggaaaccaaaccagtaattacacatcaaagtatgtgctcagcgaggaaagcaagtcacctaccagggccaagttcccacggcagcctagcagtgaggggacccaggtgtggagtggagacttgatgggctgcttggaagtgagtgacagttcagatgcccctgagaccacccagaaatcaagcgcaatagacacttcaaaggcagccgaagaagccatggttctagaccccaactacagggaacaggctttgcaaggtctttcagaattcaaggcagccacggtgtctcactgcggccccggggctgaggagggtgaacaggggcctgggggtgccgggggccggcagctggagcccaaagcaggcggcgaggcctcgaggggcaggggcgccctcatcattgtagctgtggagcagaaaggtcttcaggccagcaggagcaatgcggggcctgttccagaaacactgccccgtgactttcctaaggaaagaccagaatctcccttgagcactggcgagaccccctgtgagtctcccactagggggaaaacaccagccggtaatgagtgtgagttgccagcagcccccatacagggagctggcgatggggctcttcagcgggtggcccaggccgcagagcttgggagagtgctggtcccccaagctgcttcggaagagacgccgagcacagaggagcccccgggagagagactgcgtggggagagccggagctccgggtcaggggagcgtggcccggaggaggcccccgaaggcggtgctgcagcagcccggggccagcgcccccgcgtccccgccttggagccgccccagccgccacgcgggctccgcaagggcgcgcaggagcctgggaagcgcccgacgttttccaaggtgacctccttcaggaagggcaggcccttggccactgagagcccaggaggggtcccggccccgaccaccgagggtcgccgctggggctcttcaggccccgaggggctccccagggagaatccgcccgctgcggccggtcgggacgcaccgcctctgcaccacggggacgccagcgcctggcccgagtttgtcccgcaggctgcaggcgacaggactgcagggccggcaggagcggggcacacggggacctcaggggatcttggtagccgagggccttcctctgagagctgcaacgcaaagagactcaaaacaacggagaaaaaactcagggcaaggttggccttggctcataagaccttttcaaactttattgagtcaatagttctagagaaagagaacacccatgaacgttccccaagttctcccaagggcgagaaggagaagagcaggctgcgccagggttcctggcgggcgtttctgaaaagcaaagatgccggaagccccaaaaagcccaccctagtgagtctgcctctaggacccgaagttctctccccagcagagaccgacagccactgtgaggaacgggcggaggacaaagagggctatgtttttagcgatcactgggcacccccacttgcctccacacctttgtcctccagtttagtttctccagaacacaggaggaaaagtgaaccgaccatcaagtgcacagccacccaggaaggcggtaggtacctaccttcaggtatctttccggaaaagtcctggctggcgtcccccggcagccctcgggcccagcaggctggaatcgcacacaccctgccttccagctctgcctgctgcctggcatatgaaaaccccgggacgccctgcagacccacgagccccaagcccctgagtcccaggcctagtgctcagcggatgggtctccactaccccgggaggggtagcgccatctccatggtttctcttggaagctacagctacgtggacagcagttcaggggaccctgaaagacccaagattcccaagggccagaccagtttcctgctttctctgcagacgctaaaccaagatgagcagaaggaagagagcagggaaggaggccagggtccgcgcggcttgggcacagtgccctggctcagggaccttcctgggagtgagaaccacatgccctgggaagaaccagcaggtgagaagcccagttgctctcacagtcagaaggcgttccacatggagcctgcccagaagccctgcttcaccactgacatggtgacatgggccctcctctgcatctctgcagagactgtgcgtggggaggctccttcacagcctaggggcatccctcaccgctcgcccgtcagtgtggatgacctgtggctggagaagacacagagaaagaagttgcagaagcaggcccacgtcgaaaggaggctgcacataggggcagtgcacaaagatggagtcaagtgctggagaaagacgatcattacctctccagagtctttgaatctccctagaagaagccatccactctcccagagtgctccaacgggactgaaccacatgggctggccagagcacacaccaggcactggtgagttacgcgcctctctcttttgctatgtactctggatcctggcatgaaggacaagaagctagtgctgttggcagctgtatccacttgcctggtagaagtagcttgaaggtgagagagataaacaattgtcctcttccttcagttagggaggagtgcctactacccaaagaaagggaattattggctgggcacagtggctcatgcctgtaatcccagcactttgagaggctgaagcaggcggatcacttgaggtcaggagctcaagaccagcctgggcaacatggtgaaaccccatctctactaaaaatacaggccgggtgcggtggctcatgctataatcccagcactttgggaggccaaggtgggcggatcatatgaggtcgggagttcgagaccagcctgaccagcatggagaaaccccatctctactaaaaatacaaaattagctgggcatggtggcacatgcctgtaatctcagctactcgggaggctgaggcaggagaattgcttgaacctgggagtcagaggttgcggtgagccaagatcacgccattgcactccagcctgggcaataagagcaaaactccgtctc

SEQ ID NO: 175981 - DNA, 1893 bp, Homo sapiens
  Payload ID: 14551
  Gene Symbol: ARHGEF4
  Gene Name: Rho guanine nucleotide exchange factor (GEF) 4
  ENST ID: ENST00000409303
  CDS Start-End: 1-1893
atgccctgggaagaaccagcaggtgagaagcccagttgctctcacagtcagaaggcgttccacatggagcctgcccagaagccctgcttcaccactgacatggtgacatgggccctcctctgcatctctgcagagactgtgcgtggggaggctccttcacagcctaggggcatccctcaccgctcgcccgtcagtgtggatgacctgtggctggagaagacacagagaaagaagttgcagaagcaggcccacgtcgaaaggaggctgcacataggggcagtgcacaaagatggagtcaagtgctggagaaagacgatcattacctctccagagtctttgaatctccctagaagaagccatccactctcccagagtgctccaacgggactgaaccacatgggctggccagagcacacaccaggcactgccatgcctgatggagctctggacacagctgtctgcgctgacgaagtggggagcgaggaggacctgtatgatgacctgcacagctccagccaccactacagccaccctggagggggtggggagcagctggctatcaatgagctcatcagcgatggcagtgtggtctgcgctgaagcactctgggaccatgtcaccatggacgaccaggagctgggcttcaaagctggggacgtcatcgaagtgatggatgccaccaacagagagtggtggtggggccgggtcgccgatggcgagggctggtttccagccagcttcgttcggctgagggtgaatcaggacgagcccgcggatgacgacgcccctctggccgggaacagcggagcggaggacggcggggcggaggcgcagagcagcaaggaccagatgcggaccaacgtcatcaacgagatcctcagcactgagcgggactacatcaagcacctgcgcgacatctgcgagcaagccgacttccagatctactcggagtactgcaataaccaccccaacgcctgcgtggagctctcccggctcaccaagctcagcaagtacgtgtacttcttcgaggcctgccggctgctgcagaagatgattgacatctccctggatggcttcctgctgactccggtgcagaagatctgcaagtaccctctgcagctggccgagctgctcaaatacacgcacccccagcacagggacttcaaggatgttgaagccgccttgcatgccatgaagaacgtggcccagctcatcaacgagcggaagcggagacttgagaacatcgacaagattgctcagtggcagagctccatagaggactgggagggagaagatctcttggtcaggagctcagaactcatctactcgggggagctgactcgagttacacagcctcaagccaaaagccagcagcgaatgttctttctctttgaccaccagctcatctactgtaagaaggacctgctccgccgcgacgtgttgtactacaagggccggctggacatggacggcctggaggtggtggacctggaggacgggaaggacagagacctccatgtgagcatcaagaacgccttccggctgcaccgtggcgccacaggggacagccacctgctgtgcaccaggaagcccgagcagaagcagcgctggctcaaggcctttgccagggagagggagcaggtgcagctggaccaggagacaggcttctccatcactgaactgcagaggaagcaggccatgctgaatgccagcaagcagcaggtcacagggaagcccaaagctgttggccggccctgctacctgacgcgccagaagcacccagccctgcccagcaaccggccccagcagcaggtcctggtgctggcggagcccaggcgcaagccatctaccttctggcacagcatcagccggctggcacccttccgcaagtga

SEQ ID NO: 175982 - DNA, 1638 bp, Homo sapiens
  Payload ID: 14551
  Gene Symbol: ARHGEF4
  Gene Name: Rho guanine nucleotide exchange factor (GEF) 4
  ENST ID: ENST00000438985
  CDS Start-End: 1-1119
ccacttgcctccacacctttgtcctccagtttagtttctccagaacacaggaggaaaagtgaaccgaccatcaagtgcacagccacccaggaaggcggtaggtacctaccttcaggtatctttccggaaaagtcctggctggcgtcccccggcagccctcgggcccagcaggctggaatcgcacacaccctgccttccagctctgcctgctgcctggcatatgaaaaccccgggacgccctgcagacccacgagccccaagcccctgagtcccaggcctagtgctcagcggatgggtctccactaccccgggaggggtagcgccatctccatggtttctcttggaagctacagctacgtggacagcagttcaggggaccctgaaagacccaagattcccaagggccagaccagtttcctgctttctctgcagacgctaaaccaagatgagcagaaggaagagagcagggaaggaggccagggtccgcgcggcttgggcacagtgccctggctcagggaccttcctgggagtgagaaccacatgccctgggaagaaccagcaggtgagaagcccagttgctctcacagtcagaaggcgttccacatggagcctgcccagaagccctgcttcaccactgacatggtgacatgggccctcctctgcatctctgcagagactgtgcgtggggaggctccttcacagcctaggggcatccctcaccgctcgcccgtcagtgtggatgacctgtggctggagaagacacagagaaagaagttgcagaagcaggcccacgtcgaaaggaggctgcacataggggcagtgcacaaagatggagtcaagtgctggagaaagacgatcattacctctccagagtctttgaatctccctagaagaagccatccactctcccagagtgctccaacgggactgaaccacatgggctggccagagcacacaccaggcactgctgttggccggccctgctacctgacgcgccagaagcacccagccctgcccagcaaccggccccagcagcaggtcctggtgctggcggagcccaggcgcaagccatctaccttctggcacagcatcagccggctggcacccttccgcaagtgaactggtccctgcctgacagcacctgctgggccttcctgccagtggcccccagtttttcttccccgaggcccactcggcctggccttcctctgcctgcaagtgagcagggatgggctggggagttgcttgtgccaccaagacgtgccaggtctgtactcctgttgtctttttccctgctcctggtgccctgaagagaccagcaagggggcagaccccgcactcgccacaccgccgctgcagcttgggccccatccgccctctggacctgtgtagggcctcactgctggagcggggaaaccgcagctcagcccaggcccagctggggagaaggcgctacctgcgtgggaccctcttctctggaaacctaatcctcctttcatttcctctgggcaggactctctggccttctgtggcctgcaatgccaggccatgtgcccctctgccctctagttctccaagtccccagcccggccagtggtgccaggcagcttgccacttgggagggcagaagccaggaat

SEQ ID NO: 175983 - DNA, 2172 bp, Homo sapiens
  Payload ID: 14551
  Gene Symbol: ARHGEF4
  Gene Name: Rho guanine nucleotide exchange factor (GEF) 4
  ENST ID: ENST00000428230
  CDS Start-End: 520-1098
agaaaaaactcagggcaaggttggccttggctcataagaccttttcaaactttattgagtcaatagttctagagaaagagaacacccatgaacgttccccaagttctcccaagggcgagaaggagaagagcaggctgcgccagggttcctggcgggcgtttctgaaaagcaaagatgccggaagccccaaaaagcccaccctagtgagtctgcctctaggacccgaagttctctccccagcagagaccgacagccactgtgaggaacgggcggaggacaaagagggctatgtttttagcgatcactgggcacccccacttgcctccacacctttgtcctccagtttagtttctccagaacacaggaggaaaagtgaaccgaccatcaagtgcacagccacccaggaaggcgacgctaaaccaagatgagcagaaggaagagagcagggaaggaggccagggtccgcgcggcttgggcacagtgccctggctcagggaccttcctgggagtgagaaccacatgccctgggaagaaccagcaggtgagaagcccagttgctctcacagtcagaaggcgttccacatggagcctgcccagaagccctgcttcaccactgacatggtgacatgggccctcctctgcatctctgcagagactgtgcgtggggaggctccttcacagcctaggggcatccctcaccgctcgcccgtcagtgtggatgacctgtggctggagaagacacagagaaagaagttgcagaagcaggcccacgtcgaaaggaggctgcacataggggcagtgcacaaagatggagtcaagtgctggagaaagacgatcattacctctccagagtctttgaatctccctagaagaagccatccactctcccagagtgctccaacgggactgaaccacatgggctggccagagcacacaccaggcactgctgttggccggccctgctacctgacgcgccagaagcacccagccctgcccagcaaccggccccagcagcaggtcctggtgctggcggagcccaggcgcaagccatctaccttctggcacagcatcagccggctggcacccttccgcaagtgaactggtccctgcctgacagcacctgctgggccttcctgccagtggcccccagtttttcttccccgaggcccactcggcctggccttcctctgcctgcaagtgagcagggatgggctggggagttgcttgtgccaccaagacgtgccaggtctgtactcctgttgtctttttccctgctcctggtgccctgaagagaccagcaagggggcagaccccgcactcgccacaccgccgctgcagcttgggccccatccgccctctggacctgtgtagggcctcactgctggagcggggaaaccgcagctcagcccaggcccagctggggagaaggcgctacctgcgtgggaccctcttctctggaaacctaatcctcctttcatttcctctgggcaggactctctggccttctgtggcctgcaatgccaggccatgtgcccctctgccctctagttctccaagtccccagcccggccagtggtgccaggcagcttgccacttgggagggcagaagccaggaattccacacccttgtgttgcgcccggagcccgcccttcgcctcccagcccctcaagacaccgctggctgctggacaccctcttcacttgtgtgtgtgtgtgtagcggaaaaggacaagacggtgcagtcggctgcatactcccagtcgggagtgtggtcagtctgcctgctgctgtgcggtagctccagaaccacctcgttcctggttttgtttggattttggcatcttgtttttctaacaacaaacaatggagaaaaagaattgattcttagtgacacagaagattgccttacgctcgtgagcgtgagaagccataagagagagaccgaattctgtggctcagcacacaggactgacccacagcccaggcagcgggtgtgtggagatggcgccctgtcctgccaaggggcgccaggagcagagccagggcctggcgagctggcgtggagcccacaggattcagcagcatggacagtcactcttgcactattccttctccaagccagaaaccacatttaatttcataaataaatttatgaaaagtaacctggctgct

SEQ ID NO: 175984 - DNA, 3800 bp, Homo sapiens
  Payload ID: 14551
  Gene Symbol: ARHGEF4
  Gene Name: Rho guanine nucleotide exchange factor (GEF) 4
  Uniprot ID: Q9NR80
  ENST ID: ENST00000525839
  CDS Start-End: 75-2087
gggaaggaggccagggtccgcgcggcttgggcacagtgccctggctcagggaccttcctgggagtgagaaccacatgccctgggaagaaccagcaggtgagaagcccagttgctctcacagtcagaaggcgttccacatggagcctgcccagaagccctgcttcaccactgacatggtgacatgggccctcctctgcatctctgcagagactgtgcgtggggaggctccttcacagcctaggggcatccctcaccgctcgcccgtcagtgtggatgacctgtggctggagaagacacagagaaagaagttgcagaagcaggcccacgtcgaaaggaggctgcacataggggcagtgcacaaagatggagtcaagtgctggagaaagacgatcattacctctccagagtctttgaatctccctagaagaagccatccactctcccagagtgctccaacgggactgaaccacatgggctggccagagcacacaccaggcactgccatgcctgatggagctctggacacagctgtctgcgctgacgaagtggggagcgaggaggacctgtatgatgacctgcacagctccagccaccactacagccaccctggagggggtggggagcagctggctatcaatgagctcatcagcgatggcagtgtggtctgcgctgaagcactctgggaccatgtcaccatggacgaccaggagctgggcttcaaagctggggacgtcatcgaagtgatggatgccaccaacagagagtggtggtggggccgggtcgccgatggcgagggctggtttccagccagcttcgttcggctgagggtgaatcaggacgagcccgcggatgacgacgcccctctggccgggaacagcggagcggaggacggcggggcggaggcgcagagcagcaaggaccagatgcggaccaacgtcatcaacgagatcctcagcactgagcgggactacatcaagcacctgcgcgacatctgcgagggctacgtccggcagtgccgcaagcgcgcagacatgttcagcgaggagcagctgcgtaccatcttcgggaacatcgaggacatctaccgctgccagaaggccttcgtgaaggccctggagcagaggttcaaccgcgagcgcccacacctgagcgagctgggtgcctgcttcctggagcatcaagccgacttccagatctactcggagtactgcaataaccaccccaacgcctgcgtggagctctcccggctcaccaagctcagcaagtacgtgtacttcttcgaggcctgccggctgctgcagaagatgattgacatctccctggatggcttcctgctgactccggtgcagaagatctgcaagtaccctctgcagctggccgagctgctcaaatacacgcacccccagcacagggacttcaaggatgttgaagccgccttgcatgccatgaagaacgtggcccagctcatcaacgagcggaagcggagacttgagaacatcgacaagattgctcagtggcagagctccatagaggactgggagggagaagatctcttggtcaggagctcagaactcatctactcgggggagctgactcgagttacacagcctcaagccaaaagccagcagcgaatgttctttctctttgaccaccagctcatctactgtaagaaggacctgctccgccgcgacgtgttgtactacaagggccggctggacatggacggcctggaggtggtggacctggaggacgggaaggacagagacctccatgtgagcatcaagaacgccttccggctgcaccgtggcgccacaggggacagccacctgctgtgcaccaggaagcccgagcagaagcagcgctggctcaaggcctttgccagggagagggagcaggtgcagctggaccaggagacaggcttctccatcactgaactgcagaggaagcaggccatgctgaatgccagcaagcagcaggtcacagggaagcccaaaggtaggcggacagcagccccacctcctcggctgcccggtccttaccctgctgacatcattcccttctctgaaccacaaagccaagccagctagccaccaggcctgaggggggcccactgccctttgcagctgtttgttcccaaaggttggtaataaggggccactggggaagcctgggtcagtatatggttgacattcttactctcaacaccttggctcccccagatcagggccattggtgacaatgcttgtttccccagggttccttcctgacaggcatctggggttggtgtagggatggagctgctttccccatttctacagagagccatgcccctgaaacatcacatgcctttgcacaggccacccccctcttcaggctgctgcaggaggccaggcccaggccagagaccccaggcagcctgagctcttggatgtggtcagctctccaggagcaagtcctgtgtggcaaaactgcctcctacggcggctctgaagcagagccctgggacggaccccatgctgtccccaacagctggggtggcactctgccctgggcacccatgaccctctgctgtctctccctgttcagctgttggccggccctgctacctgacgcgccagaagcacccagccctgcccagcaaccggccccagcagcaggtcctggtgctggcggagcccaggcgcaagccatctaccttctggcacagcatcagccggctggcacccttccgcaagtgaactggtccctgcctgacagcacctgctgggccttcctgccagtggcccccagtttttcttccccgaggcccactcggcctggccttcctctgcctgcaagtgagcagggatgggctggggagttgcttgtgccaccaagacgtgccaggtctgtactcctgttgtctttttccctgctcctggtgccctgaagagaccagcaagggggcagaccccgcactcgccacaccgccgctgcagcttgggccccatccgccctctggacctgtgtagggcctcactgctggagcggggaaaccgcagctcagcccaggcccagctggggagaaggcgctacctgcgtgggaccctcttctctggaaacctaatcctcctttcatttcctctgggcaggactctctggccttctgtggcctgcaatgccaggccatgtgcccctctgccctctagttctccaagtccccagcccggccagtggtgccaggcagcttgccacttgggagggcagaagccaggaattccacacccttgtgttgcgcccggagcccgcccttcgcctcccagcccctcaagacaccgctggctgctggacaccctcttcacttgtgtgtgtgtgtgtagcggaaaaggacaagacggtgcagtcggctgcatactcccagtcgggagtgtggtcagtctgcctgctgctgtgcggtagctccagaaccacctcgttcctggttttgtttggattttggcatcttgtttttctaacaacaaacaatggagaaaaagaattgattcttagtgacacagaagattgccttacgctcgtgagcgtgagaagccataagagagagaccgaattctgtggctcagcacacaggactgacccacagcccaggcagcgggtgtgtggagatggcgccctgtcctgccaaggggcgccaggagcagagccagggcctggcgagctggcgtggagcccacaggattcagcagcatggacagtcactcttgcactattccttctccaagccagaaaccacatttaatttcataaataaatttatgaaaagt

SEQ ID NO: 175985 - DNA, 882 bp, Homo sapiens
  Payload ID: 14551
  Gene Symbol: ARHGEF4
  Gene Name: Rho guanine nucleotide exchange factor (GEF) 4
  ENST ID: ENST00000532720
  CDS Start-End: 1-862
cgcctgcgtggagctctcccggctcaccaagctcagcaagtacgtgtacttcttcgaggcctgccggctgctgcagaagatgattgacatctccctggatggcttcctgctgactccggtgcagaagatctgcaagtaccctctgcagctggccgagctgctcaaatacacgcacccccagcacagggacttcaaggatgttgaagccgccttgcatgccatgaagaacgtggcccagctcatcaacgagcggaagcggagacttgagaacatcgacaagattgctcagtggcagagctccatagaggactgggagggagaagatctcttggtcaggagctcagaactcatctactcgggggagctgactcgagttacacagcctcaagccaaaagccagcagcgaatgttctttctctttgaccaccagctcatctactgtaagaaggacctgctccgccgcgacgtgttgtactacaagggccggctggacatggacggcctggaggtggtggacctggaggacgggaaggacagagacctccatgtgagcatcaagaacgccttccggctgcaccgtggcgccacaggggacagccacctgctgtgcaccaggaagcccgagcagaagcagcgctggctcaaggcctttgccagggagagggagcaggtgcagctggaccaggagacaggcttctccatcactgaactgcagaggaagcaggccatgctgaatgccagcaagcagcaggtcacagggaagcccaaaggtaggcggacagcagccccacctcctcggctgcccggtccttaccctgctgacatcattcccttctctgaaccacaaagccaagccagctagccaccaggcctgaggggggc

SEQ ID NO: 175986 - DNA, 3486 bp, Homo sapiens
  Payload ID: 14551
  Gene Symbol: ARHGEF4
  Gene Name: Rho guanine nucleotide exchange factor (GEF) 4
  ENST ID: ENST00000611048
  CDS Start-End: 520-2412
agaaaaaactcagggcaaggttggccttggctcataagaccttttcaaactttattgagtcaatagttctagagaaagagaacacccatgaacgttccccaagttctcccaagggcgagaaggagaagagcaggctgcgccagggttcctggcgggcgtttctgaaaagcaaagatgccggaagccccaaaaagcccaccctagtgagtctgcctctaggacccgaagttctctccccagcagagaccgacagccactgtgaggaacgggcggaggacaaagagggctatgtttttagcgatcactgggcacccccacttgcctccacacctttgtcctccagtttagtttctccagaacacaggaggaaaagtgaaccgaccatcaagtgcacagccacccaggaaggcgacgctaaaccaagatgagcagaaggaagagagcagggaaggaggccagggtccgcgcggcttgggcacagtgccctggctcagggaccttcctgggagtgagaaccacatgccctgggaagaaccagcaggtgagaagcccagttgctctcacagtcagaaggcgttccacatggagcctgcccagaagccctgcttcaccactgacatggtgacatgggccctcctctgcatctctgcagagactgtgcgtggggaggctccttcacagcctaggggcatccctcaccgctcgcccgtcagtgtggatgacctgtggctggagaagacacagagaaagaagttgcagaagcaggcccacgtcgaaaggaggctgcacataggggcagtgcacaaagatggagtcaagtgctggagaaagacgatcattacctctccagagtctttgaatctccctagaagaagccatccactctcccagagtgctccaacgggactgaaccacatgggctggccagagcacacaccaggcactgccatgcctgatggagctctggacacagctgtctgcgctgacgaagtggggagcgaggaggacctgtatgatgacctgcacagctccagccaccactacagccaccctggagggggtggggagcagctggctatcaatgagctcatcagcgatggcagtgtggtctgcgctgaagcactctgggaccatgtcaccatggacgaccaggagctgggcttcaaagctggggacgtcatcgaagtgatggatgccaccaacagagagtggtggtggggccgggtcgccgatggcgagggctggtttccagccagcttcgttcggctgagggtgaatcaggacgagcccgcggatgacgacgcccctctggccgggaacagcggagcggaggacggcggggcggaggcgcagagcagcaaggaccagatgcggaccaacgtcatcaacgagatcctcagcactgagcgggactacatcaagcacctgcgcgacatctgcgagcaagccgacttccagatctactcggagtactgcaataaccaccccaacgcctgcgtggagctctcccggctcaccaagctcagcaagtacgtgtacttcttcgaggcctgccggctgctgcagaagatgattgacatctccctggatggcttcctgctgactccggtgcagaagatctgcaagtaccctctgcagctggccgagctgctcaaatacacgcacccccagcacagggacttcaaggatgttgaagccgccttgcatgccatgaagaacgtggcccagctcatcaacgagcggaagcggagacttgagaacatcgacaagattgctcagtggcagagctccatagaggactgggagggagaagatctcttggtcaggagctcagaactcatctactcgggggagctgactcgagttacacagcctcaagccaaaagccagcagcgaatgttctttctctttgaccaccagctcatctactgtaagaaggacctgctccgccgcgacgtgttgtactacaagggccggctggacatggacggcctggaggtggtggacctggaggacgggaaggacagagacctccatgtgagcatcaagaacgccttccggctgcaccgtggcgccacaggggacagccacctgctgtgcaccaggaagcccgagcagaagcagcgctggctcaaggcctttgccagggagagggagcaggtgcagctggaccaggagacaggcttctccatcactgaactgcagaggaagcaggccatgctgaatgccagcaagcagcaggtcacagggaagcccaaagctgttggccggccctgctacctgacgcgccagaagcacccagccctgcccagcaaccggccccagcagcaggtcctggtgctggcggagcccaggcgcaagccatctaccttctggcacagcatcagccggctggcacccttccgcaagtgaactggtccctgcctgacagcacctgctgggccttcctgccagtggcccccagtttttcttccccgaggcccactcggcctggccttcctctgcctgcaagtgagcagggatgggctggggagttgcttgtgccaccaagacgtgccaggtctgtactcctgttgtctttttccctgctcctggtgccctgaagagaccagcaagggggcagaccccgcactcgccacaccgccgctgcagcttgggccccatccgccctctggacctgtgtagggcctcactgctggagcggggaaaccgcagctcagcccaggcccagctggggagaaggcgctacctgcgtgggaccctcttctctggaaacctaatcctcctttcatttcctctgggcaggactctctggccttctgtggcctgcaatgccaggccatgtgcccctctgccctctagttctccaagtccccagcccggccagtggtgccaggcagcttgccacttgggagggcagaagccaggaattccacacccttgtgttgcgcccggagcccgcccttcgcctcccagcccctcaagacaccgctggctgctggacaccctcttcacttgtgtgtgtgtgtgtagcggaaaaggacaagacggtgcagtcggctgcatactcccagtcgggagtgtggtcagtctgcctgctgctgtgcggtagctccagaaccacctcgttcctggttttgtttggattttggcatcttgtttttctaacaacaaacaatggagaaaaagaattgattcttagtgacacagaagattgccttacgctcgtgagcgtgagaagccataagagagagaccgaattctgtggctcagcacacaggactgacccacagcccaggcagcgggtgtgtggagatggcgccctgtcctgccaaggggcgccaggagcagagccagggcctggcgagctggcgtggagcccacaggattcagcagcatggacagtcactcttgcactattccttctccaagccagaaaccacatttaatttcataaataaatttatgaaaagtaacctggctgct

SEQ ID NO: 175987 - DNA, 5919 bp, Homo sapiens
  Payload ID: 14552
  Gene Symbol: ARHGEF40
  Gene Name: Rho guanine nucleotide exchange factor (GEF) 40
  Uniprot ID: Q8TER5
  ENST ID: ENST00000298694
  CDS Start-End: 128-4687
gagccgccaccgcggccggagctgtcccttagccagacccggcgagacacgagcggcgggagggaggcggtggcgcgcccggccccgcccgcccgaccaagcgtcggacgcggcccggcgccgagccatggagcctgagccagtggaggactgtgtgcagagcactctcgccgccctgtatccaccctttgaggcaacagcccccaccctgttgggccaggtgttccaggtggtggagaggacttatcgggaggacgcactgaggtacacgctggacttcctggtaccagccaagcacctgcttgccaaggtccagcaggaagcctgtgcccaatacagtggattcctcttcttccatgaggggtggccgctctgcctgcatgaacaggtggtggtgcagctagcagccctaccctggcaactgctgcgcccaggagacttctatctgcaggtggtgccctcagctgcccaagcaccccgactagcactcaagtgtctggcccctgggggtgggcgggtgcaggaggttcctgtgcccaatgaggcttgtgcctacctattcacacctgagtggctacaaggcatcaacaaggaccggccaacaggtcgcctcagtacctgcctactgtctgcgccctctgggattcagcggctgccctgggctgagctcatctgtccacgatttgtgcacaaagagggcctcatggttggacatcagccaagtacactgcccccagaactgccctctggacctccagggcttcccagccctccacttcctgaggaggcgctgggtacccggagtcctggggatgggcacaatgcccctgtggaaggacctgagggcgagtatgtggagctgttagaggtgacgctgcccgtgagggggagcccaacagatgctgaaggctccccaggcctctccagagtccggacggtacccacccgcaagggcgctggagggaagggccgccaccggagacaccgggcgtggatgcaccagaagggcctggggcctcggggccaggatggagcacgcccacccggcgaggggagcagcaccggagcctcccctgagtctcccccaggagctgaggctgtcccagaggcagcagtcttggaggtgtctgagcccccagcagaggctgtgggagaagcctccggatcttgccccctgaggccaggggagcttagaggaggaggaggaggaggccagggggctgaaggaccacctggtacccctcggagaacaggcaaaggaaacagaagaaagaagcgagctgcaggtcgaggggctcttagccgaggaggggacagtgccccactgagccctggggacaaggaagatgccagccaccaagaagcccttggcaatctgccctcaccaagtgagcacaagcttccagaatgccacctggttaaggaggaatatgaaggctcagggaagccagaatctgagccaaaagagctcaaaacagcaggcgagaaagagcctcagctctctgaagcctgtgggcctacagaagagggggccggagagagagagctggaggggccaggcctgctgtgtatggcaggacacacaggcccagaaggccccctgtctgacactccaacacctccgctggagactgtgcaggaaggaaaaggggacaacattccagaagaggcccttgcagtctccgtctctgatcaccctgatgtagcttgggacttgatggcatctggattcctcatcctgacgggaggggtggaccagagtgggcgagctctgctgaccattaccccaccgtgccctcctgaggagcccccaccctcccgagacacgctgaacacaactcttcattacctccactcactgctcaggcctgatctacagacactggggctgtccgtcctgctggaccttcgtcaggcacctccactgcctccagcactcattcctgccttgagccaacttcaggactcaggagatcctccccttgttcagcggctgctgattctcattcatgatgaccttccaactgaactctgtggatttcagggtgctgaggtgctgtcagagaatgatctgaaaagagtggccaagccagaggagctgcagtgggagttaggaggtcacagggacccctctcccagtcactgggtagagatacaccaggaagtggtaaggctatgtcgcctgtgccaaggtgtgctgggctcggtacggcaggccattgaggagctggagggagcagcagagccagaggaagaggaggcagtgggaatgcccaagccactgcagaaggtgctggcagatccccggctgacggcactgcagagggatgggggggccatcctgatgaggctgcgctccactcccagcagcaagctggagggccaaggcccagctacactgtatcaggaagtggacgaggccattcaccagcttgtgcgcctctccaacctgcacgtgcagcagcaagagcagcggcagtgcctgcggcgactccagcaggtgttgcagtggctctcgggcccaggggaggagcagctggcaagctttgctatgcctggggacaccttgtctgccctgcaggagacagagctgcgattccgtgctttcagcgctgaggtccaggagcgcctggcccaggcacgggaggccctggctctggaggagaatgccacctcccagaaggtgctggatatctttgaacagcggctggagcaggttgagagtggcctccatcgggccctgcggctacagcgcttcttccagcaggcacatgaatgggtggatgagggctttgctcggctggcaggagctgggccgggtcgggaggctgtgctggctgcactggccctgcggcgggccccagagcccagtgccggcaccttccaggagatgcgggccctggccctggacctgggcagcccagcagccctgcgagaatggggccgctgccaggcccgctgccaagagctagagaggaggatccagcaacacgtgggagaggaggcgagcccacggggctaccgacgacggcgggcagacggtgccagcagtggaggggcccagtgggggccccgcagcccctcgcccagcctcagctccttgctgctccccagcagccctgggccacggccagccccatcccattgctccctggccccatgtggagaggactatgaggaagagggccctgagctggctccagaagcagagggcaggcccccaagagctgtgctgatccgaggcctggaggtcaccagcactgaggtggtagacaggacgtgctcaccacgggaacacgtgctgctgggccgggctagggggccagacggaccctggggagtaggcaccccccggatggagcgcaagcgaagcatcagtgcccagcagcggctggtgtctgagctgattgcctgtgaacaagattacgtggccaccttgagtgagccagtgccaccccctgggcctgagctgacgcctgaacttcggggcacctgggctgctgccctgagtgcccgggaaaggcttcgcagcttccaccggacacactttctgcgggagcttcagggctgcgccacccaccccctacgcattggggcctgcttccttcgccacggggaccagttcagcctttatgcacagtacgtgaagcaccgacacaaactggagaatggtctggctgcgctcagtcccttaagcaagggctccatggaggctggcccttacctgccccgagccctgcagcagcctctggaacagctgactcggtatgggcggctcctggaggagctcctgagggaagctgggcctgagctcagttctgagtgccgggcccttggggctgctgtacagctgctccgggaacaagaggcccgtggcagagacctgctggccgtggaggcggtgcgtggctgtgagatagatctgaaggagcagggacagctcttgcatcgagaccccttcactgtcatctgtggccgaaagaagtgccttcgccatgtctttctcttcgagcatctcctcctgttcagcaagctcaagggccctgaaggggggtcagagatgtttgtttacaagcaggcctttaagactgctgatatggggctgacagaaaacatcggggacagcggactctgctttgagttgtggtttcggcggcggcgtgcacgagaggcatacactctgcaggcaacctcaccagagatcaaactcaagtggacaagttctattgcccagctgctgtggagacaggcagcccacaacaaggagctccgagtgcagcagatggtgtccatgggcattgggaataaacccttcctggacatcaaagcccttggggagcggacgctgagtgccctgctcactggaagagccgcccgcacccgggcctccgtggccgtgtcatcctttgagcatgccggcccctcccttcccggcctttcgccgggagcctgctccctgcctgcccgcgtcgaggaggaggcctgggatctggacgtcaagcaaatttccctggccccagaaacacttgactcttctggagatgtgtccccaggaccaagaaacagccccagcctgcaacccccccaccctgggagcagcactcccaccctggccagtcgagggatcttagggctatcccgacagagtcatgctcgagccctgagtgaccccaccacgcctctgtgacctggagaagatccagaacttgcgtgcagcttctcctctcagcacactttgggctgggatggcagtggggcataatggagccctgggcgatcgctgaatttcttccctctgcttcctggacacagaggaggtctaacgaccagagtattgccctgccaccactatctctagtctccctagcttggtgccttctcctgcaggagtcagagcagccacattgcttgccttcataccctggaggtggggaagttatccctcttccggtgctttcccatcctgggccactgtatccaggacatcactcccatgccagccctccctggcagcccatgttctcctcttttctcaccccctgactttccctgagaagaatcatctctgccaggtcaactggagtccctggtgactccattctgaggtgtcacaagcaatgaagctatgcaaacaataggagggtgtgacaggggaaccgtagactttatatatgtaattactgttattataatactattgttatattaaatgtatttactcacactttgcctctaaggagctagagtagtcctctggattaaggtgataaataacttgagcactttccctcaaccagcccttaactagaacacagaaaataaaaccaagactggaaggtcccctctacccctcccaggcccagagctagctgactgtgtatgagcctgggagaatgtgtctcctccacagtggctcccagaggttccacacactctctgaagctccttctcccacactgcacctactccttgaggctgaactggtcacagacaaactgggatccagcacagtccagcagttctcaaaatgaggtcctcaggccacagtgcgtgagaacttgcttggctgtttgttaaatgctaattcttgggccccatcagagctactgcatcgaaacctgggggtaaaacccaatattctgcatttcttatcaaactctttgggtgataactaagtgtctgaagaggtgactatttcctgacagaaggacccaaagagggaagcaggacataggtaggcagacagacacagggccctgtgcctcaagacacctgtttattggggacacgactctgcaatagggatgacaggaatcgtaccaaaaatagcgacgtctacagggcccctgatggggctagaagggtacagtgccccccaccctcaccccttgtacaaaaataaactctcacgcctatgga

SEQ ID NO: 175988 - DNA, 1796 bp, Homo sapiens
  Payload ID: 14552
  Gene Symbol: ARHGEF40
  Gene Name: Rho guanine nucleotide exchange factor (GEF) 40
  ENST ID: ENST00000555038
  CDS Start-End: 125-1796
ccgccaccgcggccggagctgtcccttagccagacccggcgagacacgagcggcgggagggaggcggtggcgcgcccggccccgcccgcccgaccaagcgtcggacgcggcccggcgccgagccatggagcctgagccagtggaggactgtgtgcagagcactctcgccgccctgtatccaccctttgaggcaacagcccccaccctgttgggccaggtgttccaggtggtggagaggacttatcgggaggacgcactgaggtacacgctggacttcctggtaccagccaagcacctgcttgccaaggtccagcaggaagcctgtgcccaatacagtggattcctcttcttccatgaggggtggccgctctgcctgcatgaacaggtggtggtgcagctagcagccctaccctggcaactgctgcgcccaggagacttctatctgcaggtggtgccctcagctgcccaagcaccccgactagcactcaagtgtctggcccctgggggtgggcgggtgcaggaggttcctgtgcccaatgaggcttgtgcctacctattcacacctgagtggctacaaggcatcaacaaggaccggccaacaggtcgcctcagtacctgcctactgtctgcgccctctgggattcagcggctgccctgggctgagctcatctgtccacgatttgtgcacaaagagggcctcatggttggacatcagccaagtacactgcccccagaactgccctctggacctccagggcttcccagccctccacttcctgaggaggcgctgggtacccggagtcctggggatgggcacaatgcccctgtggaaggacctgagggcgagtatgtggagctgttagaggtgacgctgcccgtgagggggagcccaacagatgctgaaggctccccaggcctctccagagtccggacggtacccacccgcaagggcgctggagggaagggccgccaccggagacaccgggcgtggatgcaccagaagggcctggggcctcggggccaggatggagcacgcccacccggcgaggggagcagcaccggagcctcccctgagtctcccccaggagctgaggctgtcccagaggcagcagtcttggaggtgtctgagcccccagcagaggctgtgggagaagcctccggatcttgccccctgaggccaggggagcttagaggaggaggaggaggaggccagggggctgaaggaccacctggtacccctcggagaacaggcaaaggaaacagaagaaagaagcgagctgcaggtcgaggggctcttagccgaggaggggacagtgccccactgagccctggggacaaggaagatgccagccaccaagaagcccttggcaatctgccctcaccaagtgagcacaagcttccagaatgccacctggttaaggaggaatatgaaggctcagggaagccagaatctgagccaaaagagctcaaaacagcaggcgagaaagagcctcagctctctgaagcctgtgggcctacagaagagggggccggagagagagagctggaggggccaggcctgctgtgtatggcaggacacacaggcccagaaggccccctgtctgacactccaacacctccgctggagactgtgcaggaaggaaaaggggacaacattccagaagaggcccttgcagtctccgtctctgatcaccctgatgtagcttgggacttgatggcatctggattcctcatcctgacgggtcagtgggcatcagtgggtgaagggaaacaggactgggaaagagaagcaattg

SEQ ID NO: 175989 - DNA, 4902 bp, Homo sapiens
  Payload ID: 14552
  Gene Symbol: ARHGEF40
  Gene Name: Rho guanine nucleotide exchange factor (GEF) 40
  ENST ID: ENST00000556399
  CDS Start-End: 107-1615
ctgtcccttagccagacccggcgagacacgagcggcgggagggaggcggtggcgcgcccggccccgcccgcccgaccaagcgtcggacgcggcccggcgccgagccatggagcctgagccagtggaggactgtgtgcagagcactctcgccgccctgtatccaccctttgaggcaacagcccccaccctgttgggccaggtgttccaggtggtggagaggacttatcgggaggacgcactgaggtacacgctggacttcctggtaccagccaagcacctgcttgccaaggtccagcaggaagcctgtgcccaatacagtggattcctcttcttccatgaggggtggccgctctgcctgcatgaacaggtggtggtgcagctagcagccctaccctggcaactgctgcgcccaggagacttctatctgcaggtggtgccctcagctgcccaagcaccccgactagcactcaagtgtctggcccctgggggtgggcgggtgcaggaggttcctgtgcccaatgaggcttgtgcctacctattcacacctgagtggctacaaggcatcaacaaggaccggccaacaggtcgcctcagtacctgcctactgtctgcgccctctgggattcagcggctgccctgggctgagctcatctgtccacgatttgtgcacaaagagggcctcatggttggacatcagccaagtacactgcccccagaactgccctctggacctccagggcttcccagccctccacttcctgaggaggcgctgggtacccggagtcctggggatgggcacaatgcccctgtggaaggacctgagggcgagtatgtggagctgttagaggtgacgctgcccgtgagggggagcccaacagatgctgaaggctccccaggcctctccagagtccggacggtacccacccgcaagggcgctggagggaagggccgccaccggagacaccgggcgtggatgcaccagaagggcctggggcctcggggccaggatggagcacgcccacccggcgaggggagcagcaccggagcctcccctgagtctcccccaggagctgaggctgtcccagaggcagcagtcttggaggtgtctgagcccccagcagaggctgtgggagaagcctccggatcttgccccctgaggccaggggagcttagaggaggaggaggaggaggccagggggctgaaggaccacctggtacccctcggagaacaggcaaaggaaacagaagaaagaagcgagctgcaggtcgaggggctcttagccgaggaggggacagtgccccactgagccctggggacaaggaagatgccagccaccaagaagcccttggcaatctgccctcaccaagacacacaggcccagaaggccccctgtctgacactccaacacctccgctggagactgtgcaggaaggaaaaggggacaacattccagaagaggcccttgcagtctccgtctctgatcaccctgatgtagcttgggacttgatggcatctggattcctcatcctgacggcctggccattttgtgtcttcaggaggggtggaccagagtgggcgagctctgctgaccattaccccaccgtgccctcctgaggagcccccaccctcccgagacacgctgaacacaactcttcattacctccactcactgctcaggcctgatctacagacactggggctgtccgtcctgctggaccttcgtcaggcacctccactgcctccagcactcattcctgccttgagccaacttcaggactcaggagatcctccccttgttcagcggctgctgattctcattcatgatgaccttccaactgaactctgtggatttcagggtgctgaggtgctgtcagagaatgatctgaaaagagtggccaagccagaggagctgcagtgggagttaggaggtcacagggacccctctcccagtcactgggtagagatacaccaggaagtggtaaggctatgtcgcctgtgccaaggtgtgctgggctcggtacggcaggccattgaggagctggagggagcagcagagccagaggaagaggaggcagtgggaatgcccaagccactgcagaaggtgctggcagatccccggctgacggcactgcagagggatgggggggccatcctgatgaggctgcgctccactcccagcagcaagctggagggccaaggcccagctacactgtatcaggaagtggacgaggccattcaccagcttgtgcgcctctccaacctgcacgtgcagcagcaagagcagcggcagtgcctgcggcgactccagcaggtgttgcagtggctctcgggcccaggggaggagcagctggcaagctttgctatgcctggggacaccttgtctgccctgcaggagacagagctgcgattccgtgctttcagcgctgaggtccaggagcgcctggcccaggcacgggaggccctggctctggaggagaatgccacctcccagaaggtgctggatatctttgaacagcggctggagcaggttgagagtggcctccatcgggccctgcggctacagcgcttcttccagcaggcacatgaatgggtggatgagggctttgctcggctggcaggagctgggccgggtcgggaggctgtgctggctgcactggccctgcggcgggccccagagcccagtgccggcaccttccaggagatgcgggccctggccctggacctgggcagcccagcagccctgcgagaatggggccgctgccaggcccgctgccaagagctagagaggaggatccagcaacacgtgggagaggaggcgagcccacggggctaccgacgacggcgggcagacggtgccagcagtggaggggcccagtgggggccccgcagcccctcgcccagcctcagctccttgctgctccccagcagccctgggccacggccagccccatcccattgctccctggccccatgtggagaggactatgaggaagagggccctgagctggctccagaagcagagggcaggcccccaagagctgtgctgatccgaggcctggaggtcaccagcactgaggtggtagacaggacgtgctcaccacgggaacacgtgctgctgggccgggctagggggccagacggaccctggggagtaggcaccccccggatggagcgcaagcgaagcatcagtgcccagcagcggctggtgtctgagctgattgcctgtgaacaagattacgtggccaccttgagtgagccagtgccaccccctgggcctgagctgacgcctgaacttcggggcacctgggctgctgccctgagtgcccgggaaaggcttcgcagcttccaccggacacactttctgcgggagcttcagggctgcgccacccaccccctacgcattggggcctgcttccttcgccacggggaccagttcagcctttatgcacagtacgtgaagcaccgacacaaactggagaatggtctggctgcgctcagtcccttaagcaagggctccatggaggctggcccttacctgccccgagccctgcagcagcctctggaacagctgactcggtatgggcggctcctggaggagctcctgagggaagctgggcctgagctcagttctgagtgccgggcccttggggctgctgtacagctgctccgggaacaagaggcccgtggcagagacctgctggccgtggaggcggtgcgtggctgtgagatagatctgaaggagcagggacagctcttgcatcgagaccccttcactgtcatctgtggccgaaagaagtgccttcgccatgtctttctcttcgagcatctcctcctgttcagcaagctcaagggccctgaaggggggtcagagatgtttgtttacaagcaggcctttaagactgctgatatggggctgacagaaaacatcggggacagcggactctgctttgagttgtggtttcggcggcggcgtgcacgagaggcatacactctgcaggcaacctcaccagagatcaaactcaagtggacaagttctattgcccagctgctgtggagacaggcagcccacaacaaggagctccgagtgcagcagatggtgtccatgggcattgggaataaacccttcctggacatcaaagcccttggggagcggacgctgagtgccctgctcactggaagagccccagaaacacttgactcttctggagatgtgtccccaggaccaagaaacagccccagcctgcaacccccccaccctgggagcagcactcccaccctggccagtcgagggatcttagggctatcccgacagagtcatgctcgagccctgagtgaccccaccacgcctctgtgacctggagaagatccagaacttgcgtgcagcttctcctctcagcacactttgggctgggatggcagtggggcataatggagccctgggcgatcgctgaatttcttccctctgcttcctggacacagaggaggtctaacgaccagagtattgccctgccaccactatctctagtctccctagcttggtgccttctcctgcaggagtcagagcagccacattgcttgccttcataccctggaggtggggaagttatccctcttccggtgctttcccatcctgggccactgtatccaggacatcactcccatgccagccctccctggcagcccatgttctcctcttttctcaccccctgactttccctgagaagaatcatctctgccaggtcaactggagtccctggtgactccattctgaggtgtcacaagcaatgaagctatgcaaacaataggagggtgtgacaggggaaccgtagactttatatatgtaattactgttattataatactattgttatattaaatgtatttactcacactttgcctct

SEQ ID NO: 175990 - DNA, 5204 bp, Homo sapiens
  Payload ID: 14552
  Gene Symbol: ARHGEF40
  Gene Name: Rho guanine nucleotide exchange factor (GEF) 40
  ENST ID: ENST00000553709
  CDS Start-End: 81-1943
cacgagcggcgggagggaggcggtggcgcgcccggccccgcccgcccgaccaagcgtcggacgcggcccggcgccgagccatggagcctgagccagtggaggactgtgtgcagagcactctcgccgccctgtatccaccctttgaggcaacagcccccaccctgttgggccaggtgttccaggtggtggagaggacttatcgggaggacgcactgaggtacacgctggacttcctggtaccagccaagcacctgcttgccaaggtccagcaggaagcctgtgcccaatacagtggattcctcttcttccatgaggggtggccgctctgcctgcatgaacaggtggtggtgcagctagcagccctaccctggcaactgctgcgcccaggagacttctatctgcaggtggtgccctcagctgcccaagcaccccgactagcactcaagtgtctggcccctgggggtgggcgggtgcaggaggttcctgtgcccaatgaggcttgtgcctacctattcacacctgagtggctacaaggcatcaacaaggaccggccaacaggtcgcctcagtacctgcctactgtctgcgccctctgggattcagcggctgccctgggctgagctcatctgtccacgatttgtgcacaaagagggcctcatggttggacatcagccaagtacactgcccccagaactgccctctggacctccagggcttcccagccctccacttcctgaggaggcgctgggtacccggagtcctggggatgggcacaatgcccctgtggaaggacctgagggcgagtatgtggagctgttagaggtgacgctgcccgtgagggggagcccaacagatgctgaaggctccccaggcctctccagagtccggacggtacccacccgcaagggcgctggagggaagggccgccaccggagacaccgggcgtggatgcaccagaagggcctggggcctcggggccaggatggagcacgcccacccggcgaggggagcagcaccggagcctcccctgagtctcccccaggagctgaggctgtcccagaggcagcagtcttggaggtgtctgagcccccagcagaggctgtgggagaagcctccggatcttgccccctgaggccaggggagcttagaggaggaggaggaggaggccagggggctgaaggaccacctggtacccctcggagaacaggcaaaggaaacagaagaaagaagcgagctgcaggtcgaggggctcttagccgaggaggggacagtgccccactgagccctggggacaaggaagatgccagccaccaagaagcccttggcaatctgccctcaccaagtgagcacaagcttccagaatgccacctggttaaggaggaatatgaaggctcagggaagccagaatctgagccaaaagagctcaaaacagcaggcgagaaagagcctcagctctctgaagcctgtgggcctacagaagagggggccggagagagagagctggaggggccaggcctgctgtgtatggcaggacacacaggcccagaaggccccctgtctgacactccaacacctccgctggagactgtgcaggaaggaaaaggggacaacattccagaagaggcccttgcagtctccgtctctgatcaccctgatgtagcttgggacttgatggcatctggattcctcatcctgacgggaggggtggaccagagtgggcgagctctgctgaccattaccccaccgtgccctcctgaggagcccccaccctcccgagacacgctgaacacaactcttcattacctccactcactgctcaggcctgatctacagacactggggctgtccgtcctgctggaccttcgtcaggcacctccactgcctccagcactcattcctgccttgagccaacttcagtttagggttattcttttctgcccttaggactcaggagatcctccccttgttcagcggctgctgattctcattcatgatgaccttccaactgaactctgtggatttcagggtgctgaggtgctgtcagagaatgatctgaaaagagtggccaagccagaggagctgcagtgggagttaggaggtcacagggacccctctcccagtcactgggtagagatacaccaggaagtggtaaggctatgtcgcctgtgccaaggtgtgctgggctcggtacggcaggccattgaggagctggagggagcagcagagccagaggaagaggaggcagtgggaatgcccaagccactgcagaaggtgctggcagatccccggctgacggcactgcagagggatgggggggccatcctgatgaggctgcgctccactcccagcagcaagctggagggccaaggcccagctacactgtatcaggaagtggacgaggccattcaccagcttgtgcgcctctccaacctgcacgtgcagcagcaagagcagcggcagtgcctgcggcgactccagcaggtgttgcagtggctctcgggcccaggggaggagcagctggcaagctttgctatgcctggggacaccttgtctgccctgcaggagacagagctgcgattccgtgctttcagcgctgaggtccaggagcgcctggcccaggcacgggaggccctggctctggaggagaatgccacctcccagaaggtgctggatatctttgaacagcggctggagcaggttgagagtggcctccatcgggccctgcggctacagcgcttcttccagcaggcacatgaatgggtggatgagggctttgctcggctggcaggagctgggccgggtcgggaggctgtgctggctgcactggccctgcggcgggccccagagcccagtgccggcaccttccaggagatgcgggccctggccctggacctgggcagcccagcagccctgcgagaatggggccgctgccaggcccgctgccaagagctagagaggaggatccagcaacacgtgggagaggaggcgagcccacggggctaccgacgacggcgggcagacggtgccagcagtggaggggcccagtgggggccccgcagcccctcgcccagcctcagctccttgctgctccccagcagccctgggccacggccagccccatcccattgctccctggccccatgtggagaggactatgaggaagagggccctgagctggctccagaagcagagggcaggcccccaagagctgtgctgatccgaggcctggaggtcaccagcactgaggtggtagacaggacgtgctcaccacgggaacacgtgctgctgggccgggctagggggccagacggaccctggggagtaggcaccccccggatggagcgcaagcgaagcatcagtgcccagcagcggctggtgtctgagctgattgcctgtgaacaagattacgtggccaccttgagtgagccagtgccaccccctgggcctgagctgacgcctgaacttcggggcacctgggctgctgccctgagtgcccgggaaaggcttcgcagcttccaccggacacactttctgcgggagcttcagggctgcgccacccaccccctacgcattggggcctgcttccttcgccacggggaccagttcagcctttatgcacagtacgtgaagcaccgacacaaactggagaatggtctggctgcgctcagtcccttaagcaagggctccatggaggctggcccttacctgccccgagccctgcagcagcctctggaacagctgactcggtatgggcggctcctggaggagctcctgagggaagctgggcctgagctcagttctgagtgccgggcccttggggctgctgtacagctgctccgggaacaagaggcccgtggcagagacctgctggccgtggaggcggtgcgtggctgtgagatagatctgaaggagcagggacagctcttgcatcgagaccccttcactgtcatctgtggccgaaagaagtgccttcgccatgtctttctcttcgagcatctcctcctgttcagcaagctcaagggccctgaaggggggtcagagatgtttgtttacaagcaggcctttaagactgctgatatggggctgacagaaaacatcggggacagcggactctgctttgagttgtggtttcggcggcggcgtgcacgagaggcatacactctgcaggcaacctcaccagagatcaaactcaagtggacaagttctattgcccagctgctgtggagacaggcagcccacaacaaggagctccgagtgcagcagatggtgtccatgggcattgggaataaacccttcctggacatcaaagcccttggggagcggacgctgagtgccctgctcactggaagagccgcccgcacccgggcctccgtggccgtgtcatcctttgagcatgccggcccctcccttcccggcctttcgccgggagcctgctccctgcctgcccgcgtcgaggaggaggcctgggatctggacgtcaagcaaatttccctggccccagaaacacttgactcttctggagatgtgtccccaggaccaagaaacagccccagcctgcaacccccccaccctgggagcagcactcccaccctggccagtcgagggatcttagggctatcccgacagagtcatgctcgagccctgagtgaccccaccacgcctctgtgacctggagaagatccagaacttgcgtgcagcttctcctctcagcacactttgggctgggatggcagtggggcataatggagccctgggcgatcgctgaatttcttccctctgcttcctggacacagaggaggtctaacgaccagagtattgccctgccaccactatctctagtctccctagcttggtgccttctcctgcaggagtcagagcagccacattgcttgccttcataccctggaggtggggaagttatccctcttccggtgctttcccatcctgggccactgtatccaggacatcactcccatgccagccctccctggcagcccatgttctcctcttttctcaccccctgactttccctgagaagaatcatctctgccaggtcaactggagtccctggtgactccattctgaggtgtcacaagcaatgaagctatgcaaacaataggagggtgtgacaggggaaccgtagactttatatatgtaattactgttattataatactattgttatattaaatgtatttactcaca

SEQ ID NO: 175991 - DNA, 5544 bp, Homo sapiens
  Payload ID: 14553
  Gene Symbol: ARHGEF5
  Gene Name: Rho guanine nucleotide exchange factor (GEF) 5
  Uniprot ID: Q12774
  ENST ID: ENST00000056217
  CDS Start-End: 175-4968
gaaacttcctaggagaacccgatccctccctcccgtcgggcggccaggggcgggccgcgggtggggcggccgggcctgcgctggggacggctctggggactgcggccggcgccgggacctggaggggacgctggggccgaagcagcatgtgacaccgaccaggattcagccctgatggaggctgaggaggcccagcgtggagcctctcctcccatctctgccatagaggaattcagcattatccctgaggctcccatgaggagcagccaggtctctgccttggggcttgaagctcaagaagatgaggacccatcctataagtggagagaggaacacagactctcagcaactcagcagagtgagttaagggatgtgtgtgactatgcgattgagacgatgccctcttttcccaaggaaggttctgcagatgtggagcccaatcaggaaagccttgtggctgaggcctgtgacactccggaacactgggaggcagtaccccagagcctagcaggccgacaagcaaggactctagctcccccagagctctgggcctgccccattcagagtgagcatctagacatggccccattttccagtgacctgggaagcgaagaagaggaggtggaattttggccaggacttacttctttgacattgggatctggacaggcagaagaagaagaggaaacctcttcagataactctggtcagaccagatattattctccctgcgaagagcatcctgcagagaccaaccagaatgaaggctctgaaagtgggactatcaggcagggggaagagctgccacctgaggagctgcaggaaagtcaagggctcttgcatccccaggaggtccaagttctggaggagcagggacagcaggaagcaggatttcggggggaaggaactctgagggaggatgtttgtgccgatgggctattaggggaggaacagatgatagagcaggttaatgatgaaaagggagaacagaagcaaaaacaggaacaggtacaagatgtgatgcttgggagacaaggagaaagaatggggctcactggggagccagagggtctgaatgacggtgagtgggagcaggaggatatggagaggaaggctcagggtcagggaggtccagaacagggagaagagaggaagagggagctgcaggtgccagaagagaatagggcggactctcaggacgaaaagagtcaaacctttttgggaaaatcagaggaagtaactggaaagcaagaagatcatggtataaaggagaaaggggtgccagtcagcgggcaggaggcgaaagagccagagagttgggatgggggcaggctgggggcagtgggaagagcgaggagcagggaagaggagaatgagcatcatgggccttcaatgcccgctctgatagcccctgaggactctcctcactgtgacctgtttccaggtgcctcatatctcatgactcagattcccgggactcagacagagtccagggctgaggaactgtcccccgcagctctgtctccctcgctagagcccatcaggtgctctcaccagcccatttctctactgggctcctttttgactgaggagtcacctgacaaggaaatagatcaaaacagccagcaagaggaatccaggctgaggaagggaacagtgtccagccaagggactgaggtggtctttgccagtgcatctgtgactcctccaaggacaccagattcagctcctcccagtcctgctgaagcctaccccatcacacctgcctcggtatctgccaggcccccagttgcctttcccaggagggaaacctcttgtgctgcacgtgctccagaaactgccagtgcccctctctcaatggatgacccatctccctgtgggacttctgagatgtgcccggctgccctctatggcttcccctccaccgggaccagccctccgaggcccccagccaactccacaggcaccgtccagcacttacggagtgactccttccctggttctcacaggacagagcagactccagacctggtgggaatgttgctttcctactcccactcagagctgccccagaggccccccaaacctgccatctacagctctgtgaccccaagaagggacagaaggagtggtagggactacagcaccgtttcagcatcccctactgccttatccacgctgaagcaggactctcaagaatccatctcaaatctagagagacccagcagtcctcccagcatccagccctgggtctccccacataatccagcctttgccacagagtctcccgcctacggttcttccccatcctttgtctccatggaggatgtgaggatccacgaacctctgccccctcctcccccacagaggagggacacccatccctccgtggtggagacagatggccatgctcgtgtagtggttcccacgctgaagcagcatagccaccctcctccattggccctaggttcagggctgcatgccccccataaaggcccacttccccaagcctctgaccccgctgtggccaggcagcaccgacctctgccatctaccccagacagctcccaccatgctcaggccacccccaggtggagatacaacaagccgctaccccctacccctgatttgccgcagccccaccttcctcccatttctgctcctggtagctcaaggatctacaggcctctacccccactacccatcatagaccctcccaccgaaccacccccattgcccccaaagtccagggggaggagcaggagcactcggggaggacatatgaactcagggggtcatgccaaaacaagacctgcttgtcaagactggacagtccccctccctgcctctgctggacgcacctcctggcccccggccacagctagatcaacagagtctttcacttccaccagcaggagtaagagcgaagtgtcccctggcatggctttcagcaacatgacaaacttcctatgcccctcttcccctaccactccctggactccggagctccagggacccacctctaaggatgaagcaggggtctcagaacaccctgaggcccctgcgagagaacctttgagaaggacaacccctcagcaaggagccagtggcccagggaggtcacctgtgggccaagcaaggcagccagaaaaacccagccatctgcacctggagaaggcgtccagctggccccacaggcgggactcagggaggccaccaggggacagcagtggacaggctgtggctcctagtgagggggccaacaagcacaagggctggagccggcagggcctgcgcagaccttccatcttgcctgagggctcttcagattcaagaggtccagccgtggagaaacatccgggaccctcagacactgttgtttttcgggagaaaaaaccaaaggaggtgatgggaggcttttcaagacgctgctccaaactcatcaactcctcccagctgctttaccaggagtatagtgatgttgtcctgaataaggagatccagagccagcagcggctggagagcctgtccgagacacccgggcctagctctccgcggcagcctcggaaggccctggtctcctccgagtcgtacctgcagcggctctccatggcctccagcggctccctctggcaggaaatccccgtggtgcgcaacagcaccgtgctgctctccatgacccatgaagaccaaaagctgcaagaggtcaaatttgagctgattgtgtcagaggcctcctacctgcgcagtctaaacatagctgtggatcatttccaactttcaacttcactccgggccacactttccaaccaggagcaccaatggctcttctctcgtttacaggatgtgcgagacgtcagcgccacgttcctttcagacctggaagagaactttgagaacaatatcttctccttccaagtatgtgacgtagtcctgaaccacgccccagacttccgccgggtctacctgccttatgtcaccaaccagacctatcaggaacgcaccttccagagcctgatgaatagcaacagcaatttccgggaggtcttggagaagctggagagcgaccccgtctgccagcgcctttccctcaagtcctttctgattctgcccttccaacgcatcacccgcctcaaactgctgctccagaacattctgaagagaacacagcctggctcctcggaggaggcagaggccacgaaggcacaccacgccctggagcagctgatccgggactgcaataacaatgtccagagtatgcgacggacagaggaactaatctacctgagccagaagattgagtttgagtgcaaaatattcccgctcatttctcagtcacgctggctggtgaaaagtggggagctgacagccttggagttcagtgcttccccagggctacgaaggaagctgaacacgcgtccagtccacctgcacctcttcaatgactgtctgctgctgtctcggccccgagagggtagccgattcctggtatttgaccatgctcccttctcctccattcggggggaaaagtgtgaaatgaagctacatggacctcacaaaaacctgttccgactctttctgcggcagaacactcagggcgcccaggccgagttcctcttccgcacggagactcaaagtgaaaagcttcggtggatctcagccttggccatgccaagagaggagttggaccttctggagtgttacaactccccccaggtacagtgccttcgagcctacaagccccgagagaatgatgaattggcactggagaaagccgacgtggtgatggtgactcagcagagcagtgacggctggctggagggcgtgaggctctcagacggggagcgaggctggtttcctgtgcagcaggtggagttcatttccaacccagaggtccgtgcacagaacctgaaggaagctcatcgagtcaagactgccaaactacagctggtggaacagcaagcctaagtcttctctgagaggagtttcgtgagctgaagaacaagctgctcatggcaagggctggccccagaaccctgcaagagaggccttctgtggatggagaactaggccttctcaaagctcaaggacaaaatccagctaacccagtccctcggcccaggcctcctttcgtgctttgtgcttggtgggggggatttcgagggactttgcactggactctgggaacctttcatcattaaaaaaagggggaccattggggcctgagccaaggaactttccttctactgccttatagtgcttaaacattctccgcctccagggtgcagattcagagctggccagagtttcagtgatagccgtatgttaaacagaatctcacctcagtctcctggagggagatgtttaagaggggttaacacatcagatgggagggtcagcccggtgacctctaaggtatcttctaacctagaaattcaccataattatggtgcaaggtcagtgtgtctctgagatctatgtctgttggtggcaatgtgagggtgatactctctcactctaataaacttggcacttctccgagta

SEQ ID NO: 175992 - DNA, 771 bp, Homo sapiens
  Payload ID: 14553
  Gene Symbol: ARHGEF5
  Gene Name: Rho guanine nucleotide exchange factor (GEF) 5
  ENST ID: ENST00000498580
  CDS Start-End: 227-771
gcggaggggccctgcccctcctccgggaaggtgtgtccctgtttcctcacctgaaacttcctaggagaacccgatccctccctcccgtcgggcggccaggggcgggccgcgggtggggcggccgggcctgcgctggggacggctctggggactgcggccggcgccgggacctggaggggacgctggggccgaagcagcatgtgacaccgaccaggattcagccctgatggaggctgaggaggcccagcgtggagcctctcctcccatctctgccatagaggaattcagcattatccctgaggctcccatgaggagcagccaggtctctgccttggggcttgaagctcaagaagatgaggacccatcctataagtggagagaggaacacagactctcagcaactcagcagaattcaagaggtccagccgtggagaaacatccgggaccctcagacactgttgtttttcgggagaaaaaaccaaaggaggtgatgggaggcttttcaagacgctgctccaaactcatcaactcctcccagctgctttaccaggagtatagtgatgttgtcctgaataaggagatccagagccagcagcggctggagagcctgtccgagacacccgggcctagctctccgcggcagcctcggaaggccctggtctcctccgagtcgtacctgcagcggctctccatggcctccagcggctccctctggcaggaaatccccgtggtgcgcaacagcaccgtgctgctctccatgacccatgaaga

SEQ ID NO: 175993 - DNA, 1862 bp, Homo sapiens
  Payload ID: 14553
  Gene Symbol: ARHGEF5
  Gene Name: Rho guanine nucleotide exchange factor (GEF) 5
  Uniprot ID: Q12774
  ENST ID: ENST00000471847
  CDS Start-End: 303-1862
gaaaaggccttctgtacttgtcccagtcccatcctgacccgtggctcgggacgtcactggtactgatctctttcacgctctctgctttgccactttcttccctcccagtttcccaataaagcccattttcccttctggacccctgcatctcctgctctagatcttctttggctctctctatccctctgaaatctcagttatcttccccatttccacttttagattcaagaggtccagccgtggagaaacatccgggaccctcagacactgttgtttttcgggagaaaaaaccaaaggaggtgatgggaggcttttcaagacgctgctccaaactcatcaactcctcccagctgctttaccaggagtatagtgatgttgtcctgaataaggagatccagagccagcagcggctggagagcctgtccgagacacccgggcctagctctccgcggcagcctcggaaggccctggtctcctccgagtcgtacctgcagcggctctccatggcctccagcggctccctctggcaggaaatccccgtggtgcgcaacagcaccgtgctgctctccatgacccatgaagaccaaaagctgcaagaggtcaaatttgagctgattgtgtcagaggcctcctacctgcgcagtctaaacatagctgtggatcatttccaactttcaacttcactccgggccacactttccaaccaggagcaccaatggctcttctctcgtttacaggatgtgcgagacgtcagcgccacgttcctttcagacctggaagagaactttgagaacaatatcttctccttccaagtatgtgacgtagtcctgaaccacgccccagacttccgccgggtctacctgccttatgtcaccaaccagacctatcaggaacgcaccttccagagcctgatgaatagcaacagcaatttccgggaggtcttggagaagctggagagcgaccccgtctgccagcgcctttccctcaagtcctttctgattctgcccttccaacgcatcacccgcctcaaactgctgctccagaacattctgaagagaacacagcctggctcctcggaggaggcagaggccacgaaggcacaccacgccctggagcagctgatccgggactgcaataacaatgtccagagtatgcgacggacagaggaactaatctacctgagccagaagattgagtttgagtgcaaaatattcccgctcatttctcagtcacgctggctggtgaaaagtggggagctgacagccttggagttcagtgcttccccagggctacgaaggaagctgaacacgcgtccagtccacctgcacctcttcaatgactgtctgctgctgtctcggccccgagagggtagccgattcctggtatttgaccatgctcccttctcctccattcggggggaaaagtgtgaaatgaagctacatggacctcacaaaaacctgttccgactctttctgcggcagaacactcagggcgcccaggccgagttcctcttccgcacggagactcaaagtgaaaagcttcggtggatctcagccttggccatgccaagagaggagttggaccttctggagtgttacaactccccccaggtacagtgccttcgagcctacaagccccgagagaatgatgaattggcactggagaaagccgacgtggtgatggtgactcagcagagcagtgacggctggctggagggcgtgaggctctcagacggggagcgaggctggtttcctgtgcagcaggtggagttcatttccaacccagaggtccgtgcacagaacctgaaggaagctcatcgagtcaagactgccaaactacagctggtggaacagcaagcctaa

SEQ ID NO: 175994 - DNA, 2968 bp, Homo sapiens
  Payload ID: 14553
  Gene Symbol: ARHGEF5
  Gene Name: Rho guanine nucleotide exchange factor (GEF) 5
  ENST ID: ENST00000474817
  CDS Start-End: 1-2393
gtgtagtggttcccacgctgaagcagcatagccaccctcctccattggccctaggttcagggctgcatgccccccataaaggcccacttccccaagcctctgaccccgctgtggccaggcagcaccgacctctgccatctaccccagacagctcccaccatgctcaggccacccccaggtggagatacaacaagccgctaccccctacccctgatttgccgcagccccaccttcctcccatttctgctcctggtagctcaaggatctacaggcctctacccccactacccatcatagaccctcccaccgaaccacccccattgcccccaaagtccagggggaggagcaggagcactcggggaggacatatgaactcagggggtcatgccaaaacaagacctgcttgtcaagactggacagtccccctccctgcctctgctggacgcacctcctggcccccggccacagctagatcaacagagtctttcacttccaccagcaggagtaagagcgaagtgtcccctggcatggctttcagcaacatgacaaacttcctatgcccctcttcccctaccactccctggactccggagctccagggacccacctctaaggatgaagcaggggtctcagaacaccctgaggcccctgcgagagaacctttgagaaggacaacccctcagcaaggagccagtggcccagggaggtcacctgtgggccaagcaaggcagccagaaaaacccagccatctgcacctggagaaggcgtccagctggccccacaggcgggactcagggaggccaccaggggacagcagtggacaggctgtggctcctagtgagggggccaacaagcacaagggctggagccggcagggcctgcgcagaccttccatcttgcctgagggctcttcagattcaagaggtccagccgtggagaaacatccgggaccctcagacactgttgtttttcgggagaaaaaaccaaaggaggtgatgggaggcttttcaagacgctgctccaaactcatcaactcctcccagctgctttaccaggagtatagtgatgttgtcctgaataaggagatccagagccagcagcggctggagagcctgtccgagacacccgggcctagctctccgcggcagcctcggaaggccctggtctcctccgagtcgtacctgcagcggctctccatggcctccagcggctccctctggcaggaaatccccgtggtgcgcaacagcaccgtgctgctctccatgacccatgaagaccaaaagctgcaagaggtcaaatttgagctgattgtgtcagaggcctcctacctgcgcagtctaaacatagctgtggatcatttccaactttcaacttcactccgggccacactttccaaccaggagcaccaatggctcttctctcgtttacaggatgtgcgagacgtcagcgccacgttcctttcagacctggaagagaactttgagaacaatatcttctccttccaagtatgtgacgtagtcctgaaccacgccccagacttccgccgggtctacctgccttatgtcaccaaccagacctatcaggaacgcaccttccagagcctgatgaatagcaacagcaatttccgggaggtcttggagaagctggagagcgaccccgtctgccagcgcctttccctcaagtcctttctgattctgcccttccaacgcatcacccgcctcaaactgctgctccagaacattctgaagagaacacagcctggctcctcggaggaggcagaggccacgaaggcacaccacgccctggagcagctgatccgggactgcaataacaatgtccagagtatgcgacggacagaggaactaatctacctgagccagaagattgagtttgagtgcaaaatattcccgctcatttctcagtcacgctggctggtgaaaagtggggagctgacagccttggagttcagtgcttccccagggctacgaaggaagctgaacacgcgtccagtccacctgcacctcttcaatgactgtctgctgctgtctcggccccgagaaagtgaaaagcttcggtggatctcagccttggccatgccaagagaggagttggaccttctggagtgttacaactccccccaggtacagtgccttcgagcctacaagccccgagagaatgatgaattggcactggagaaagccgacgtggtgatggtgactcagcagagcagtgacggctggctggagggcgtgaggctctcagacggggagcgaggctggtttcctgtgcagcaggtggagttcatttccaacccagaggtccgtgcacagaacctgaaggaagctcatcgagtcaagactgccaaactacagctggtggaacagcaagcctaagtcttctctgagaggagtttcgtgagctgaagaacaagctgctcatggcaagggctggccccagaaccctgcaagagaggccttctgtggatggagaactaggccttctcaaagctcaaggacaaaatccagctaacccagtccctcggcccaggcctcctttcgtgctttgtgcttggtgggggggatttcgagggactttgcactggactctgggaacctttcatcattaaaaaaagggggaccattggggcctgagccaaggaactttccttctactgccttatagtgcttaaacattctccgcctccagggtgcagattcagagctggccagagtttcagtgatagccgtatgttaaacagaatctcacctcagtctcctggagggagatgtttaagaggggttaacacatcagatgggagggtcagcccggtgacctctaaggtatcttctaacctagaaattcaccataattatggtgcaaggtcagtgtgtctctgagatctatgtctgttggtggcaatgtgagggtgatactctctcactctaataaacttggcacttctccgagt

SEQ ID NO: 175995 - DNA, 5233 bp, Homo sapiens
  Payload ID: 14554
  Gene Symbol: ARHGEF7
  Gene Name: Rho guanine nucleotide exchange factor (GEF) 7
  ENST ID: ENST00000218789
  CDS Start-End: 498-2615
aaaaaagggtgaggagaagcagcggctgagcgggttggcatctggggcagcgggctcgctccaggccgtcgggggccgctcgccagcgtcgcccgctgtgttgggagcgcgggccgtgggcgtcgctcggccttgtccgcggcgtccccgctgccggccacggcgctcagcgcttgtgctctgtattgcaggtctaccccgagccccggagcgagagcgagtgcctgagcaacatccgcgagttcctgcgcggctgcggggcttccctgcggctggagacgtttgatgcaaatgatttgtatcaggggcagaattttaacaaggtcctcagttccttagtgactctaaataaagtaacagcagacatcgggctggggagtgactccgtgtgtgcccggccctcgtctcaccgcataaagtcttttgactcccttggatcacagtctttgcacactcggacttcaaaactgttccagggccagtatcggagtttggacatgaccgataatagcaacaatcaactggtagtaagagcaaagtttaacttccagcagaccaatgaggacgagctttccttctcaaaaggagacgtcatccatgtcacccgtgtggaagagggaggctggtgggagggcacactcaacggccggaccggctggttccccagcaactacgtgcgcgaggtcaaggccagcgagaagcctgtgtctcccaaatcaggaacactgaagagccctcccaaaggatttgatacgactgccataaacaaaagctattacaatgtggtgctacagaatattttagaaacagaaaatgaatattctaaagaacttcagactgtgctttcaacgtacctacggccattgcagaccagtgagaagttaagttcagcaaacatttcatatttaatgggaaatctagaagaaatatgttctttccagcaaatgctcgtacagtctttagaagaatgcaccaagttgcccgaagctcagcagagagtcggaggctgctttttaaacctgatgccacagatgaaaaccctgtacctcacgtattgtgccaatcacccttctgcagtgaatgtcctcacggaacacagtgaggagttgggggagttcatggagaccaaaggtgccagcagccctgggattctcgtgctgaccacgggcctgagcaaacccttcatgcgcctggataaataccctacgctgctcaaagagctcgagagacacatggaggattatcatacagatagacaagatattcaaaaatccatggctgccttcaaaaacctttcagcccaatgtcaagaagtccggaagaggaaagagcttgagctgcagatcctgacggaagccatccggaactgggagggcgatgacattaaaactctgggcaacgtcacttacatgtcccaggtcctgattcagtgtgccggaagtgaggaaaagaatgaaagatatcttctactcttcccaaatgttttgctaatgttgtctgccagtcctaggatgagtggctttatctatcagggaaagcttccaacgacaggaatgacaatcacaaagcttgaggacagtgaaaatcatagaaatgcatttgaaatatcagggagcatgattgagcggatattagtgtcgtgcaacaaccagcaggatctgcaggaatgggtggagcacctacagaagcaaacgaaggtcacgtctgtgggaaaccccaccataaagcctcattcagtgccatctcataccctcccctcccacccggtcactccgtccagcaagcacgcagacagcaagcccgcgccgctgacgcccgcctaccacacgctgccccacccctcccaccacggcaccccgcacaccaccatcaactggggacccctggagcctccgaaaacacccaagccctggagcctgagctgcctgcggcccgcgcctcccctccggccctcagctgctctctgctacaaggaggatcttagtaagagccctaagaccatgaaaaagctgctgcccaagcgcaaacctgaacggaagccttcagatgaggagttcgcgtcccggaaaagcacagctgctttggaagaagatgctcagattctgaaagtcattgaagcttactgcaccagcgccaaaacaaggcaaacactcaattcaacatggcaaggcactgacctgatgcataatcacgtcttggctgatgatgaccaaccaagcctagactccctggggcgtcgcagtagcctttctcgtttggagccttcagacctctcggaagactctgactatgacagtatatggacagcccatagttacagaatgggttctacatctcgttcacgcaaagaatctgctccacaagttttgcttccagaagaagagaaaattatagtggaagaaactaaaagtaatggtcagacagtgatagaagaaaagagtcttgtggataccgtatatgcattaaaggatgaagttcaagaattaagacaggacaacaaaaagatgaagaaatctctagaggaagaacagagagcccgcaaagacctggagaagctggtgaggaaagtcctgaagaacatgaatgatcctgcctgggatgagaccaatctataagggatgtcctcagttctttctgttgaagaccagttctgaggtgaagctgggcacccctgacccaagtcggggtgcactcaggaccacagggcagggctgggtggggcgccaccttgctctctgtatatagaaaagctggagcttattctgcgaatggagacgatcaaaccatgactgatgaatccagacaggagggattgactctgaggacctgagctacatcaatccactctgtgaacatctcagttacctcattctgcaataagttcagtgactgactaaaagtcttgtttttccagactttgaattgaatatataaatattatatatacatgtttcttgtaaatatcccattttgaatgcatacctgtggtggttctgtccgggctaatccccatgctagaatgtcctttccagctacgtgaataagaagtcccatgcccgcatccaccggaagcagaagcctggtggatgcctggttcgttccgcagcaccagggcctccaccgtgctgtggcagcaccccccatgtcggtatttctaaataaccttatttatacctgcagagatacacttcagtcccattcagaagtcttctcttaaagcagcattacagtcccagacctgcgggtttctgagggcaacttgctggctgacagactcagtcttgacctcaaggaaggcccatacggcactgccgcatccacctagaggtgtttgctcttgtccgctgtctgagtactgtgattctcagatgagtttgctgcgttttgggaggacacagacggttctgtataggctagttcagtaacaacaaaatacactgttttgtcttccctcaaagagagatcttactagaacctgtaaatagaatgtattatttattataagtcactgcagctgatgaaaacagatggaggccatgctgcaggctgatactgatgggtggagttttgtcatcaggccagcctcatcccgaggtctcctccaccattggccgtagccagcaggcttcagtgctcaccgaaagtaaaatcccctccttcagcaagaataaagcaatatacaccttaggttccactaagtaacataggcataagcagggaacgtttcccccactgtgttccagtgcagaggagacgaagcctgtcctcaccgcggctcgctgggcccaggctggctctggaaagcctgtgcggtcctgggcaggaagcccggcccgtggagcaggttttcgttctgcttcagcaataaataagggtgaccacagggactttgcttttggtttcctttcctgtgaaaaggttggttttaaagtgagatacacttttccgtagaacaagtgttctatctttaaaaacccaaattgcagcaccgtggattactggtctcagaacaactcattgcgcatcagatttgactctctgattttctgtctattggccaaattgccctttaactgcacctgaatcctttgtgtactgatgcctttgagctgggcaccttgggagagtgttgtgttgctgtttacggttcttccttgcccttgctaattacagtctctggtgcccagcaagcccctttggcttccttccgtgactggtcacgttgtctgcctgggctcagcgtggacctgccccatgctgcagaacctggcctcacctggacttttcactagaattgccagcttcctcaacttagcagatcattcactcatgcgggcacaagcaaagatcaacactttcttttttggtaagcttgagttttacaagttattttttggtgatgcgtaagacattgcagtgggaaaccattcaacttgagtttattggagtttgctgttgtagcaggttttaactcaggaacaactcttgtctgatctctccgcccctctgccgggaggcgacattaactgtcctctcggagccggtagcgttgctgtccgagtccccaggacggatctcctgcagacctgccttaatgctcagatcgaagtatttcacaagaatacttgtgtttttaacagcccttcccctggacggtgcggccatgagggcctcatgttacggcattgccttttctttctgtggatccagtatcttcctcggctttttagggagcaggaaaaatgcgtctgagagcaactctttttaaaaacctgccctgttgtatataactgtgtctgtttcaccgtgtgacctcccaagggggtgggaacttgatataaacgtttaaaggggccacgatttgcccgagggttactcctttgctctcaccttgtatggatgaggagatgaagccatttcttatcctgtagatgtgaagcactttcagttttcagcgatgttggaatgtagcatcagaagctcgttccttcacactcagtggcgtctgtgcttgtccacatgcgctgggcgtctgggaccttgaatgcctgccctggttgtgtggactccttaatgccaatcatttcttcacttctctgggacacccagggcgcctgttgacaagtgtggagaaactcctaatttaaatgtcacagacaatgtcctagtgttgactactacaatgttgatgctacactgttgtaattattaaactgattatttttcttatgtc

SEQ ID NO: 175996 - DNA, 4361 bp, Homo sapiens
  Payload ID: 14554
  Gene Symbol: ARHGEF7
  Gene Name: Rho guanine nucleotide exchange factor (GEF) 7
  Uniprot ID: Q14155
  ENST ID: ENST00000317133
  CDS Start-End: 909-3257
ccccgagacgcagccaggcgcccggcccggcccggcccggccctctgcacagccccacttcaggccacgccgtttccttgaccttcccccggcagggtctgaagcgtcaccgtccgtctagagcagagtcgcgcaggcccctgccctgccggtgaggtcggcgccgcgctccggagagtcggttcctcccgattcagacccatatggcttcagatggaaccatcatttctgttccgtcatgaccggcttgcaaggtagcaaagcgaaacaaacgtctcgttttcagcctgtccccgccaccttgaaataaaaccggcaaaaataaaaagagcattctgggaagtacttcatcatttcaacgctcacgaattcaaaacataaacaaaggcttccgagtgccccggccaggggcgcggggcgcacggcgggcccggggcaggtaagcgcaggtgcgcgcccgcccccacccccggctccctccccatccgctccccgctccccttcccctttcccttccccgcccgctcccagccgccgccgccgccccgcgcacggcctggagcggaggctgcgcagggcgcggggcggcgcgggccgggcgcgggccgggcggacggccgcgtctttcttctcctggcggtgatgtcattgggcgacggcggccgaggccggggggcggcggcgggcgcccgcaggttcccgagccgctcctgagaaggcgcctgacagcgggccggggcgcacggagaagcgggccgggccggacctgctgggccgcgccgagccaatcgccggcgccggccgctcgatgggcgaggcggcggcggcggcggcgggggccgcgggccgggccgccgctccgaggtgaaggcgcgcgcccctccccgcctgcctcccgggccgcagcgatgaattccgccgagcaaaccgttacgtggctcatcactctgggggtgctggagtcgcccaaaaaaaccatctcggacccggagggctttctgcaggcgtcgctgaaggatggggtggtcctctgcaggctgctggagcgcctgctccccgggaccatcgagaaagtctaccccgagccccggagcgagagcgagtgcctgagcaacatccgcgagttcctgcgcggctgcggggcttccctgcggctggagacgtttgatgcaaatgatttgtatcaggggcagaattttaacaaggtcctcagttccttagtgactctaaataaagtaacagcagacatcgggctggggagtgactccgtgtgtgcccggccctcgtctcaccgcataaagtcttttgactcccttggatcacagtctttgcacactcggacttcaaaactgttccagggccagtatcggagtttggacatgaccgataatagcaacaatcaactggtagtaagagcaaagtttaacttccagcagaccaatgaggacgagctttccttctcaaaaggagacgtcatccatgtcacccgtgtggaagagggaggctggtgggagggcacactcaacggccggaccggctggttccccagcaactacgtgcgcgaggtcaaggccagcgagaagcctgtgtctcccaaatcaggaacactgaagagccctcccaaaggatttgatacgactgccataaacaaaagctattacaatgtggtgctacagaatattttagaaacagaaaatgaatattctaaagaacttcagactgtgctttcaacgtacctacggccattgcagaccagtgagaagttaagttcagcaaacatttcatatttaatgggaaatctagaagaaatatgttctttccagcaaatgctcgtacagtctttagaagaatgcaccaagttgcccgaagctcagcagagagtcggaggctgctttttaaacctgatgccacagatgaaaaccctgtacctcacgtattgtgccaatcacccttctgcagtgaatgtcctcacggaacacagtgaggagttgggggagttcatggagaccaaaggtgccagcagccctgggattctcgtgctgaccacgggcctgagcaaacccttcatgcgcctggataaataccctacgctgctcaaagagctcgagagacacatggaggattatcatacagatagacaagatattcaaaaatccatggctgccttcaaaaacctttcagcccaatgtcaagaagtccggaagaggaaagagcttgagctgcagatcctgacggaagccatccggaactgggagggcgatgacattaaaactctgggcaacgtcacttacatgtcccaggtcctgattcagtgtgccggaagtgaggaaaagaatgaaagatatcttctactcttcccaaatgttttgctaatgttgtctgccagtcctaggatgagtggctttatctatcagggaaagcttccaacgacaggaatgacaatcacaaagcttgaggacagtgaaaatcatagaaatgcatttgaaatatcagggagcatgattgagcggatattagtgtcgtgcaacaaccagcaggatctgcaggaatgggtggagcacctacagaagcaaacgaaggtcacgtctgtgggaaaccccaccataaagcctcattcagtgccatctcataccctcccctcccacccggtcactccgtccagcaagcacgcagacagcaagcccgcgccgctgacgcccgcctaccacacgctgccccacccctcccaccacggcaccccgcacaccaccatcaactggggacccctggagcctccgaaaacacccaagccctggagcctgagctgcctgcggcccgcgcctcccctccggccctcagctgctctctgctacaaggaggatcttagtaagagccctaagaccatgaaaaagctgctgcccaagcgcaaacctgaacggaagccttcagatgaggagttcgcgtcccggaaaagcacagctgctttggaagaagatgctcagattctgaaagtcattgaagcttactgcaccagcgccaaaacaaggcaaacactcaattcaacatggcaaggcactgacctgatgcataatcacgtcttggctgatgatgaccaaccaagcctagactccctggggcgtcgcagtagcctttctcgtttggagccttcagacctctcggaagactctgactatgacagtatatggacagcccatagttacagaatgggttctacatctcgtaagagctgttgctcatatatctctcaccagaactaatgcacttctgagcttttcttaacaaatgcttgttgtatcgcagcctgcttttcttagatgttttcttgctgttccttgtctcttttatgtgatattttaacaacttttgagagtgttcctgatatttcccattgtactttgtggaggcttaactgccgatgcgagtatacattcgaatgactgactattggagggaggtggtgtgttcacgtgagcctacatccgagggtgctcttcgtaaggggtagttgttgttttatagctccaaatggtttttttattctcagtgtagcaactgtttgatttctttctggatacagctgtatgaacacttttctattttatactgaaatcacacaggtttgtgatctaagtgccagaaccatggaggagactctggccttatctgtagggacctaaattttttaagtgctatgaacactgatcaagtagttgtggagagatgagaagaatatatgcagcaaaggtgctgtgagcccagttccaacggctgtgttctggtaatcgtgcagaacagcatgtgggctctgggccttggcaggtgcacagacgggcgggcgtcacgtgtgttcagagcttgtctccacctcacggctctgtgctcttctgtgtgctgcgttgtggccgtgaagtgggagctctcctttccaaaggcagagcttactgtcatggctcagatgttcactcgcatcttcaccccaaacttccctgaattgcagtgatttctgttataaggcacatagcaagcctgtaccactctacagtaaaatctctacactaacagtttaaagcccgaaagctgaagcattcagcctctgcaagtgtagactactggactgtagtagaggcatttggaatacttacaaagtcaagtgctgtggcttcagttcccccggctccccacccctgacatccatacttatgttgtctggaagagccatggacacatcattattttcagcaaccagctgcagtgaaactccatttacagcaaccccatagtataaaaccacaatgcctcattgtaatgggatattgaagttcattgaagaattactaggttgccatgtggctcacttattt

SEQ ID NO: 175997 - DNA, 4957 bp, Homo sapiens
  Payload ID: 14554
  Gene Symbol: ARHGEF7
  Gene Name: Rho guanine nucleotide exchange factor (GEF) 7
  Uniprot ID: Q14155
  ENST ID: ENST00000375723
  CDS Start-End: 220-2097
acgtttgatgcaaatgatttgtatcaggggcagaattttaacaaggtcctcagttccttagtgactctaaataaagtaacagcagacatcgggctggggagtgactccgtgtgtgcccggccctcgtctcaccgcataaagtcttttgactcccttggatcacagtctttgcacactcggacttcaaaactgttccagggccagtatcggagtttggacatgaccgataatagcaacaatcaactggtagtaagagcaaagtttaacttccagcagaccaatgaggacgagctttccttctcaaaaggagacgtcatccatgtcacccgtgtggaagagggaggctggtgggagggcacactcaacggccggaccggctggttccccagcaactacgtgcgcgaggtcaaggccagcgagaagcctgtgtctcccaaatcaggaacactgaagagccctcccaaaggatttgatacgactgccataaacaaaagctattacaatgtggtgctacagaatattttagaaacagaaaatgaatattctaaagaacttcagactgtgctttcaacgtacctacggccattgcagaccagtgagaagttaagttcagcaaacatttcatatttaatgggaaatctagaagaaatatgttctttccagcaaatgctcgtacagtctttagaagaatgcaccaagttgcccgaagctcagcagagagtcggaggctgctttttaaacctgatgccacagatgaaaaccctgtacctcacgtattgtgccaatcacccttctgcagtgaatgtcctcacggaacacagtgaggagttgggggagttcatggagaccaaaggtgccagcagccctgggattctcgtgctgaccacgggcctgagcaaacccttcatgcgcctggataaataccctacgctgctcaaagagctcgagagacacatggaggattatcatacagatagacaagatattcaaaaatccatggctgccttcaaaaacctttcagcccaatgtcaagaagtccggaagaggaaagagcttgagctgcagatcctgacggaagccatccggaactgggagggcgatgacattaaaactctgggcaacgtcacttacatgtcccaggtcctgattcagtgtgccggaagtgaggaaaagaatgaaagatatcttctactcttcccaaatgttttgctaatgttgtctgccagtcctaggatgagtggctttatctatcagggaaagcttccaacgacaggaatgacaatcacaaagcttgaggacagtgaaaatcatagaaatgcatttgaaatatcagggagcatgattgagcggatattagtgtcgtgcaacaaccagcaggatctgcaggaatgggtggagcacctacagaagcaaacgaaggtcacgtctgtgggaaaccccaccataaagcctcattcagtgccatctcataccctcccctcccacccggtcactccgtccagcaagcacgcagacagcaagcccgcgccgctgacgcccgcctaccacacgctgccccacccctcccaccacggcaccccgcacaccaccatcaactggggacccctggagcctccgaaaacacccaagccctggagcctgagctgcctgcggcccgcgcctcccctccggccctcagctgctctctgctacaaggaggatcttagtaagagccctaagaccatgaaaaagctgctgcccaagcgcaaacctgaacggaagccttcagatgaggagttcgcgtcccggaaaagcacagctgctttggaagaagatgctcagattctgaaagtcattgaagcttactgcaccagcgccaaaacaaggcaaacactcaattcaacatggcaaggcactgacctgatgcataatcacgtcttggctgatgatgaccaaccaagcctagactccctggggcgtcgcagtagcctttctcgtttggagccttcagacctctcggaagactctgactatgacagtatatggacagcccatagttacagaatgggttctacatctcgtaagagctgttgctcatatatctctcaccagaactaatgcacttctgagcttttcttaacaaatgcttgttgtatcgcagcctgcttttcttagatgttttcttgctgttccttgtctcttttatgtgatattttaacaacttttgagagtgttcctgatatttcccattgtactttgtggaggcttaactgccgatgcgagtatacattcgaatgactgactattggagggaggtggtgtgttcacgtgagcctacatccgagggtgctcttcgtaaggggtagttgttgttttatagctccaaatggtttttttattctcagtgtagcaactgtttgatttctttctggatacagctgtatgaacacttttctattttatactgaaatcacacaggtttgtgatctaagtgccagaaccatggaggagactctggccttatctgtagggacctaaattttttaagtgctatgaacactgatcaagtagttgtggagagatgagaagaatatatgcagcaaaggtgctgtgagcccagttccaacggctgtgttctggtaatcgtgcagaacagcatgtgggctctgggccttggcaggtgcacagacgggcgggcgtcacgtgtgttcagagcttgtctccacctcacggctctgtgctcttctgtgtgctgcgttgtggccgtgaagtgggagctctcctttccaaaggcagagcttactgtcatggctcagatgttcactcgcatcttcaccccaaacttccctgaattgcagtgatttctgttataaggcacatagcaagcctgtaccactctacagtaaaatctctacactaacagtttaaagcccgaaagctgaagcattcagcctctgcaagtgtagactactggactgtagtagaggcatttggaatacttacaaagtcaagtgctgtggcttcagttcccccggctccccacccctgacatccatacttatgttgtctggaagagccatggacacatcattattttcagcaaccagctgcagtgaaactccatttacagcaaccccatagtataaaaccacaatgcctcattgtaatgggatattgaagttcattgaagaattactaggttgccatgtggctcacttatttaaaaaaaaaaaaaaaaaactcacccgttttcctgggatttgttgtaaggagttttcactggcctcactcagaccaatttctgcttcaaaaagcactgaatgtgacctgttgcattcagttgtagcatcaaatccacacctagtcattgcttgaggggccaaattgtgttctgtcccatgcacgctctatttggtgttaaaatggaaccttacggttgtgttttaagtattcattgaaaccagcttcagaaaacaagatgccatagtaaattgagaataacattttttccttcttcagggtggctgtaattccaggtggccgtgatttctttcttccccactgcccactccttcgccaaacccacgtattcagtgttctgatcttgtttgtgcagagtgaactctgatgcagtatcagtcttgtcctgggagccgggtcctgctgctcacaagcccagagctgccagggagctcctggcagtagcacgttgtttagaaagttgggtggcttcattcagcatggaacaagctaatggcacaggagacatcagggcagctgttaattccaaatatttgttcccaagtagctactgaactgctcacaccattggaagattttgtattttcataccaattagtaaaaataagaacattgaggagcagtcagagcccagtgttaatctccggcagagatggggtttatgtatgttcagccagatagtaaatgggatttttggagaaataagataactacaaagtttctatacttactataagtggatttagaagcgattttggttttgtattacatacggtagtcctctgcgtcagggagcacttttttgtttgcctcgagactactcattagcgcactggctaagctgcctttgccttctcgtaggcgtgggttgcctgtgtcatgggctgtgtagaccacaacactcaaacacagttgctgcacttggattttcctttaataccaagtatcatttggttatcttactgggacattttcattgatattctatacaccaaagttttgacggtttaccatcattccattttgtaccagttaaaggcattttgatgatgctttttcttgatgctaagatcactgcagaagaataacctgaccttttctttgcatttgttttgaatgtctaacaccattagcttttgtgatctggttaagaagtattagtgccacaagcctgaaaagacagttctcctgtggcagtggcgatgtggcatccagagggccattgtttctacttttgtgggacttcagtcatgctgataatagaatcttctgttcatacaattctgtaatatttatttgtacagttagtattctaatgaaaggatgaagagtctgaactagaaggtaggtttaagccatcaccaggcctttgcaaatggcctaaatggtgttccctttgaaataacgcttgccacaagtatataataagctatattaattgtgttttgcataaaattgccaaaacacagtaatgtgtatatagtggtataagatcttgaaaaaaatctctataattgtgctctttatctgtgaatgggaaaagccatttttagtaggtgactaccatttgaaaaactcaattggatgtatatctgaatgttgcattgtattgtacagtatgcatattattgtttgtggttgcatatggcaatgaagtgtttgttttatattaaaaaaaacctgttatgtacagttgaaataaattttgcatttgcta

SEQ ID NO: 175998 - DNA, 5032 bp, Homo sapiens
  Payload ID: 14554
  Gene Symbol: ARHGEF7
  Gene Name: Rho guanine nucleotide exchange factor (GEF) 7
  Uniprot ID: Q14155
  ENST ID: ENST00000375736
  CDS Start-End: 474-2414
gctgagcgggttggcatctggggcagcgggctcgctccaggccgtcgggggccgctcgccagcgtcgcccgctgtgttgggagcgcgggccgtgggcgtcgctcggccttgtccgcggcgtccccgctgccggccacggcgctcagcgcttgtgctctgtattgcaggtctaccccgagccccggagcgagagcgagtgcctgagcaacatccgcgagttcctgcgcggctgcggggcttccctgcggctggagacgtttgatgcaaatgatttgtatcaggggcagaattttaacaaggtcctcagttccttagtgactctaaataaagtaacagcagacatcgggctggggagtgactccgtgtgtgcccggccctcgtctcaccgcataaagtcttttgactcccttggatcacagtctttgcacactcggacttcaaaactgttccagggccagtatcggagtttggacatgaccgataatagcaacaatcaactggtagtaagagcaaagtttaacttccagcagaccaatgaggacgagctttccttctcaaaaggagacgtcatccatgtcacccgtgtggaagagggaggctggtgggagggcacactcaacggccggaccggctggttccccagcaactacgtgcgcgaggtcaaggccagcgagaagcctgtgtctcccaaatcaggaacactgaagagccctcccaaaggatttgatacgactgccataaacaaaagctattacaatgtggtgctacagaatattttagaaacagaaaatgaatattctaaagaacttcagactgtgctttcaacgtacctacggccattgcagaccagtgagaagttaagttcagcaaacatttcatatttaatgggaaatctagaagaaatatgttctttccagcaaatgctcgtacagtctttagaagaatgcaccaagttgcccgaagctcagcagagagtcggaggctgctttttaaacctgatgccacagatgaaaaccctgtacctcacgtattgtgccaatcacccttctgcagtgaatgtcctcacggaacacagtgaggagttgggggagttcatggagaccaaaggtgccagcagccctgggattctcgtgctgaccacgggcctgagcaaacccttcatgcgcctggataaataccctacgctgctcaaagagctcgagagacacatggaggattatcatacagatagacaagatattcaaaaatccatggctgccttcaaaaacctttcagcccaatgtcaagaagtccggaagaggaaagagcttgagctgcagatcctgacggaagccatccggaactgggagggcgatgacattaaaactctgggcaacgtcacttacatgtcccaggtcctgattcagtgtgccggaagtgaggaaaagaatgaaagatatcttctactcttcccaaatgttttgctaatgttgtctgccagtcctaggatgagtggctttatctatcagggaaagcttccaacgacaggaatgacaatcacaaagcttgaggacagtgaaaatcatagaaatgcatttgaaatatcagggagcatgattgagcggatattagtgtcgtgcaacaaccagcaggatctgcaggaatgggtggagcacctacagaagcaaacgaaggtcacgtctgtgggaaaccccaccataaagcctcattcagtgccatctcataccctcccctcccacccggtcactccgtccagcaagcacgcagacagcaagcccgcgccgctgacgcccgcctaccacacgctgccccacccctcccaccacggcaccccgcacaccaccatcaactggggacccctggagcctccgaaaacacccaagccctggagcctgagctgcctgcggcccgcgcctcccctccggccctcagctgctctctgctacaaggaggatcttagtaagagccctaagaccatgaaaaagctgctgcccaagcgcaaacctgaacggaagccttcagatgaggagttcgcgtcccggaaaagcacagctgctttggaagaagatgctcagattctgaaagtcattgaagcttactgcaccagcgccaaaacaaggcaaacactcaattcaagttcacgcaaagaatctgctccacaagttttgcttccagaagaagagaaaattatagtggaagaaactaaaagtaatggtcagacagtgatagaagaaaagagtcttgtggataccgtatatgcattaaaggatgaagttcaagaattaagacaggacaacaaaaagatgaagaaatctctagaggaagaacagagagcccgcaaagacctggagaagctggtgaggaaagtcctgaagaacatgaatgatcctgcctgggatgagaccaatctataagggatgtcctcagttctttctgttgaagaccagttctgaggtgaagctgggcacccctgacccaagtcggggtgcactcaggaccacagggcagggctgggtggggcgccaccttgctctctgtatatagaaaagctggagcttattctgcgaatggagacgatcaaaccatgactgatgaatccagacaggagggattgactctgaggacctgagctacatcaatccactctgtgaacatctcagttacctcattctgcaataagttcagtgactgactaaaagtcttgtttttccagactttgaattgaatatataaatattatatatacatgtttcttgtaaatatcccattttgaatgcatacctgtggtggttctgtccgggctaatccccatgctagaatgtcctttccagctacgtgaataagaagtcccatgcccgcatccaccggaagcagaagcctggtggatgcctggttcgttccgcagcaccagggcctccaccgtgctgtggcagcaccccccatgtcggtatttctaaataaccttatttatacctgcagagatacacttcagtcccattcagaagtcttctcttaaagcagcattacagtcccagacctgcgggtttctgagggcaacttgctggctgacagactcagtcttgacctcaaggaaggcccatacggcactgccgcatccacctagaggtgtttgctcttgtccgctgtctgagtactgtgattctcagatgagtttgctgcgttttgggaggacacagacggttctgtataggctagttcagtaacaacaaaatacactgttttgtcttccctcaaagagagatcttactagaacctgtaaatagaatgtattatttattataagtcactgcagctgatgaaaacagatggaggccatgctgcaggctgatactgatgggtggagttttgtcatcaggccagcctcatcccgaggtctcctccaccattggccgtagccagcaggcttcagtgctcaccgaaagtaaaatcccctccttcagcaagaataaagcaatatacaccttaggttccactaagtaacataggcataagcagggaacgtttcccccactgtgttccagtgcagaggagacgaagcctgtcctcaccgcggctcgctgggcccaggctggctctggaaagcctgtgcggtcctgggcaggaagcccggcccgtggagcaggttttcgttctgcttcagcaataaataagggtgaccacagggactttgcttttggtttcctttcctgtgaaaaggttggttttaaagtgagatacacttttccgtagaacaagtgttctatctttaaaaacccaaattgcagcaccgtggattactggtctcagaacaactcattgcgcatcagatttgactctctgattttctgtctattggccaaattgccctttaactgcacctgaatcctttgtgtactgatgcctttgagctgggcaccttgggagagtgttgtgttgctgtttacggttcttccttgcccttgctaattacagtctctggtgcccagcaagcccctttggcttccttccgtgactggtcacgttgtctgcctgggctcagcgtggacctgccccatgctgcagaacctggcctcacctggacttttcactagaattgccagcttcctcaacttagcagatcattcactcatgcgggcacaagcaaagatcaacactttcttttttggtaagcttgagttttacaagttattttttggtgatgcgtaagacattgcagtgggaaaccattcaacttgagtttattggagtttgctgttgtagcaggttttaactcaggaacaactcttgtctgatctctccgcccctctgccgggaggcgacattaactgtcctctcggagccggtagcgttgctgtccgagtccccaggacggatctcctgcagacctgccttaatgctcagatcgaagtatttcacaagaatacttgtgtttttaacagcccttcccctggacggtgcggccatgagggcctcatgttacggcattgccttttctttctgtggatccagtatcttcctcggctttttagggagcaggaaaaatgcgtctgagagcaactctttttaaaaacctgccctgttgtatataactgtgtctgtttcaccgtgtgacctcccaagggggtgggaacttgatataaacgtttaaaggggccacgatttgcccgagggttactcctttgctctcaccttgtatggatgaggagatgaagccatttcttatcctgtagatgtgaagcactttcagttttcagcgatgttggaatgtagcatcagaagctcgttccttcacactcagtggcgtctgtgcttgtccacatgcgctgggcgtctgggaccttgaatgcctgccctggttgtgtggactccttaatgccaatcatttcttcacttctctgggacacccagggcgcctgttgacaagtgtggagaaactcctaatttaaatgtcacagacaatgtcctagtgttgactactacaatgttgatgctacactgttgtaattattaaactgattatttttcttatgtc

SEQ ID NO: 175999 - DNA, 5375 bp, Homo sapiens
  Payload ID: 14554
  Gene Symbol: ARHGEF7
  Gene Name: Rho guanine nucleotide exchange factor (GEF) 7
  Uniprot ID: Q14155
  ENST ID: ENST00000375739
  CDS Start-End: 251-2512
gcggccgaggccggggggcggcggcgggcgcccgcaggttcccgagccgctcctgagaaggcgcctgacagcgggccggggcgcacggagaagcgggccgggccggacctgctgggccgcgccgagccaatcgccggcgccggccgctcgatgggcgaggcggcggcggcggcggcgggggccgcgggccgggccgccgctccgaggtgaaggcgcgcgcccctccccgcctgcctcccgggccgcagcgatgaattccgccgagcaaaccgttacgtggctcatcactctgggggtgctggagtcgcccaaaaaaaccatctcggacccggagggctttctgcaggcgtcgctgaaggatggggtggtcctctgcaggctgctggagcgcctgctccccgggaccatcgagaaaacgtttgatgcaaatgatttgtatcaggggcagaattttaacaaggtcctcagttccttagtgactctaaataaagtaacagcagacatcgggctggggagtgactccgtgtgtgcccggccctcgtctcaccgcataaagtcttttgactcccttggatcacagtctttgcacactcggacttcaaaactgttccagggccagtatcggagtttggacatgaccgataatagcaacaatcaactggtagtaagagcaaagtttaacttccagcagaccaatgaggacgagctttccttctcaaaaggagacgtcatccatgtcacccgtgtggaagagggaggctggtgggagggcacactcaacggccggaccggctggttccccagcaactacgtgcgcgaggtcaaggccagcgagaagcctgtgtctcccaaatcaggaacactgaagagccctcccaaaggatttgatacgactgccataaacaaaagctattacaatgtggtgctacagaatattttagaaacagaaaatgaatattctaaagaacttcagactgtgctttcaacgtacctacggccattgcagaccagtgagaagttaagttcagcaaacatttcatatttaatgggaaatctagaagaaatatgttctttccagcaaatgctcgtacagtctttagaagaatgcaccaagttgcccgaagctcagcagagagtcggaggctgctttttaaacctgatgccacagatgaaaaccctgtacctcacgtattgtgccaatcacccttctgcagtgaatgtcctcacggaacacagtgaggagttgggggagttcatggagaccaaaggtgccagcagccctgggattctcgtgctgaccacgggcctgagcaaacccttcatgcgcctggataaataccctacgctgctcaaagagctcgagagacacatggaggattatcatacagatagacaagatattcaaaaatccatggctgccttcaaaaacctttcagcccaatgtcaagaagtccggaagaggaaagagcttgagctgcagatcctgacggaagccatccggaactgggagggcgatgacattaaaactctgggcaacgtcacttacatgtcccaggtcctgattcagtgtgccggaagtgaggaaaagaatgaaagatatcttctactcttcccaaatgttttgctaatgttgtctgccagtcctaggatgagtggctttatctatcagggaaagcttccaacgacaggaatgacaatcacaaagcttgaggacagtgaaaatcatagaaatgcatttgaaatatcagggagcatgattgagcggatattagtgtcgtgcaacaaccagcaggatctgcaggaatgggtggagcacctacagaagcaaacgaaggtcacgtctgtgggaaaccccaccataaagcctcattcagtgccatctcataccctcccctcccacccggtcactccgtccagcaagcacgcagacagcaagcccgcgccgctgacgcccgcctaccacacgctgccccacccctcccaccacggcaccccgcacaccaccatcaactggggacccctggagcctccgaaaacacccaagccctggagcctgagctgcctgcggcccgcgcctcccctccggccctcagctgctctctgctacaaggaggatcttagtaagagccctaagaccatgaaaaagctgctgcccaagcgcaaacctgaacggaagccttcagatgaggagttcgcgtcccggaaaagcacagctgctttggaagaagatgctcagattctgaaagtcattgaagcttactgcaccagcgccaaaacaaggcaaacactcaattcaacatggcaaggcactgacctgatgcataatcacgtcttggctgatgatgaccaaccaagcctagactccctggggcgtcgcagtagcctttctcgtttggagccttcagacctctcggaagactctgactatgacagtatatggacagcccatagttacagaatgggttctacatctcgtaagagctgttgctcatatatctctcaccagaactaatgcacttctgagcttttcttaacaaatgcttgttgtatcgcagcctgcttttcttagatgttttcttgctgttccttgtctcttttatgtgatattttaacaacttttgagagtgttcctgatatttcccattgtactttgtggaggcttaactgccgatgcgagtatacattcgaatgactgactattggagggaggtggtgtgttcacgtgagcctacatccgagggtgctcttcgtaaggggtagttgttgttttatagctccaaatggtttttttattctcagtgtagcaactgtttgatttctttctggatacagctgtatgaacacttttctattttatactgaaatcacacaggtttgtgatctaagtgccagaaccatggaggagactctggccttatctgtagggacctaaattttttaagtgctatgaacactgatcaagtagttgtggagagatgagaagaatatatgcagcaaaggtgctgtgagcccagttccaacggctgtgttctggtaatcgtgcagaacagcatgtgggctctgggccttggcaggtgcacagacgggcgggcgtcacgtgtgttcagagcttgtctccacctcacggctctgtgctcttctgtgtgctgcgttgtggccgtgaagtgggagctctcctttccaaaggcagagcttactgtcatggctcagatgttcactcgcatcttcaccccaaacttccctgaattgcagtgatttctgttataaggcacatagcaagcctgtaccactctacagtaaaatctctacactaacagtttaaagcccgaaagctgaagcattcagcctctgcaagtgtagactactggactgtagtagaggcatttggaatacttacaaagtcaagtgctgtggcttcagttcccccggctccccacccctgacatccatacttatgttgtctggaagagccatggacacatcattattttcagcaaccagctgcagtgaaactccatttacagcaaccccatagtataaaaccacaatgcctcattgtaatgggatattgaagttcattgaagaattactaggttgccatgtggctcacttatttaaaaaaaaaaaaaaaaaactcacccgttttcctgggatttgttgtaaggagttttcactggcctcactcagaccaatttctgcttcaaaaagcactgaatgtgacctgttgcattcagttgtagcatcaaatccacacctagtcattgcttgaggggccaaattgtgttctgtcccatgcacgctctatttggtgttaaaatggaaccttacggttgtgttttaagtattcattgaaaccagcttcagaaaacaagatgccatagtaaattgagaataacattttttccttcttcagggtggctgtaattccaggtggccgtgatttctttcttccccactgcccactccttcgccaaacccacgtattcagtgttctgatcttgtttgtgcagagtgaactctgatgcagtatcagtcttgtcctgggagccgggtcctgctgctcacaagcccagagctgccagggagctcctggcagtagcacgttgtttagaaagttgggtggcttcattcagcatggaacaagctaatggcacaggagacatcagggcagctgttaattccaaatatttgttcccaagtagctactgaactgctcacaccattggaagattttgtattttcataccaattagtaaaaataagaacattgaggagcagtcagagcccagtgttaatctccggcagagatggggtttatgtatgttcagccagatagtaaatgggatttttggagaaataagataactacaaagtttctatacttactataagtggatttagaagcgattttggttttgtattacatacggtagtcctctgcgtcagggagcacttttttgtttgcctcgagactactcattagcgcactggctaagctgcctttgccttctcgtaggcgtgggttgcctgtgtcatgggctgtgtagaccacaacactcaaacacagttgctgcacttggattttcctttaataccaagtatcatttggttatcttactgggacattttcattgatattctatacaccaaagttttgacggtttaccatcattccattttgtaccagttaaaggcattttgatgatgctttttcttgatgctaagatcactgcagaagaataacctgaccttttctttgcatttgttttgaatgtctaacaccattagcttttgtgatctggttaagaagtattagtgccacaagcctgaaaagacagttctcctgtggcagtggcgatgtggcatccagagggccattgtttctacttttgtgggacttcagtcatgctgataatagaatcttctgttcatacaattctgtaatatttatttgtacagttagtattctaatgaaaggatgaagagtctgaactagaaggtaggtttaagccatcaccaggcctttgcaaatggcctaaatggtgttccctttgaaataacgcttgccacaagtatataataagctatattaattgtgttttgcataaaattgccaaaacacagtaatgtgtatatagtggtataagatcttgaaaaaaatctctataattgtgctctttatctgtgaatgggaaaagccatttttagtaggtgactaccatttgaaaaactcaattggatgtatatctgaatgttgcattgtattgtacagtatgcatattattgtttgtggttgcatatggcaatgaagtgtttgttttatattaaaaaaaacctgttatgtacagttgaaataaattttgcatttgctagcc

SEQ ID NO: 176000 - DNA, 5525 bp, Homo sapiens
  Payload ID: 14554
  Gene Symbol: ARHGEF7
  Gene Name: Rho guanine nucleotide exchange factor (GEF) 7
  Uniprot ID: Q14155
  ENST ID: ENST00000375741
  CDS Start-End: 251-2662
gcggccgaggccggggggcggcggcgggcgcccgcaggttcccgagccgctcctgagaaggcgcctgacagcgggccggggcgcacggagaagcgggccgggccggacctgctgggccgcgccgagccaatcgccggcgccggccgctcgatgggcgaggcggcggcggcggcggcgggggccgcgggccgggccgccgctccgaggtgaaggcgcgcgcccctccccgcctgcctcccgggccgcagcgatgaattccgccgagcaaaccgttacgtggctcatcactctgggggtgctggagtcgcccaaaaaaaccatctcggacccggagggctttctgcaggcgtcgctgaaggatggggtggtcctctgcaggctgctggagcgcctgctccccgggaccatcgagaaagtctaccccgagccccggagcgagagcgagtgcctgagcaacatccgcgagttcctgcgcggctgcggggcttccctgcggctggagctcctgtttcctccttcccagcctcctcagcatctggtaaccaccattctcttgtctgcttctacgtttgatgcaaatgatttgtatcaggggcagaattttaacaaggtcctcagttccttagtgactctaaataaagtaacagcagacatcgggctggggagtgactccgtgtgtgcccggccctcgtctcaccgcataaagtcttttgactcccttggatcacagtctttgcacactcggacttcaaaactgttccagggccagtatcggagtttggacatgaccgataatagcaacaatcaactggtagtaagagcaaagtttaacttccagcagaccaatgaggacgagctttccttctcaaaaggagacgtcatccatgtcacccgtgtggaagagggaggctggtgggagggcacactcaacggccggaccggctggttccccagcaactacgtgcgcgaggtcaaggccagcgagaagcctgtgtctcccaaatcaggaacactgaagagccctcccaaaggatttgatacgactgccataaacaaaagctattacaatgtggtgctacagaatattttagaaacagaaaatgaatattctaaagaacttcagactgtgctttcaacgtacctacggccattgcagaccagtgagaagttaagttcagcaaacatttcatatttaatgggaaatctagaagaaatatgttctttccagcaaatgctcgtacagtctttagaagaatgcaccaagttgcccgaagctcagcagagagtcggaggctgctttttaaacctgatgccacagatgaaaaccctgtacctcacgtattgtgccaatcacccttctgcagtgaatgtcctcacggaacacagtgaggagttgggggagttcatggagaccaaaggtgccagcagccctgggattctcgtgctgaccacgggcctgagcaaacccttcatgcgcctggataaataccctacgctgctcaaagagctcgagagacacatggaggattatcatacagatagacaagatattcaaaaatccatggctgccttcaaaaacctttcagcccaatgtcaagaagtccggaagaggaaagagcttgagctgcagatcctgacggaagccatccggaactgggagggcgatgacattaaaactctgggcaacgtcacttacatgtcccaggtcctgattcagtgtgccggaagtgaggaaaagaatgaaagatatcttctactcttcccaaatgttttgctaatgttgtctgccagtcctaggatgagtggctttatctatcagggaaagcttccaacgacaggaatgacaatcacaaagcttgaggacagtgaaaatcatagaaatgcatttgaaatatcagggagcatgattgagcggatattagtgtcgtgcaacaaccagcaggatctgcaggaatgggtggagcacctacagaagcaaacgaaggtcacgtctgtgggaaaccccaccataaagcctcattcagtgccatctcataccctcccctcccacccggtcactccgtccagcaagcacgcagacagcaagcccgcgccgctgacgcccgcctaccacacgctgccccacccctcccaccacggcaccccgcacaccaccatcaactggggacccctggagcctccgaaaacacccaagccctggagcctgagctgcctgcggcccgcgcctcccctccggccctcagctgctctctgctacaaggaggatcttagtaagagccctaagaccatgaaaaagctgctgcccaagcgcaaacctgaacggaagccttcagatgaggagttcgcgtcccggaaaagcacagctgctttggaagaagatgctcagattctgaaagtcattgaagcttactgcaccagcgccaaaacaaggcaaacactcaattcaacatggcaaggcactgacctgatgcataatcacgtcttggctgatgatgaccaaccaagcctagactccctggggcgtcgcagtagcctttctcgtttggagccttcagacctctcggaagactctgactatgacagtatatggacagcccatagttacagaatgggttctacatctcgtaagagctgttgctcatatatctctcaccagaactaatgcacttctgagcttttcttaacaaatgcttgttgtatcgcagcctgcttttcttagatgttttcttgctgttccttgtctcttttatgtgatattttaacaacttttgagagtgttcctgatatttcccattgtactttgtggaggcttaactgccgatgcgagtatacattcgaatgactgactattggagggaggtggtgtgttcacgtgagcctacatccgagggtgctcttcgtaaggggtagttgttgttttatagctccaaatggtttttttattctcagtgtagcaactgtttgatttctttctggatacagctgtatgaacacttttctattttatactgaaatcacacaggtttgtgatctaagtgccagaaccatggaggagactctggccttatctgtagggacctaaattttttaagtgctatgaacactgatcaagtagttgtggagagatgagaagaatatatgcagcaaaggtgctgtgagcccagttccaacggctgtgttctggtaatcgtgcagaacagcatgtgggctctgggccttggcaggtgcacagacgggcgggcgtcacgtgtgttcagagcttgtctccacctcacggctctgtgctcttctgtgtgctgcgttgtggccgtgaagtgggagctctcctttccaaaggcagagcttactgtcatggctcagatgttcactcgcatcttcaccccaaacttccctgaattgcagtgatttctgttataaggcacatagcaagcctgtaccactctacagtaaaatctctacactaacagtttaaagcccgaaagctgaagcattcagcctctgcaagtgtagactactggactgtagtagaggcatttggaatacttacaaagtcaagtgctgtggcttcagttcccccggctccccacccctgacatccatacttatgttgtctggaagagccatggacacatcattattttcagcaaccagctgcagtgaaactccatttacagcaaccccatagtataaaaccacaatgcctcattgtaatgggatattgaagttcattgaagaattactaggttgccatgtggctcacttatttaaaaaaaaaaaaaaaaaactcacccgttttcctgggatttgttgtaaggagttttcactggcctcactcagaccaatttctgcttcaaaaagcactgaatgtgacctgttgcattcagttgtagcatcaaatccacacctagtcattgcttgaggggccaaattgtgttctgtcccatgcacgctctatttggtgttaaaatggaaccttacggttgtgttttaagtattcattgaaaccagcttcagaaaacaagatgccatagtaaattgagaataacattttttccttcttcagggtggctgtaattccaggtggccgtgatttctttcttccccactgcccactccttcgccaaacccacgtattcagtgttctgatcttgtttgtgcagagtgaactctgatgcagtatcagtcttgtcctgggagccgggtcctgctgctcacaagcccagagctgccagggagctcctggcagtagcacgttgtttagaaagttgggtggcttcattcagcatggaacaagctaatggcacaggagacatcagggcagctgttaattccaaatatttgttcccaagtagctactgaactgctcacaccattggaagattttgtattttcataccaattagtaaaaataagaacattgaggagcagtcagagcccagtgttaatctccggcagagatggggtttatgtatgttcagccagatagtaaatgggatttttggagaaataagataactacaaagtttctatacttactataagtggatttagaagcgattttggttttgtattacatacggtagtcctctgcgtcagggagcacttttttgtttgcctcgagactactcattagcgcactggctaagctgcctttgccttctcgtaggcgtgggttgcctgtgtcatgggctgtgtagaccacaacactcaaacacagttgctgcacttggattttcctttaataccaagtatcatttggttatcttactgggacattttcattgatattctatacaccaaagttttgacggtttaccatcattccattttgtaccagttaaaggcattttgatgatgctttttcttgatgctaagatcactgcagaagaataacctgaccttttctttgcatttgttttgaatgtctaacaccattagcttttgtgatctggttaagaagtattagtgccacaagcctgaaaagacagttctcctgtggcagtggcgatgtggcatccagagggccattgtttctacttttgtgggacttcagtcatgctgataatagaatcttctgttcatacaattctgtaatatttatttgtacagttagtattctaatgaaaggatgaagagtctgaactagaaggtaggtttaagccatcaccaggcctttgcaaatggcctaaatggtgttccctttgaaataacgcttgccacaagtatataataagctatattaattgtgttttgcataaaattgccaaaacacagtaatgtgtatatagtggtataagatcttgaaaaaaatctctataattgtgctctttatctgtgaatgggaaaagccatttttagtaggtgactaccatttgaaaaactcaattggatgtatatctgaatgttgcattgtattgtacagtatgcatattattgtttgtggttgcatatggcaatgaagtgtttgttttatattaaaaaaaacctgttatgtacagttgaaataaattttgcatttgctagcc

SEQ ID NO: 176001 - DNA, 481 bp, Homo sapiens
  Payload ID: 14554
  Gene Symbol: ARHGEF7
  Gene Name: Rho guanine nucleotide exchange factor (GEF) 7
  ENST ID: ENST00000426768
  CDS Start-End: 53-481
acatttttcacatcctgttattctgggttttgtgacttgctgccttgccactatgaagacgtttgatgcaaatgatttgtatcaggggcagaattttaacaaggtcctcagttccttagtgactctaaataaagtaacagcagacatcgggctggggagtgactccgtgtgtgcccggccctcgtctcaccgcataaagtcttttgactcccttggatcacagtctttgcacactcggacttcaaaactgttccagggccagtatcggagtttggacatgaccgataatagcaacaatcaactggtagtaagagcaaagtttaacttccagcagaccaatgaggacgagctttccttctcaaaaggagacgtcatccatgtcacccgtgtggaagagggaggctggtgggagggcacactcaacggccggaccggctggttccccagcaactacgtgcgcgaggtcaaggccagcggtaag

SEQ ID NO: 176002 - DNA, 4921 bp, Homo sapiens
  Payload ID: 14554
  Gene Symbol: ARHGEF7
  Gene Name: Rho guanine nucleotide exchange factor (GEF) 7
  Uniprot ID: Q14155
  ENST ID: ENST00000426073
  CDS Start-End: 357-2297
gatggtggaaagtgaggagaagcaaaaagacgactacttctttccccatttcccggtctggtctttttggggtctactacgtagaggtgcatcagccagcgctaccatggaggcaggaggcattcttttgctctcgtacgtttgatgcaaatgatttgtatcaggggcagaattttaacaaggtcctcagttccttagtgactctaaataaagtaacagcagacatcgggctggggagtgactccgtgtgtgcccggccctcgtctcaccgcataaagtcttttgactcccttggatcacagtctttgcacactcggacttcaaaactgttccagggccagtatcggagtttggacatgaccgataatagcaacaatcaactggtagtaagagcaaagtttaacttccagcagaccaatgaggacgagctttccttctcaaaaggagacgtcatccatgtcacccgtgtggaagagggaggctggtgggagggcacactcaacggccggaccggctggttccccagcaactacgtgcgcgaggtcaaggccagcgagaagcctgtgtctcccaaatcaggaacactgaagagccctcccaaaggatttgatacgactgccataaacaaaagctattacaatgtggtgctacagaatattttagaaacagaaaatgaatattctaaagaacttcagactgtgctttcaacgtacctacggccattgcagaccagtgagaagttaagttcagcaaacatttcatatttaatgggaaatctagaagaaatatgttctttccagcaaatgctcgtacagtctttagaagaatgcaccaagttgcccgaagctcagcagagagtcggaggctgctttttaaacctgatgccacagatgaaaaccctgtacctcacgtattgtgccaatcacccttctgcagtgaatgtcctcacggaacacagtgaggagttgggggagttcatggagaccaaaggtgccagcagccctgggattctcgtgctgaccacgggcctgagcaaacccttcatgcgcctggataaataccctacgctgctcaaagagctcgagagacacatggaggattatcatacagatagacaagatattcaaaaatccatggctgccttcaaaaacctttcagcccaatgtcaagaagtccggaagaggaaagagcttgagctgcagatcctgacggaagccatccggaactgggagggcgatgacattaaaactctgggcaacgtcacttacatgtcccaggtcctgattcagtgtgccggaagtgaggaaaagaatgaaagatatcttctactcttcccaaatgttttgctaatgttgtctgccagtcctaggatgagtggctttatctatcagggaaagcttccaacgacaggaatgacaatcacaaagcttgaggacagtgaaaatcatagaaatgcatttgaaatatcagggagcatgattgagcggatattagtgtcgtgcaacaaccagcaggatctgcaggaatgggtggagcacctacagaagcaaacgaaggtcacgtctgtgggaaaccccaccataaagcctcattcagtgccatctcataccctcccctcccacccggtcactccgtccagcaagcacgcagacagcaagcccgcgccgctgacgcccgcctaccacacgctgccccacccctcccaccacggcaccccgcacaccaccatcaactggggacccctggagcctccgaaaacacccaagccctggagcctgagctgcctgcggcccgcgcctcccctccggccctcagctgctctctgctacaaggaggatcttagtaagagccctaagaccatgaaaaagctgctgcccaagcgcaaacctgaacggaagccttcagatgaggagttcgcgtcccggaaaagcacagctgctttggaagaagatgctcagattctgaaagtcattgaagcttactgcaccagcgccaaaacaaggcaaacactcaattcaagttcacgcaaagaatctgctccacaagttttgcttccagaagaagagaaaattatagtggaagaaactaaaagtaatggtcagacagtgatagaagaaaagagtcttgtggataccgtatatgcattaaaggatgaagttcaagaattaagacaggacaacaaaaagatgaagaaatctctagaggaagaacagagagcccgcaaagacctggagaagctggtgaggaaagtcctgaagaacatgaatgatcctgcctgggatgagaccaatctataagggatgtcctcagttctttctgttgaagaccagttctgaggtgaagctgggcacccctgacccaagtcggggtgcactcaggaccacagggcagggctgggtggggcgccaccttgctctctgtatatagaaaagctggagcttattctgcgaatggagacgatcaaaccatgactgatgaatccagacaggagggattgactctgaggacctgagctacatcaatccactctgtgaacatctcagttacctcattctgcaataagttcagtgactgactaaaagtcttgtttttccagactttgaattgaatatataaatattatatatacatgtttcttgtaaatatcccattttgaatgcatacctgtggtggttctgtccgggctaatccccatgctagaatgtcctttccagctacgtgaataagaagtcccatgcccgcatccaccggaagcagaagcctggtggatgcctggttcgttccgcagcaccagggcctccaccgtgctgtggcagcaccccccatgtcggtatttctaaataaccttatttatacctgcagagatacacttcagtcccattcagaagtcttctcttaaagcagcattacagtcccagacctgcgggtttctgagggcaacttgctggctgacagactcagtcttgacctcaaggaaggcccatacggcactgccgcatccacctagaggtgtttgctcttgtccgctgtctgagtactgtgattctcagatgagtttgctgcgttttgggaggacacagacggttctgtataggctagttcagtaacaacaaaatacactgttttgtcttccctcaaagagagatcttactagaacctgtaaatagaatgtattatttattataagtcactgcagctgatgaaaacagatggaggccatgctgcaggctgatactgatgggtggagttttgtcatcaggccagcctcatcccgaggtctcctccaccattggccgtagccagcaggcttcagtgctcaccgaaagtaaaatcccctccttcagcaagaataaagcaatatacaccttaggttccactaagtaacataggcataagcagggaacgtttcccccactgtgttccagtgcagaggagacgaagcctgtcctcaccgcggctcgctgggcccaggctggctctggaaagcctgtgcggtcctgggcaggaagcccggcccgtggagcaggttttcgttctgcttcagcaataaataagggtgaccacagggactttgcttttggtttcctttcctgtgaaaaggttggttttaaagtgagatacacttttccgtagaacaagtgttctatctttaaaaacccaaattgcagcaccgtggattactggtctcagaacaactcattgcgcatcagatttgactctctgattttctgtctattggccaaattgccctttaactgcacctgaatcctttgtgtactgatgcctttgagctgggcaccttgggagagtgttgtgttgctgtttacggttcttccttgcccttgctaattacagtctctggtgcccagcaagcccctttggcttccttccgtgactggtcacgttgtctgcctgggctcagcgtggacctgccccatgctgcagaacctggcctcacctggacttttcactagaattgccagcttcctcaacttagcagatcattcactcatgcgggcacaagcaaagatcaacactttcttttttggtaagcttgagttttacaagttattttttggtgatgcgtaagacattgcagtgggaaaccattcaacttgagtttattggagtttgctgttgtagcaggttttaactcaggaacaactcttgtctgatctctccgcccctctgccgggaggcgacattaactgtcctctcggagccggtagcgttgctgtccgagtccccaggacggatctcctgcagacctgccttaatgctcagatcgaagtatttcacaagaatacttgtgtttttaacagcccttcccctggacggtgcggccatgagggcctcatgttacggcattgccttttctttctgtggatccagtatcttcctcggctttttagggagcaggaaaaatgcgtctgagagcaactctttttaaaaacctgccctgttgtatataactgtgtctgtttcaccgtgtgacctcccaagggggtgggaacttgatataaacgtttaaaggggccacgatttgcccgagggttactcctttgctctcaccttgtatggatgaggagatgaagccatttcttatcctgtagatgtgaagcactttcagttttcagcgatgttggaatgtagcatcagaagctcgttccttcacactcagtggcgtctgtgcttgtccacatgcgctgggcgtctgggaccttgaatgcctgccctggttgtgtggactccttaatgccaatcatttcttcacttctctgggacacccagggcgcctgttgacaagtgtggagaaactcctaatttaaatgtcacagacaatgtcctagtgttgactactacaatgttgatgctacactgttgtaattattaaactgattatttttcttatgtcacagaa

SEQ ID NO: 176003 - DNA, 682 bp, Homo sapiens
  Payload ID: 14554
  Gene Symbol: ARHGEF7
  Gene Name: Rho guanine nucleotide exchange factor (GEF) 7
  ENST ID: ENST00000449979
  CDS Start-End: 484-682
tgggcgaggcggcggcggcggcggcgggggccgcgggccgggccgccgctccgaggtgaaggcgcgcgcccctccccgcctgcctcccgggccgcagcgatgaattccgccgagcaaaccgttacgtggctcatcactctgggggtgctggagtcgcccaaaaaaaccatctcggacccggagggctttctgcaggcgtcgctgaaggatggggtggtcctctgcaggctgctggagcgcctgctccccgggaccatcgagaaaacgtttgatgcaaatgatttgtatcaggggcagaattttaacaaggtcctcagttccttagtgactctaaataaagtaacagcagacatcgggctggggagtgactccgtgtgtgcccggccctcgtctcaccgcataaagtcttttgactcccttggatcacagtctttgcacactcggacttcaaaactgttccagggccagtatcggagtttggacatgaccgataatagcaacaatcaactggtagtaagagcaaagtttaacttccagcagaccaatgaggacgagctttccttctcaaaaggagacgtcatccatgtcacccgtgtggaagagggaggctggtgggagggcacactcaacggccggaccggctggttccccagcaactacgtgcgcgaggtcaaggccagcg

SEQ ID NO: 176004 - DNA, 1833 bp, Homo sapiens
  Payload ID: 14554
  Gene Symbol: ARHGEF7
  Gene Name: Rho guanine nucleotide exchange factor (GEF) 7
  ENST ID: ENST00000478679
  CDS Start-End: 64-1707
ctgcgtcctctgggttcccagcgttggtgggatggagctgtggcgtccaggctgtgaggtctcatggggtcctgcagcagccagagcgtgcagaagacgaggaggggaagaaaggtggtgctacagaatattttagaaacagaaaatgaatattctaaagaacttcagactgtgctttcaacgtacctacggccattgcagaccagtgagaagttaagttcagcaaacatttcatatttaatgggaaatctagaagaaatatgttctttccagcaaatgctcgtacagtctttagaagaatgcaccaagttgcccgaagctcagcagagagtcggaggctgctttttaaacctgatgccacagatgaaaaccctgtacctcacgtattgtgccaatcacccttctgcagtgaatgtcctcacggaacacagtgaggagttgggggagttcatggagaccaaaggtgccagcagccctgggattctcgtgctgaccacgggcctgagcaaacccttcatgcgcctggataaataccctacgctgctcaaagagctcgagagacacatggaggattatcatacagatagacaagatattcaaaaatccatggctgccttcaaaaacctttcagcccaatgtcaagaagtccggaagaggaaagagcttgagctgcagatcctgacggaagccatccggaactgggagggcgatgacattaaaactctgggcaacgtcacttacatgtcccaggtcctgattcagtgtgccggaagtgaggaaaagaatgaaagatatcttctactcttcccaaatgttttgctaatgttgtctgccagtcctaggatgagtggctttatctatcagggaaagcttccaacgacaggaatgacaatcacaaagcttgaggacagtgaaaatcatagaaatgcatttgaaatatcagggagcatgattgagcggatattagtgtcgtgcaacaaccagcaggatctgcaggaatgggtggagcacctacagaagcaaacgaaggtcacgtctgtgggaaaccccaccataaagcctcattcagtgccatctcataccctcccctcccacccggtcactccgtccagcaagcacgcagacagcaagcccgcgccgctgacgcccgcctaccacacgctgccccacccctcccaccacggcaccccgcacaccaccatcaactggggacccctggagcctccgaaaacacccaagccctggagcctgagctgcctgcggcccgcgcctcccctccggccctcagctgctctctgctacaaggaggatcttagtaagagccctaagaccatgaaaaagctgctgcccaagcgcaaacctgaacggaagccttcagatgaggagttcgcgtcccggaaaagcacagctgctttggaagaagatgctcagattctgaaagtcattgaagcttactgcaccagcgccaaaacaaggcaaacactcaattcaacatggcaaggcactgacctgatgcataatcacgtcttggctgatgatgaccaaccaagcctagactccctggggcgtcgcagtagcctttctcgtttggagccttcagacctctcggaagactctgactatgacagtatatggacagcccatagttacagaatgggttctacatctcgtaagagctgttgctcatatatctctcaccagaactaatgcacttctgagcttttcttaacaaatgcttgttgtatcgcagcctgcttttcttagatgttttcttgctgttccttgtctcttttatgtgatattttaacaacttttgagagtgttcctgatatt

SEQ ID NO: 176005 - DNA, 581 bp, Homo sapiens
  Payload ID: 14554
  Gene Symbol: ARHGEF7
  Gene Name: Rho guanine nucleotide exchange factor (GEF) 7
  ENST ID: ENST00000491775
  CDS Start-End: 463-581
acttccggcgccggggctcacttcctggtgcgggaaggggcagagattggtgcagccccggaggaagaaaaaagggtctaccccgagccccggagcgagagcgagtgcctgagcaacatccgcgagttcctgcgcggctgcggggcttccctgcggctggagacgtttgatgcaaatgatttgtatcaggggcagaattttaacaaggtcctcagttccttagtgactctaaataaagtaacagcagtgtcttatgaagggagatccagagaacagaactaagcctcttactgtctgtttactttgattctgtcagcaacttcatgagacatcgggctggggagtgactccgtgtgtgcccggccctcgtctcaccgcataaagtcttttgactcccttggatcacagtctttgcacactcggacttcaaaactgttccagggccagtatcggagtttggacatgaccgataatagcaacaatcaactggtagtaagagcaaagtttaacttccagcagaccaatgaggacgagctttccttctcaaaaggagacgtcatccatgtcacccgtgtggaaga

SEQ ID NO: 176006 - DNA, 1681 bp, Homo sapiens
  Payload ID: 14554
  Gene Symbol: ARHGEF7
  Gene Name: Rho guanine nucleotide exchange factor (GEF) 7
  ENST ID: ENST00000466143
  CDS Start-End: 340-1681
gagattggtgcagccccggaggaagaaaaaagggtctaccccgagccccggagcgagagcgagtgcctgagcaacatccgcgagttcctgcgcggctgcggggcttccctgcggctggagacgtttgatgcaaatgatttgtatcaggggcagaattttaacaaggtcctcagttccttagtgactctaaataaagtaacagcagacatcgggctggggagtgactccgtgtgtgcccggccctcgtctcaccgcataaagtcttttgactcccttggatcacagtctttgcacactcggacttcaaaactgttccagggccagtatcggagtttggacatgaccgataatagcaacaatcaactggtagtaagagcaaagtttaacttccagcagaccaatgaggacgagctttccttctcaaaaggagacgtcatccatgtcacccgtgtggaagagggaggctggtgggagggcacactcaacggccggaccggctggttccccagcaactacgtgcgcgaggtcaaggccagcgagaagcctgtgtctcccaaatcaggaacactgaagagccctcccaaaggatttgatacgactgccataaacaaaagctattacaatgtggtgctacagaatattttagaaacagaaaatgaatattctaaagaacttcagactgtgctttcaacgtacctacggccattgcagaccagtgagaagttaagttcagcaaacatttcatatttaatgggaaatctagaagaaatatgttctttccagcaaatgctcgtacagtctttagaagaatgcaccaagttgcccgaagctcagcagagagtcggaggctgctttttaaacctgatgccacagatgaaaaccctgtacctcacgtattgtgccaatcacccttctgcagtgaatgtcctcacggaacacagtgaggagttgggggagttcatggagaccaaaggtgccagcagccctgggattctcgtgctgaccacgggcctgagcaaacccttcatgcgcctggataaataccctacgctgctcaaagagctcgagagacacatggaggattatcatacagatagacaagatattcaaaaatccatggctgccttcaaaaacctttcagcccaatgtcaagaagtccggaagaggaaagagcttgagctgcagatcctgacggaagccatccggaactgggagggcgatgacattaaaactctgggcaacgtcacttacatgtcccaggtcctgattcagtgtgccggaagtgaggaaaagaatgaaagatatcttctactcttcccaaatgttttgctaatgttgtctgccagtcctaggatgagtggctttatctatcagggaaagcttccaacgacaggaatgacaatcacaaagcttgaggacagtgaaaatcatagaaatgcatttgaaatatcagggagcatgattgagcggatattagtgtcgtgcaacaaccagcaggatctgcaggaatgggtggagcacctacagaagcaaacgaaggtcacgtctgtgggaaaccccaccataaagcctcattcagtgccatctcataccctcccctcccacccggtcactccgtccagcaagcacgcagacagcaagcccgcgccgctgacgcccgcctaccacacgctgccccacc

SEQ ID NO: 176007 - DNA, 1501 bp, Homo sapiens
  Payload ID: 14554
  Gene Symbol: ARHGEF7
  Gene Name: Rho guanine nucleotide exchange factor (GEF) 7
  ENST ID: ENST00000469877
  CDS Start-End: 209-664
gagattggtgcagccccggaggaagaaaaaagggtctaccccgagccccggagcgagagcgagtgcctgagcaacatccgcgagttcctgcgcggctgcggggcttccctgcggctggagacgtttgatgcaaatgatttgtatcaggggcagaattttaacaaggtcctcagttccttagtgactctaaataaagtaacagcaggacatgaccgataatagcaacaatcaactggtagtaagagcaaagtttaacttccagcagaccaatgaggacgagctttccttctcaaaaggagacgtcatccatgtcacccgtgtggaagagggaggctggtgggagggcacactcaacggccggaccggctggttccccagcaactacgtgcgcgaggtcaaggccagcgagaagcctgtgtctcccaaatcaggaacactgaagagccctcccaaaggatttgatacgactgccataaacaaaagctattacaatgtgccagtacttagccgcggagcggaaagcagtgctcatgaaggtggaggcacacccagagactgcatggaggtggaaccgggaagtccggggtctgaggtcctgcctgcagggttgaaaggcatgcctgccagcagacacatttgggagccagagtgtgctgtggtctgaatgtgtttccccagatcatctgttactacagatgatcaccaattggatggtattaaaagcacacgtgcccctgctccgggttgttgctgttgtccttcagaaactctgaggtctggagaggttgcccgaagctcagcagagagtcggaggctgctttttaaacctgatgccacagatgaaaaccctgtacctcacgtattgtgccaatcacccttctgcagtgaatgtcctcacggaacacaggattatcatacagatagacaagatattcaaaaatccatggctgccttcaaaaacctttcagcccaatgtcaagaagtccggaagaggaaagagcttgagctgcagatcctgacggaagccatccggaactgggagggcgatgacattaaaactctgggcaacgtcacttacatgtcccaggtcctgattcagtgtgccggaagtgaggaaaagaatgaaagatatcttctactcttcccaaatgttttgctaatgttgtctgccagtcctaggatgagtggctttatctatcagggagcatgattgagcggatattagtgtcgtgcaacaaccagcaggatctgcaggaatgggtggagcacctacagaagcaaacgaaggtcacgtctgtgggaaaccccaccataaagcctcattcagtgccatctcataccctcccctcccacccggtcactccgtccagcaagcacgcagacagcaagcccgcgccgctgacgcccgcctaccacacgctgccccacccctcccaccacggcaccccgcacaccaccatcaactggggacccctggagcctccgaaaacacccaagccct

SEQ ID NO: 176008 - DNA, 691 bp, Homo sapiens
  Payload ID: 14554
  Gene Symbol: ARHGEF7
  Gene Name: Rho guanine nucleotide exchange factor (GEF) 7
  ENST ID: ENST00000467053
  CDS Start-End: 508-691
acacttcagatgggggatagtccaggctggtggtggagctcccaggggatttcgcttctgggtagaattgtcatttttttttttcctcagagactgttgtgtgggcctagtggtgcatcaggttccggttagaatccagtgcaggccgcaggcttctctttaattagagagggtcacttcacctccggttagaatccagtgcaggcagcagcttctttttaattagagaggggtctgggtgctgagcttcccatcaggaagaaggggctgtcgtgctgaagtcctgagacgtttgatgcaaatgatttgtatcaggggcagaattttaacaaggtcctcagttccttagtgactctaaataaagtaacagcagacatcgggctggggagtgactccgtgtgtgcccggccctcgtctcaccgcataaagtcttttgactcccttggatcacagtctttgcacactcggacttcaaaactgttccagggccagtatcggagtttggacatgaccgataatagcaacaatcaactggtagtaagagcaaagtttaacttccagcagaccaatgaggacgagctttccttctcaaaaggagacgtcatccatgtcacccgtgtggaagagggaggctggtgggagggcacactcaacggccggaccggctggttccccagcaactacgtgcgcg

SEQ ID NO: 176009 - DNA, 766 bp, Homo sapiens
  Payload ID: 14554
  Gene Symbol: ARHGEF7
  Gene Name: Rho guanine nucleotide exchange factor (GEF) 7
  ENST ID: ENST00000544132
  CDS Start-End: 1-391
ggtcctgattcagtgtgccggaagtgaggaaaagaatgaaagatatcttctactcttcccaaatgttttgctaatgttgtctgccagtcctaggatgagtggctttatctatcagggaaagcttccaacgacaggaatgacaatcacaaagcttgaggacagtgaaaatcatagaaatgcatttgaaatatcagggagcatgattgagcggatattagtgtcgtgcaacaaccagcaggatctgcaggaatgggtggagcacctacagaagcaaacgaaggtcacgtctgtgggaaaccccaccataaagcctcattcagtgccatctcataccgtaaggacttggtgcttctcctccttccagactccaggcgtggcatcccgtggctgagctgtcagcaagtgatcagttgctttaaaacctaatcaatatttggataaaaagtgcaaaacacttgcttcacatttctctgcagatctttggccctcttcgtgcagtagtgaattgttttccaatgagtgttctcgagaaacaaccctgaattgtgcctcctcacgcacagttcagaggtgcttgggtgggaagctgcttctgctccgtgtggccctagaagactgatttaggggagttttacactcaactatagatgatttttctgagaattttaactgtttattatgcttcatttaagaaaacaaaaaataaatgattatgatgatgaaaagggccagactcatgttgaaggcattaaaagaatttatgaca

SEQ ID NO: 176010 - DNA, 5212 bp, Homo sapiens
  Payload ID: 14555
  Gene Symbol: ARHGEF18
  Gene Name: Rho/Rac guanine nucleotide exchange factor (GEF) 18
  Uniprot ID: Q6ZSZ5
  ENST ID: ENST00000319670
  CDS Start-End: 207-3254
ctcgcgcggcttcccgcttccggctcccagctgctagctactgtggatctgggggggccggacggaggcatcggaggcggctgcgagagtggcagaggagctggcggagagcggcctgcgggcgatcgggccgagcctcgctcaaggagcacccccggggcaccctcctgtccgatggcagcccggccctgtccaggaatgtcggtatgacggtctctcagaaagggggtccccagccaacaccgagcccggctggccctgggacgcaactcggaccaatcacaggagagatggatgaagccgattctgcgtttttaaaatttaagcagacagctgatgactctctgtcccttacatctccaaacaccgagtccatttttgtagaagatccctacaccgcctcgctgaggagtgagattgagtcagacggccacgagtttgaagctgagtcctggagcctcgccgtggatgcagcctacgccaagaagcaaaagagggaggtggtgaaaagacaagatgtcctttatgagctgatgcagacagaggtgcaccacgtgcggacgctcaagatcatgctgaaggtgtactccagggccctgcaggaggagctgcagttcagcagcaaggccattggccgcctcttcccatgcgctgacgacctgctggagacgcacagccacttcctcgctcggctcaaggagcgccgccaggagtccctggaggagggcagtgaccggaattatgtcatccagaaaatcggcgacctcctggttcagcagttttcaggtgaaaatggggagagaatgaaagaaaagtacggtgtgttttgtagtggccacaatgaagctgttagtcattacaagttgctgcttcagcaaaacaagaaatttcaaaacttgatcaagaaaattggcaacttctccatcgtgcggcggcttggcgtgcaggagtgcattctcctggttacacaacgcataaccaaatacccagtgctggtggagcgcatcatccagaacacggaagctggcactgaggactatgaagacctgacccaggccttgaacctcatcaaagatatcatctcacaagtggacgccaaggtcagtgagtgtgagaagggccagcgcctcagggagatcgcagggaagatggacctgaagtcttccagcaaactcaagaacgggctcaccttccgcaaggaagacatgcttcagcggcagctccacctggagggcatgctatgctggaagaccacatcagggcgcttgaaagatatcctggctatcctgctgaccgacgtacttttgctgctacaagaaaaagatcagaaatacgtctttgcttctgtggactcaaagccacccgtcatctcgttacaaaagctcatcgtgagggaagtggccaacgaggagaaagcgatgtttctgatcagcgcctccttgcaagggccggagatgtatgaaatctacacgagctccaaagaggacaggaacgcctggatggcccacatccaaagggctgtggagagctgccctgacgaggaggaggggcccttcagcctgcccgaagaggaaaggaaggtggtcgaggcccgcgccacgagactccgggactttcaagagcggttgagcatgaaagaccagctgatcgcacagagcctcctagagaaacagcagatctacctggagatggccgagatgggcggcctcgaagacctgccccagccccgaggcctattccgtggaggggacccatccgagaccctgcagggggagctaattctcaagtcggccatgagcgagatcgagggcatccagagcctgatctgcaggcagctgggcagcgccaacggccaggcggaagacggaggcagctccacaggcccgcccaggagggctgagaccttcgcgggctacgactgcacaaacagccccaccaagaatggcagtttcaagaagaaagtcagcagcactgaccccaggccccgagactggcgaggccccccaaacagcccggacttgaagctcagtgacagtgacattcctgggagctctgaggaatcgccgcaggtggtggaggcgccaggcacggaatccgatccccgtctgcccaccgtcctggagtcggagcttgtccagcggatccagacactgtcccagctgctcctgaaccttcaggcggtaatcgcccaccaggacagctatgtggagacgcagcgggctgccatccaggagcgggagaagcagttccggctgcagtcgacgcgtgggaacctgctgctggagcaggagcggcaacgcaacttcgagaagcagcgggaggagcgcgcggccctggagaagctgcagagccagctgcggcacgagcagcagcgctgggagcgcgagcgccagtggcagcaccaggagctggagcgtgcgggcgcgcggctgcaggagcgcgagggcgaggcgcggcagctacgcgagcggctggagcaggagcgggccgagctggagcgccagcgccaggcctaccagcacgacctggagcggctgcgcgaggcccagcgtgccgtggagcgcgagcgggagcgcctggagctgctgcgccgcctcaagaagcagaacaccgcgccaggcgcgctgccgcccgacacactggccgaggcccagcccccaagccaccctcccagcttcaacggggaagggctggagggccctcgtgtgagcatgctgccatccggcgtggggccagagtacgcagagcgccccgaggtggctcgccgggacagcgcccccaccgagaaccggctggccaagagcgatgtgcccatccagctgctcagcgccaccaaccagttccagaggcaggcggccgtgcagcagcagatccccaccaagctggcggcctccaccaagggtggcaaggacaagggcggcaagagcaggggctctcagcgctgggagagctcagcgtccttcgacctgaagcagcagctgctgctcaacaagctcatggggaaagatgagagcacctcacggaaccgccgctcgctgagccctatcctgcccggcagacacagtcctgcgcccccaccagaccctggcttccccgccccgagcccaccgccagctgacagcccctccgagggcttctctctcaaggccgggggcacagccctcctgcccgggcccccagctccctcgccactgccggccacaccactcagcgccaaggaggacgccagcaaagaagacgtcatcttcttctaaaagggccgtgactcaaggaaagtttttaatggaaagttgagccagaactaaaccagggagctgtctgaaatcatagcaccccatccgggtggcggggagatcaactccgagctgtttttccgaggcagtgaggaacggtgccggctctgcacggagctgaggacaggacagaccttgctttgagaaggagctgccggccggggccacgctccacagccgccgcgcgacagtggagccaagggttagggcaccaggaggggccaggtggcgtcggcagcatctgtccccagaatcaggcagaatccacttcccaaacagagccccacgcaggttcaccatgaacctcagggtcagggaatgagccaggcacgggggcatgggcagagagggccacggggcagggcccactgagggaacatcagtggccctccagtcaggttctgtgggtttggaagcccatcgtgaaaggggctgacctttgcccctttttacttggcattggttttgaaaccagctgtttcccaaactctgcttcccaagggcaaccgttgctgttcacacgctcagcctgtctgggggagcgggcctctagcttcagccagggcgggtacacaccctgggcacagggtcctcagcccccgggaaatgagctcccagggctggcgtcccaccttccaggtgggggctggcacatcacagactgtcgagagcgccatgtcccagggcatgcagaggatgcacctagagacgttgcagcaagtggacaagtggccgctgtgcgggcccctcgcttgtagtgagctgttgcagcttacggtccgttccctggaggggtggaggaaggaggtgttgggcagcatcaaaggtgctgggacatcccagggtggtgagatccatccacgatccagctccggtggagaaagggcccatgtcaagccttgttctgcaccccaagcattggtggtaggactgggtcctggctgatcgtccttgttcccagtggggtacatgtgagcccctgccagggccaagtccttctcccgaacccagggtcctgggaactgcagatcccggggggattcagcccttctcccactgtgctggcagaggcactcctgtgacgctgaatacagtgaacagggacattcccgccactcggggacagatgggcacaagggaggggaaactccatcaggaagtgctcccctgggcagaggcgcccactgggtgctgtgggctcaggagggggcggggcaggagctggtgccaaccgggaaccagagccccacagccatacagcccattggtgacaaggtcctgagaacacagtggccaggtgtccccaggctcctggcccctccgacgacctcaactctgcccagcccggtccctggccatcagcgacgctgtccgccccccgtcagatcccatgtgtgccatgtttatcatcagtgttttgtatttttgtactgagtatcggagcactttacagaagctgactgtacattcctgttctgttgtgaagagaacattcccagaccctggcaccctcctgagccggcgtgtgccggtccagccctccgagatgccacaattccttggatgggggagaagttcaaggaatttctgctcggccacgcggtgggaaccccgcgtccccgccatgtggcagaggggtctcagtcgtgctaggcatcgggcggcagcgccgacagcccttccctcgccagtgcccctcggccactcctgggttggagcccgattttatttgtaaagttgacagtcgagcaaatgttcctattttcgtgggatctgcacacgtctttgtcagttgtggtcatgatcttagtcacctgctaattatttttacaatgattacaacatttcctcactgcgggatatttctgacccgctttagaacttaagacctgattctagcaataaacgtgtccgagatg

SEQ ID NO: 176011 - DNA, 5733 bp, Homo sapiens
  Payload ID: 14555
  Gene Symbol: ARHGEF18
  Gene Name: Rho/Rac guanine nucleotide exchange factor (GEF) 18
  Uniprot ID: Q6ZSZ5
  ENST ID: ENST00000359920
  CDS Start-End: 254-3775
aaacaccatgccctgccatctctgggtcttagagtcaccctaacatctgatctagattaattatcatcatgtgcgaggttttggcatgaagcacgccaggctcaccgtttcatgatcttagactatttacagcaaactcaaacagctcacttgctttttacaccctgcaaagaccaagggagagcctggaggggttgttttttttttctgttttattctatcaaagcagcaaatactgcaatttccacagtaaatggtcacagtggggaccaatatcctgccctccagacccgctgcttcagccaatacagcaagggaagacgcagctctgttttctagaaggatcccaccgaggcataaaaacggcgcagcccagcctggcgccgcgccgggtcccggagccccgggcgcgaacatggggaatgcgcactccaaaagcggggacaggcacagcgcgctccccggccgccccgagctgtctttttacggctctttccccaggaaatggagcgagaacgtcttcttggataacgagctgctgacctccaagatcctgtctgtgctgcggccgcagtcggagcggggcttccgcgccggggacctccgctacccgacccactttctcagcaccaactctgtccttgcctctgtcacagcctcgctcaaggagcacccccggggcaccctcctgtccgatggcagcccggccctgtccaggaatgtcggtatgacggtctctcagaaagggggtccccagccaacaccgagcccggctggccctgggacgcaactcggaccaatcacaggagagatggatgaagccgattctgcgtttttaaaatttaagcagacagctgatgactctctgtcccttacatctccaaacaccgagtccatttttgtagaagatccctacaccgcctcgctgaggagtgagattgagtcagacggccacgagtttgaagctgagtcctggagcctcgccgtggatgcagcctacgccaagaagcaaaagagggaggtggtgaaaagacaagatgtcctttatgagctgatgcagacagaggtgcaccacgtgcggacgctcaagatcatgctgaaggtgtactccagggccctgcaggaggagctgcagttcagcagcaaggccattggccgcctcttcccatgcgctgacgacctgctggagacgcacagccacttcctcgctcggctcaaggagcgccgccaggagtccctggaggagggcagtgaccggaattatgtcatccagaaaatcggcgacctcctggttcagcagttttcaggtgaaaatggggagagaatgaaagaaaagtacggtgtgttttgtagtggccacaatgaagctgttagtcattacaagttgctgcttcagcaaaacaagaaatttcaaaacttgatcaagaaaattggcaacttctccatcgtgcggcggcttggcgtgcaggagtgcattctcctggttacacaacgcataaccaaatacccagtgctggtggagcgcatcatccagaacacggaagctggcactgaggactatgaagacctgacccaggccttgaacctcatcaaagatatcatctcacaagtggacgccaaggtcagtgagtgtgagaagggccagcgcctcagggagatcgcagggaagatggacctgaagtcttccagcaaactcaagaacgggctcaccttccgcaaggaagacatgcttcagcggcagctccacctggagggcatgctatgctggaagaccacatcagggcgcttgaaagatatcctggctatcctgctgaccgacgtacttttgctgctacaagaaaaagatcagaaatacgtctttgcttctgtggactcaaagccacccgtcatctcgttacaaaagctcatcgtgagggaagtggccaacgaggagaaagcgatgtttctgatcagcgcctccttgcaagggccggagatgtatgaaatctacacgagctccaaagaggacaggaacgcctggatggcccacatccaaagggctgtggagagctgccctgacgaggaggaggggcccttcagcctgcccgaagaggaaaggaaggtggtcgaggcccgcgccacgagactccgggactttcaagagcggttgagcatgaaagaccagctgatcgcacagagcctcctagagaaacagcagatctacctggagatggccgagatgggcggcctcgaagacctgccccagccccgaggcctattccgtggaggggacccatccgagaccctgcagggggagctaattctcaagtcggccatgagcgagatcgagggcatccagagcctgatctgcaggcagctgggcagcgccaacggccaggcggaagacggaggcagctccacaggcccgcccaggagggctgagaccttcgcgggctacgactgcacaaacagccccaccaagaatggcagtttcaagaagaaagtcagcagcactgaccccaggccccgagactggcgaggccccccaaacagcccggacttgaagctcagtgacagtgacattcctgggagctctgaggaatcgccgcaggtggtggaggcgccaggcacggaatccgatccccgtctgcccaccgtcctggagtcggagcttgtccagcggatccagacactgtcccagctgctcctgaaccttcaggcggtaatcgcccaccaggacagctatgtggagacgcagcgggctgccatccaggagcgggagaagcagttccggctgcagtcgacgcgtgggaacctgctgctggagcaggagcggcaacgcaacttcgagaagcagcgggaggagcgcgcggccctggagaagctgcagagccagctgcggcacgagcagcagcgctgggagcgcgagcgccagtggcagcaccaggagctggagcgtgcgggcgcgcggctgcaggagcgcgagggcgaggcgcggcagctacgcgagcggctggagcaggagcgggccgagctggagcgccagcgccaggcctaccagcacgacctggagcggctgcgcgaggcccagcgtgccgtggagcgcgagcgggagcgcctggagctgctgcgccgcctcaagaagcagaacaccgcgccaggcgcgctgccgcccgacacactggccgaggcccagcccccaagccaccctcccagcttcaacggggaagggctggagggccctcgtgtgagcatgctgccatccggcgtggggccagagtacgcagagcgccccgaggtggctcgccgggacagcgcccccaccgagaaccggctggccaagagcgatgtgcccatccagctgctcagcgccaccaaccagttccagaggcaggcggccgtgcagcagcagatccccaccaagctggcggcctccaccaagggtggcaaggacaagggcggcaagagcaggggctctcagcgctgggagagctcagcgtccttcgacctgaagcagcagctgctgctcaacaagctcatggggaaagatgagagcacctcacggaaccgccgctcgctgagccctatcctgcccggcagacacagtcctgcgcccccaccagaccctggcttccccgccccgagcccaccgccagctgacagcccctccgagggcttctctctcaaggccgggggcacagccctcctgcccgggcccccagctccctcgccactgccggccacaccactcagcgccaaggaggacgccagcaaagaagacgtcatcttcttctaaaagggccgtgactcaaggaaagtttttaatggaaagttgagccagaactaaaccagggagctgtctgaaatcatagcaccccatccgggtggcggggagatcaactccgagctgtttttccgaggcagtgaggaacggtgccggctctgcacggagctgaggacaggacagaccttgctttgagaaggagctgccggccggggccacgctccacagccgccgcgcgacagtggagccaagggttagggcaccaggaggggccaggtggcgtcggcagcatctgtccccagaatcaggcagaatccacttcccaaacagagccccacgcaggttcaccatgaacctcagggtcagggaatgagccaggcacgggggcatgggcagagagggccacggggcagggcccactgagggaacatcagtggccctccagtcaggttctgtgggtttggaagcccatcgtgaaaggggctgacctttgcccctttttacttggcattggttttgaaaccagctgtttcccaaactctgcttcccaagggcaaccgttgctgttcacacgctcagcctgtctgggggagcgggcctctagcttcagccagggcgggtacacaccctgggcacagggtcctcagcccccgggaaatgagctcccagggctggcgtcccaccttccaggtgggggctggcacatcacagactgtcgagagcgccatgtcccagggcatgcagaggatgcacctagagacgttgcagcaagtggacaagtggccgctgtgcgggcccctcgcttgtagtgagctgttgcagcttacggtccgttccctggaggggtggaggaaggaggtgttgggcagcatcaaaggtgctgggacatcccagggtggtgagatccatccacgatccagctccggtggagaaagggcccatgtcaagccttgttctgcaccccaagcattggtggtaggactgggtcctggctgatcgtccttgttcccagtggggtacatgtgagcccctgccagggccaagtccttctcccgaacccagggtcctgggaactgcagatcccggggggattcagcccttctcccactgtgctggcagaggcactcctgtgacgctgaatacagtgaacagggacattcccgccactcggggacagatgggcacaagggaggggaaactccatcaggaagtgctcccctgggcagaggcgcccactgggtgctgtgggctcaggagggggcggggcaggagctggtgccaaccgggaaccagagccccacagccatacagcccattggtgacaaggtcctgagaacacagtggccaggtgtccccaggctcctggcccctccgacgacctcaactctgcccagcccggtccctggccatcagcgacgctgtccgccccccgtcagatcccatgtgtgccatgtttatcatcagtgttttgtatttttgtactgagtatcggagcactttacagaagctgactgtacattcctgttctgttgtgaagagaacattcccagaccctggcaccctcctgagccggcgtgtgccggtccagccctccgagatgccacaattccttggatgggggagaagttcaaggaatttctgctcggccacgcggtgggaaccccgcgtccccgccatgtggcagaggggtctcagtcgtgctaggcatcgggcggcagcgccgacagcccttccctcgccagtgcccctcggccactcctgggttggagcccgattttatttgtaaagttgacagtcgagcaaatgttcctattttcgtgggatctgcacacgtctttgtcagttgtggtcatgatcttagtcacctgctaattatttttacaatgattacaacatttcctcactgcgggatatttctgacccgctttagaacttaagacctgattctagcaataaacgtgtccgagatg

SEQ ID NO: 176012 - DNA, 4616 bp, Homo sapiens
  Payload ID: 14555
  Gene Symbol: ARHGEF18
  Gene Name: Rho/Rac guanine nucleotide exchange factor (GEF) 18
  ENST ID: ENST00000594665
  CDS Start-End: 1-2437
gagaatgaaagaaaagtacggtgtgttttgtagtggccacaatgaagctgttagtcattacaagttgctgcttcagcaaaacaagaaatttcaaaacttgatcaagaaaattggcaacttctccatcgtgcggcggcttggcgtgcaggagtgcattctcctggttacacaacgcataaccaaatacccagtgctggtggagcgcatcatccagaacacggaagctggcactgaggactatgaagacctgacccaggccttgaacctcatcaaagatatcatctcacaagtggacgccaaggtcagtgagtgtgagaagggccagcgcctcagggagatcgcagggaagatggacctgaagtcttccagcaaactcaagaacgggctcaccttccgcaaggaagacatgcttcagcggcagctccacctggagggcatgctatgctggaagaccacatcagggcgcttgaaagatatcctggctatcctgctgaccgacgtacttttgctgctacaagaaaaagatcagaaatacgtctttgcttctgtggactcaaagccacccgtcatctcgttacaaaagctcatcgtgagggaagtggccaacgaggagaaagcgatgtttctgatcagcgcctccttgcaagggccggagatgtatgaaatctacacgagctccaaagaggacaggaacgcctggatggcccacatccaaagggctgtggagagctgccctgacgaggaggaggggcccttcagcctgcccgaagaggaaaggaaggtggtcgaggcccgcgccacgagactccgggactttcaagagcggttgagcatgaaagaccagctgatcgcacagagcctcctagagaaacagcagatctacctggagatggccgagatgggcggcctcgaagacctgccccagccccgaggcctattccgtggaggggacccatccgagaccctgcagggggagctaattctcaagtcggccatgagcgagatcgagggcatccagagcctgatctgcaggcagctgggcagcgccaacggccaggcggaagacggaggcagctccacaggcccgcccaggagggctgagaccttcgcgggctacgactgcacaaacagccccaccaagaatggcagtttcaagaagaaagtcagcagcactgaccccaggccccgagactggcgaggccccccaaacagcccggacttgaagctcagtgacagtgacattcctgggagctctgaggaatcgccgcaggtggtggaggcgccaggcacggaatccgatccccgtctgcccaccgtcctggagtcggagcttgtccagcggatccagacactgtcccagctgctcctgaaccttcaggacagctatgtggagacgcagcgggctgccatccaggagcgggagaagcagttccggctgcagtcgacgcgtgggaacctgctgctggagcaggagcggcaacgcaacttcgagaagcagcgggaggagcgcgcggccctggagaagctgcagagccagctgcggcacgagcagcagcgctgggagcgcgagcgccagtggcagcaccaggagctggagcgtgcgggcgcgcggctgcaggagcgcgagggcgaggcgcggcagctacgcgagcggctggagcaggagcgggccgagctggagcgccagcgccaggcctaccagcacgacctggagcggctgcgcgaggcccagcgtgccgtggagcgcgagcgggagcgcctggagctgctgcgccgcctcaagaagcagaacaccgcgccaggcgcgctgccgcccgacacactggccgaggcccagcccccaagccaccctcccagcttcaacggggaagggctggagggccctcgtgtgagcatgctgccatccggcgtggggccagagtacgcagagcgccccgaggtggctcgccgggacagcgcccccaccgagaaccggctggccaagagcgatgtgcccatccagctgctcagcgccaccaaccagttccagaggcaggcggccgtgcagcagcagatccccaccaagctggcggcctccaccaagggtggcaaggacaagggcggcaagagcaggggctctcagcgctgggagagctcagcgtccttcgacctgaagcagcagctgctgctcaacaagctcatggggaaagatgagagcacctcacggaaccgccgctcgctgagccctatcctgcccggcagacacagtcctgcgcccccaccagaccctggcttccccgccccgagcccaccgccagctgacagcccctccgagggcttctctctcaaggccgggggcacagccctcctgcccgggcccccagctccctcgccactgccggccacaccactcagcgccaaggaggacgccagcaaagaagacgtcatcttcttctaaaagggccgtgactcaaggtgcaaggcccctccctgccctgcccacccttcctgctctctggggacccccatggggtcaccatgcccacccagctgtcccctcctcttccctagcaaaccactgatgaccgcctggcaggggccagcctgtcggtgctctgggccttgcagctgtttctgtagggttagcggtggtgccggggtcactttctgaatctctttttttttttttcaaaaaggaaagtttttaatggaaagttgagccagaactaaaccagggagctgtctgaaatcatagcaccccatccgggtggcggggagatcaactccgagctgtttttccgaggcagtgaggaacggtgccggctctgcacggagctgaggacaggacagaccttgctttgagaaggagctgccggccggggccacgctccacagccgccgcgcgacagtggagccaagggttagggcaccaggaggggccaggtggcgtcggcagcatctgtccccagaatcaggcagaatccacttcccaaacagagccccacgcaggttcaccatgaacctcagggtcagggaatgagccaggcacgggggcatgggcagagagggccacggggcagggcccactgagggaacatcagtggccctccagtcaggttctgtgggtttggaagcccatcgtgaaaggggctgacctttgcccctttttacttggcattggttttgaaaccagctgtttcccaaactctgcttcccaagggcaaccgttgctgttcacacgctcagcctgtctgggggagcgggcctctagcttcagccagggcgggtacacaccctgggcacagggtcctcagcccccgggaaatgagctcccagggctggcgtcccaccttccaggtgggggctggcacatcacagactgtcgagagcgccatgtcccagggcatgcagaggatgcacctagagacgttgcagcaagtggacaagtggccgctgtgcgggcccctcgcttgtagtgagctgttgcagcttacggtccgttccctggaggggtggaggaaggaggtgttgggcagcatcaaaggtgctgggacatcccagggtggtgagatccatccacgatccagctccggtggagaaagggcccatgtcaagccttgttctgcaccccaagcattggtggtaggactgggtcctggctgatcgtccttgttcccagtggggtacatgtgagcccctgccagggccaagtccttctcccgaacccagggtcctgggaactgcagatcccggggggattcagcccttctcccactgtgctggcagaggcactcctgtgacgctgaatacagtgaacagggacattcccgccactcggggacagatgggcacaagggaggggaaactccatcaggaagtgctcccctgggcagaggcgcccactgggtgctgtgggctcaggagggggcggggcaggagctggtgccaaccgggaaccagagccccacagccatacagcccattggtgacaaggtcctgagaacacagtggccaggtgtccccaggctcctggcccctccgacgacctcaactctgcccagcccggtccctggccatcagcgacgctgtccgccccccgtcagatcccatgtgtgccatgtttatcatcagtgttttgtatttttgtactgagtatcggagcactttacagaagctgactgtacattcctgttctgttgtgaagagaacattcccagaccctggcaccctcctgagccggcgtgtgccggtccagccctccgagatgccacaattccttggatgggggagaagttcaaggaatttctgctcggccacgcggtgggaaccccgcgtccccgccatgtggcagaggggtctcagtcgtgctaggcatcgggcggcagcgccgacagcccttccctcgccagtgcccctcggccactcctgggttggagcccgattttatttgtaaagttgacagtcgagcaaatgttcctattttcgtgggatctgcacacgtctttgtcagttgtggtcatgatcttagtcacctgctaattatttttacaatgattacaacatttcctcactgcgggatatttctgacccgctttagaacttaagacctgattctagcaataaacgtgtccgagatg

SEQ ID NO: 176013 - DNA, 582 bp, Homo sapiens
  Payload ID: 14555
  Gene Symbol: ARHGEF18
  Gene Name: Rho/Rac guanine nucleotide exchange factor (GEF) 18
  ENST ID: ENST00000599752
  CDS Start-End: 323-582
actgtggatctgggggggccggacggaggcatcggaggcggctgcgagagtggcagaggagctggcggagagcggcctgcgggcgatcgggccgaggaaatggagcgagaacgtcttcttggataacgagctgctgacctccaagatcctgtctgtgctgcggccgcagtcggagcggggcttccgcgccggggacctccgctacccgacccactttctcagcaccaactctgtccttgcctctgtcacagcctcgctcaaggagcacccccggggcaccctcctgtccgatggcagcccggccctgtccaggaatgtcggtatgacggtctctcagaaagggggtccccagccaacaccgagcccggctggccctgggacgcaactcggaccaatcacaggagagatggatgaagccgattctgcgtttttaaaatttaagcagacagctgatgactctctgtcccttacatctccaaacaccgagtccatttttgtagaagatccctacaccgcctcgctgaggagtgagattgagtcagacggccacgagtttgaagctgagtcctggagcctcgccgt

SEQ ID NO: 176014 - DNA, 2958 bp, Homo sapiens
  Payload ID: 14556
  Gene Symbol: ARHGEF2
  Gene Name: Rho/Rac guanine nucleotide exchange factor (GEF) 2
  Uniprot ID: Q92974
  ENST ID: ENST00000313667
  CDS Start-End: 1-2958
atgtctcggatcgaatccctcacgcgggcgcggatcgaccggagcagagagctggcgagcaagacccgggaaaaggagaagatgaaggaagccaaggatgcccgctataccaatgggcacctcttcaccaccatttcagtttcaggcatgaccatgtgctatgcctgtaacaagagcatcacagccaaggaagccctcatctgcccaacctgcaatgtgactatccacaaccgctgtaaagacaccctcgccaactgtaccaaggtcaagcagaagcaacagaaagcggccctgctgaagaacaacaccgccttgcagtccgtttctcttcgaagtaagacaaccatccgggagcggccaagctcggccatctacccctccgacagcttccggcagtccctcctgggctcccgccgtggccgctcctccttgtctttagccaagagtgtttctaccaccaacattgctggacatttcaatgatgagtctcccctggggctgcgccggatcctctcacagtccacagactccctcaacatgcggaaccgaaccctatccgtggaatccctcattgacgaagaggtaatctacagtgagctgatgagtgactttgagatggatgagaaggactttgcagctgactcttggagtcttgctgtggacagcagcttcctgcagcagcataaaaaggaggtgatgaagcagcaagatgtcatctatgagctaatccagacagagctgcaccatgtgaggacactgaagatcatgacccgcctcttccgcacggggatgctggaagagctacacttggagccaggagtggtccagggcctgttcccctgcgtggacgagctcagtgacatccatacacgcttcctcagccagctattagaacgccgacgccaggccctgtgccctggcagcacccggaactttgtcatccatcgcttgggtgatctgctcatcagccagttctcaggtcctagtgcggagcagatgtgtaagacctactcggagttctgcagccgccacagcaaggccttaaagctctataaggagctgtacgcccgagacaaacgcttccagcaattcatccggaaagtgacccgccccgccgtgctcaagcggcacggggtacaggagtgcatcctgctggtgactcagcgcatcaccaagtacccgttactcatcagccgcatcctgcagcattcccacgggatcgaggaggagcgccaggacctgaccacagcactggggctagtgaaggagctgctgtccaatgtggacgagggtatttatcagctggagaaaggggcccgtctgcaggagatctacaaccgcatggaccctcgggcccaaaccccagtgcctggcaagggcccctttggccgagaggaacttctgaggcgcaaactcatccacgatggctgcctgctctggaagacagcgacggggcgcttcaaagatgtgctagtgctgctgatgacagatgtactggtgtttctccaggaaaaggaccagaagtacatctttcctaccctggacaagccttcagtggtatcgctgcagaatctaatcgtacgagacattgccaaccaggagaaagggatgtttctgatcagcgcagccccacctgagatgtacgaggtgcacacagcatcccgggatgaccggagcacctggatccgggtcattcagcagagcgtgcgcacatgcccatccagggaggacttccccctgattgagacagaggatgaggcttacctgcggcgaattaagatggagttgcagcagaaggaccgggcactggtggagctgctgcgagagaaggtcgggctgtttgctgagatgacccatttccaggccgaagaggatggtggcagtgggatggccctgcccaccctgcccaggggccttttccgctctgagtcccttgagtcccctcgtggcgagcggctgctgcaggatgccatccgtgaggtggagggtctgaaagacctgctggtggggccaggagtggaactgctcttgacaccccgagagccagccctgcccttggaaccagacagcggtggtaacacgagtcctggggtcactgccaatggtgaggccagaaccttcaatggctccattgaactctgcagagctgactcagactctagccagagggatcgaaatggaaatcagctgagatcaccgcaagaggaggcgttacagcgattggtcaatctctatggacttctacatggcctacaggcagctgtggcccagcaggacactctgatggaagcccggttccctgagggccctgagcggcgggagaagctgtgccgagccaactctcgggatggggaggctggcagggctggggctgcccctgtggcccctgaaaagcaggccacggaactggcattactgcagcggcaacatgcgctgctgcaggaggagctacggcgctgccggcggctaggtgaagaacgggcaaccgaagctggcagcctggaggcccggctccgggagagtgagcaggcccgggcactgctggagcgtgaggccgaagaggctcgaaggcagctggccgccctgggccagaccgagccactcccagctgaggccccctgggcccgcagacctgtggatcctcggcggcgcagcctccccgcaggcgatgccctgtacttgagtttcaaccccccacagcccagccgaggcactgaccgcctggatctacctgtcactactcgctctgtccatcgaaactttgaggaccgagagaggcaggaactggggagccccgaagagcggctgcaagacagcagtgaccctgacactggcagcgaggaggaaggtagcagccgtctgtctccgccccacagtccacgagactttaccagaatgcaggacatcccggaggagacggagagccgcgacggggaggctgtagcctccgagagctaa

SEQ ID NO: 176015 - DNA, 4080 bp, Homo sapiens
  Payload ID: 14556
  Gene Symbol: ARHGEF2
  Gene Name: Rho/Rac guanine nucleotide exchange factor (GEF) 2
  Uniprot ID: Q92974
  ENST ID: ENST00000313695
  CDS Start-End: 113-2989
gggatcccgggagggagcggagcggacctgggcttggtcgcctccaagccggcgggaccgagtgctttaggccgcttgaaagaaagttgctccgacccgggaaaaggagaagatgaaggaagccaaggatgcccgctataccaatgggcacctcttcaccaccatttcagtttcaggcatgaccatgtgctatgcctgtaacaagagcatcacagccaaggaagccctcatctgcccaacctgcaatgtgactatccacaaccgctgtaaagacaccctcgccaactgtaccaaggtcaagcagaagcaacagaaagcggccctgctgaagaacaacaccgccttgcagtccgtttctcttcgaagtaagacaaccatccgggagcggccaagctcggccatctacccctccgacagcttccggcagtccctcctgggctcccgccgtggccgctcctccttgtctttagccaagagtgtttctaccaccaacattgctggacatttcaatgatgagtctcccctggggctgcgccggatcctctcacagtccacagactccctcaacatgcggaaccgaaccctatccgtggaatccctcattgacgaagaggtaatctacagtgagctgatgagtgactttgagatggatgagaaggactttgcagctgactcttggagtcttgctgtggacagcagcttcctgcagcagcataaaaaggaggtgatgaagcagcaagatgtcatctatgagctaatccagacagagctgcaccatgtgaggacactgaagatcatgacccgcctcttccgcacggggatgctggaagagctacacttggagccaggagtggtccagggcctgttcccctgcgtggacgagctcagtgacatccatacacgcttcctcagccagctattagaacgccgacgccaggccctgtgccctggcagcacccggaactttgtcatccatcgcttgggtgatctgctcatcagccagttctcaggtcctagtgcggagcagatgtgtaagacctactcggagttctgcagccgccacagcaaggccttaaagctctataaggagctgtacgcccgagacaaacgcttccagcaattcatccggaaagtgacccgccccgccgtgctcaagcggcacggggtacaggagtgcatcctgctggtgactcagcgcatcaccaagtacccgttactcatcagccgcatcctgcagcattcccacgggatcgaggaggagcgccaggacctgaccacagcactggggctagtgaaggagctgctgtccaatgtggacgagggtatttatcagctggagaaaggggcccgtctgcaggagatctacaaccgcatggaccctcgggcccaaaccccagtgcctggcaagggcccctttggccgagaggaacttctgaggcgcaaactcatccacgatggctgcctgctctggaagacagcgacggggcgcttcaaagatgtgctagtgctgctgatgacagatgtactggtgtttctccaggaaaaggaccagaagtacatctttcctaccctggacaagccttcagtggtatcgctgcagaatctaatcgtacgagacattgccaaccaggagaaagggatgtttctgatcagcgcagccccacctgagatgtacgaggtgcacacagcatcccgggatgaccggagcacctggatccgggtcattcagcagagcgtgcgcacatgcccatccagggaggacttccccctgattgagacagaggatgaggcttacctgcggcgaattaagatggagttgcagcagaaggaccgggcactggtggagctgctgcgagagaaggtcgggctgtttgctgagatgacccatttccaggccgaagaggatggtggcagtgggatggccctgcccaccctgcccaggggccttttccgctctgagtcccttgagtcccctcgtggcgagcggctgctgcaggatgccatccgtgaggtggagggtctgaaagacctgctggtggggccaggagtggaactgctcttgacaccccgagagccagccctgcccttggaaccagacagcggtggtaacacgagtcctggggtcactgccaatggtgaggccagaaccttcaatggctccattgaactctgcagagctgactcagactctagccagagggatcgaaatggaaatcagctgagatcaccgcaagaggaggcgttacagcgattggtcaatctctatggacttctacatggcctacaggcagctgtggcccagcaggacactctgatggaagcccggttccctgagggccctgagcggcgggagaagctgtgccgagccaactctcgggatggggaggctggcagggctggggctgcccctgtggcccctgaaaagcaggccacggaactggcattactgcagcggcaacatgcgctgctgcaggaggagctacggcgctgccggcggctaggtgaagaacgggcaaccgaagctggcagcctggaggcccggctccgggagagtgagcaggcccgggcactgctggagcgtgaggccgaagaggctcgaaggcagctggccgccctgggccagaccgagccactcccagctgaggccccctgggcccgcagacctgtggatcctcggcggcgcagcctccccgcaggcgatgccctgtacttgagtttcaaccccccacagcccagccgaggcactgaccgcctggatctacctgtcactactcgctctgtccatcgaaactttgaggaccgagagaggcaggaactggggagccccgaagagcggctgcaagacagcagtgaccctgacactggcagcgaggaggaaggtagcagccgtctgtctccgccccacagtccacgagactttaccagaatgcaggacatcccggaggagacggagagccgcgacggggaggctgtagcctccgagagctaagggggcccctcccccctgccccgtgccccactgaagaacattactgagggggctaaccttggggactccaatttgccaatgatgagggaacatttgaaagaactgcaaattgtccttgccagctcttgggatccttggatacctggggccatttaagaagctaggggaattaggccacaacaccccctgggacatccgaaagctacaccacagatgccagtggttcatgccttcttcccgcaactttaggaaaatttatttatttattgtttattagttatggggggagaggggagatttaaaggaccagggacatgggaaccaagccatagggatcagagggccttgtccttgaacactactggggtatattcaggctcatccacgcagctgctgggttcttgccctaacggccctcccctgcaacatccgtcttggaggagaggctgcagccacagcaccctactgccctttaaataaaggagggctgtgggcagggccatgtccctttctcctctcccctcaacctcttactgctgttctccctttctccgtccttcatggaagccctgggagataacctggcttcctggagttgatggaataaaggttggggtggccataatggtttgttgggggtgagggaaaaaacccacagggaccagaatgttttgttgttcttttgttttcttttttgtaccaaagtcaactgcacgtgttttatatttttaagagatcgtaggcaattagagatcgaagcctcctatctccacatctctgaagaagttgaggggtgggggagagaatgacttctgccttcatctgcagtaacggggggacctatactgacctcttccccagccatttagaaacaagttctagggtgggttggaaaatctccaagagccctgacctcatcttccacctcagcaaccatgacctgaaacctcagcgtgaatttgggggatttttcagtggaacccttgcccccaaatgtcgaccagcccccaaatgtcgaagaattttcttcttgccaattttgttgtttaaaaaaaaaattcagggaaaattaaaaacctggaactccataa

SEQ ID NO: 176016 - DNA, 4149 bp, Homo sapiens
  Payload ID: 14556
  Gene Symbol: ARHGEF2
  Gene Name: Rho/Rac guanine nucleotide exchange factor (GEF) 2
  Uniprot ID: Q92974
  ENST ID: ENST00000361247
  CDS Start-End: 101-3061
gagaccaacgcgtgcgggccgaacccctccccccgccttcccccaacaatacaggacgccggggtccgcgccgcgtcctccctggtccccccgtccgattatgtctcggatcgaatccctcacgcgggcgcggatcgaccggagcagagagctggcgagcaagacccgggaaaaggagaagatgaaggaagccaaggatgcccgctataccaatgggcacctcttcaccaccatttcagtttcaggcatgaccatgtgctatgcctgtaacaagagcatcacagccaaggaagccctcatctgcccaacctgcaatgtgactatccacaaccgctgtaaagacaccctcgccaactgtaccaaggtcaagcagaagcaacagaaagcggccctgctgaagaacaacaccgccttgcagtccgtttctcttcgaagtaagacaaccatccgggagcggccaagctcggccatctacccctccgacagcttccggcagtccctcctgggctcccgccgtggccgctcctccttgtctttagccaagagtgtttctaccaccaacattgctggacatttcaatgatgagtctcccctggggctgcgccggatcctctcacagtccacagactccctcaacatgcggaaccgaaccctatccgtggaatccctcattgacgaagcagaggtaatctacagtgagctgatgagtgactttgagatggatgagaaggactttgcagctgactcttggagtcttgctgtggacagcagcttcctgcagcagcataaaaaggaggtgatgaagcagcaagatgtcatctatgagctaatccagacagagctgcaccatgtgaggacactgaagatcatgacccgcctcttccgcacggggatgctggaagagctacacttggagccaggagtggtccagggcctgttcccctgcgtggacgagctcagtgacatccatacacgcttcctcagccagctattagaacgccgacgccaggccctgtgccctggcagcacccggaactttgtcatccatcgcttgggtgatctgctcatcagccagttctcaggtcctagtgcggagcagatgtgtaagacctactcggagttctgcagccgccacagcaaggccttaaagctctataaggagctgtacgcccgagacaaacgcttccagcaattcatccggaaagtgacccgccccgccgtgctcaagcggcacggggtacaggagtgcatcctgctggtgactcagcgcatcaccaagtacccgttactcatcagccgcatcctgcagcattcccacgggatcgaggaggagcgccaggacctgaccacagcactggggctagtgaaggagctgctgtccaatgtggacgagggtatttatcagctggagaaaggggcccgtctgcaggagatctacaaccgcatggaccctcgggcccaaaccccagtgcctggcaagggcccctttggccgagaggaacttctgaggcgcaaactcatccacgatggctgcctgctctggaagacagcgacggggcgcttcaaagatgtgctagtgctgctgatgacagatgtactggtgtttctccaggaaaaggaccagaagtacatctttcctaccctggacaagccttcagtggtatcgctgcagaatctaatcgtacgagacattgccaaccaggagaaagggatgtttctgatcagcgcagccccacctgagatgtacgaggtgcacacagcatcccgggatgaccggagcacctggatccgggtcattcagcagagcgtgcgcacatgcccatccagggaggacttccccctgattgagacagaggatgaggcttacctgcggcgaattaagatggagttgcagcagaaggaccgggcactggtggagctgctgcgagagaaggtcgggctgtttgctgagatgacccatttccaggccgaagaggatggtggcagtgggatggccctgcccaccctgcccaggggccttttccgctctgagtcccttgagtcccctcgtggcgagcggctgctgcaggatgccatccgtgaggtggagggtctgaaagacctgctggtggggccaggagtggaactgctcttgacaccccgagagccagccctgcccttggaaccagacagcggtggtaacacgagtcctggggtcactgccaatggtgaggccagaaccttcaatggctccattgaactctgcagagctgactcagactctagccagagggatcgaaatggaaatcagctgagatcaccgcaagaggaggcgttacagcgattggtcaatctctatggacttctacatggcctacaggcagctgtggcccagcaggacactctgatggaagcccggttccctgagggccctgagcggcgggagaagctgtgccgagccaactctcgggatggggaggctggcagggctggggctgcccctgtggcccctgaaaagcaggccacggaactggcattactgcagcggcaacatgcgctgctgcaggaggagctacggcgctgccggcggctaggtgaagaacgggcaaccgaagctggcagcctggaggcccggctccgggagagtgagcaggcccgggcactgctggagcgtgaggccgaagaggctcgaaggcagctggccgccctgggccagaccgagccactcccagctgaggccccctgggcccgcagacctgtggatcctcggcggcgcagcctccccgcaggcgatgccctgtacttgagtttcaaccccccacagcccagccgaggcactgaccgcctggatctacctgtcactactcgctctgtccatcgaaactttgaggaccgagagaggcaggaactggggagccccgaagagcggctgcaagacagcagtgaccctgacactggcagcgaggaggaaggtagcagccgtctgtctccgccccacagtccacgagactttaccagaatgcaggacatcccggaggagacggagagccgcgacggggaggctgtagcctccgagagctaagggggcccctcccccctgccccgtgccccactgaagaacattactgagggggctaaccttggggactccaatttgccaatgatgagggaacatttgaaagaactgcaaattgtccttgccagctcttgggatccttggatacctggggccatttaagaagctaggggaattaggccacaacaccccctgggacatccgaaagctacaccacagatgccagtggttcatgccttcttcccgcaactttaggaaaatttatttatttattgtttattagttatggggggagaggggagatttaaaggaccagggacatgggaaccaagccatagggatcagagggccttgtccttgaacactactggggtatattcaggctcatccacgcagctgctgggttcttgccctaacggccctcccctgcaacatccgtcttggaggagaggctgcagccacagcaccctactgccctttaaataaaggagggctgtgggcagggccatgtccctttctcctctcccctcaacctcttactgctgttctccctttctccgtccttcatggaagccctgggagataacctggcttcctggagttgatggaataaaggttggggtggccataatggtttgttgggggtgagggaaaaaacccacagggaccagaatgttttgttgttcttttgttttcttttttgtaccaaagtcaactgcacgtgttttatatttttaagagatcgtaggcaattagagatcgaagcctcctatctccacatctctgaagaagttgaggggtgggggagagaatgacttctgccttcatctgcagtaacggggggacctatactgacctcttccccagccatttagaaacaagttctagggtgggttggaaaatctccaagagccctgacctcatcttccacctcagcaaccatgacctgaaacctcagcgtgaatttgggggatttttcagtggaacccttgcccccaaatgtcgaccagcccccaaatgtcgaagaattttcttcttgccaattttgttgtttaaaaaaaaaattcagggaaaattaaaaacctggaactcca

SEQ ID NO: 176017 - DNA, 1645 bp, Homo sapiens
  Payload ID: 14556
  Gene Symbol: ARHGEF2
  Gene Name: Rho/Rac guanine nucleotide exchange factor (GEF) 2
  ENST ID: ENST00000368315
  CDS Start-End: 1-795
atggccctgcccaccctgcccaggggccttttccgctctgagtcccttgagtcccctcgtggcgagcggctgctgcaggatgccatccgtgaggtggagggtctgaaagacctgctggtggggccaggagtggaactgctcttgacaccccgagagccagccctgcccttggaaccagacagcggtggtaacacgagtcctggggtcactgccaatggtgaggccagaaccttcaatggctccattgaactctgcagagctgactcagactctagccagagggatcgaaatggaaatcagctgagatcaccgcaagaggaggcgttacagcgattggtcaatctctatggacttctacatggcctacaggcagctgtggcccagcaggacactctgatggaagcccggttccctgagggccctgagcggcgggagaagctgtgccgagccaactctcgggatggggaggctggcagggctggggctgcccctgtggcccctgaaaagcaggccacggaactggcattactgcagcggcaacatgcgctgctgcaggaggagctacggcgctgccggcggctaggtgaagaacgggcaaccgaagctggcagcctggaggcccggctccgggagagtgagcaggcccgggcactgctggagcgtgaggccgaagaggctcgaaggcagctggccgccctgggccagaccgagccactcccagctgaggccccctgggcccgcagacctgtggatcctcggcggcgcagctccccgcaggcgatgccctgtacttgagtttcaaccccccacagcccagccgaggcactgaccgcctggatctacctgtcactactcgctctgtccatcgaaactttgaggaccgagagaggcaggaactggggagccccgaagagcggctgcaagacagcagtgaccctgacactggcagcgaggaggaaggtagcagccgtctgtctccgccccacagtccacgagactttaccagaatgcaggacatcccggaggagacggagagccgcgacggggaggctgtagcctccgagagctaagggggcccctcccccctgccccgtgccccactgaagaacattactgagggggctaaccttggggactccaatttgccaatgatgagggaacatttgaaagaactgcaaattgtccttgccagctcttgggatccttggatacctggggccatttaagaagctaggggaattaggccacaacaccccctgggacatccgaaagctacaccacagatgccagtggttcatgccttcttcccgcaactttaggaaaatttatttatttattgtttattagttatggggggagaggggagatttaaaggaccagggacatgggaaccaagccatagggatcagagggccttgtccttgaacactactggggtatattcaggctcatccacgcagctgctgggttcttgccctaacggccctcccctgcaacatccgtcttggaggagaggctgcagccacagcaccctactgccctttaaataaaggagggctgtgggcagggccatgtccctttctcctctcccctcaacctcttactgctgttctccctttctccgtccttcatggaagccctggga

SEQ ID NO: 176018 - DNA, 420 bp, Homo sapiens
  Payload ID: 14556
  Gene Symbol: ARHGEF2
  Gene Name: Rho/Rac guanine nucleotide exchange factor (GEF) 2
  ENST ID: ENST00000423422
  CDS Start-End: 400-420
cccagcaatcagagcctccaggcccaggaggatgaaaagaacatggagacgagaggctccaaatggagtagccctctgccagctcacatccctctttcaggggctgcagcttggacatcccaagactggccaggttacagcccacaggaggcgaggagtgctcccctttacctcaggaagtccgatgtccgccccagctgtcttctgccccagggaaagcagtgaaggaggagactgcaagcatcgggatgcccaggccccaaggaggccctcttcctgcagatccgagaaggactggacacctttctgggactgcagcaccagggtggctacgcctcccggctggatcaggattcctgtcatccatctgctggccctttggaccactcggccactggcatgctttccaagtctgtaccc

SEQ ID NO: 176019 - DNA, 571 bp, Homo sapiens
  Payload ID: 14556
  Gene Symbol: ARHGEF2
  Gene Name: Rho/Rac guanine nucleotide exchange factor (GEF) 2
  ENST ID: ENST00000495070
  CDS Start-End: 321-571
agtttgggtctgggctgtgcttatgccaacaggaagggctgggctgggggcaagcaacagggctgggctgaggcgaggcagtgttcctccctggtgcccgtcactggccactggatacagacggtagtggtggcgatgtgtgtttcaggaggagactgcaagcatcgggatgcccaggccccaaggaggccctcttcctgcagatccgagaaggactggacacctttctgggactgcagcaccagggtggctacgcctcccggctggatcaggattcctgtcatccatctgctggccctttggaccactcggccactggcatgctttccaagtctgtacccgtgagtggcatcaactgtctcttggaccgttcggatacagatgggaatgtatcccagtcctctgccattgacctcaggaaacgctgcagccagctggaaggacattcaggtacccgggtaggctcctccctgcgacagaccttcagcttcctctcgggcatgaccggaaaggccaagacccgggaaaaggagaagatgaaggaagccaaggatgcccgctataccaatgg

SEQ ID NO: 176020 - DNA, 1877 bp, Homo sapiens
  Payload ID: 14556
  Gene Symbol: ARHGEF2
  Gene Name: Rho/Rac guanine nucleotide exchange factor (GEF) 2
  ENST ID: ENST00000470541
  CDS Start-End: 1-791
cgcaagaggaggcgttacagcgattggtcaatctctatggacttctacatggcctacaggcagctgtggcccagcaggacactctgatggaagcccggttccctgagggccctgagcggcgggagaagctgtgccgagccaactctcgggatggggaggctggcagggctggggctgcccctgtggcccctgaaaagcaggccacggaactggcattactgcagcggcaacatgcgctgctgcaggaggagctacggcgctgccggcggctaggtgaagaacgggcaaccgaagctggcagcctggaggcccggctccgggagagtgagcaggcccgggcactgctggagcgtgaggccgaagaggctcgaaggcagctggccgccctgggccagaccgagccactcccagctgaggccccctgggcccgcagacctgtggatcctcggcggcgcagcctccccgcaggcgatgccctgtacttgagtttcaaccccccacagcccagccgaggcactgaccgcctggatctacctgtcactactcgctctgtccatcgaaactttgaggaccgagagaggcaggaactggggagccccgaagagcggctgcaagacagcagtgaccctgacactggcagcgaggaggaaggtagcagccgtctgtctccgccccacagtccacgaggtgagaccctggcggagacatggaccagagactttaccagaatgcaggacatcccggaggagacggagagccgcgacggggaggctgtagcctccgagagctaagggggcccctcccccctgccccgtgccccactgaagaacattactgagggggctaaccttggggactccaatttgccaatgatgagggaacatttgaaagaactgcaaattgtccttgccagctcttgggatccttggatacctggggccatttaagaagctaggggaattaggccacaacaccccctgggacatccgaaagctacaccacagatgccagtggttcatgccttcttcccgcaactttaggaaaatttatttatttattgtttattagttatggggggagaggggagatttaaaggaccagggacatgggaaccaagccatagggatcagagggccttgtccttgaacactactggggtatattcaggctcatccacgcagctgctgggttcttgccctaacggccctcccctgcaacatccgtcttggaggagaggctgcagccacagcaccctactgccctttaaataaaggagggctgtgggcagggccatgtccctttctcctctcccctcaacctcttactgctgttctccctttctccgtccttcatggaagccctgggagataacctggcttcctggagttgatggaataaaggttggggtggccataatggtttgttgggggtgagggaaaaaacccacagggaccagaatgttttgttgttcttttgttttcttttttgtaccaaagtcaactgcacgtgttttatatttttaagagatcgtaggcaattagagatcgaagcctcctatctccacatctctgaagaagttgaggggtgggggagagaatgacttctgccttcatctgcagtaacggggggacctatactgacctcttccccagccatttagaaacaagttctagggtgggttggaaaatctccaagagccctgacctcatcttccacctcagcaaccatgacctgaaacctcagcgtgaatttgggggatttttcagtggaacccttgcccccaaatgtcgaccagcccccaaatgtcgaagaattttcttcttgccaattttgttgtttaaaaaaaaaattcagggaaaattaaaaacctggaactc

SEQ ID NO: 176021 - DNA, 692 bp, Homo sapiens
  Payload ID: 14556
  Gene Symbol: ARHGEF2
  Gene Name: Rho/Rac guanine nucleotide exchange factor (GEF) 2
  ENST ID: ENST00000609707
  CDS Start-End: 158-692
aaagcgctggtgagctggcaccctccgcttcgcctgctctcccctcctctctgcgcatcttccccctagcacagagaagagagtacagcagctcgggggtgagcagagctagggctgggaaggtggagtgaggacgcagagacctagagccagggagatgagtggcaacaggaggcagcccagccgtaggggccagacccgggaaaaggagaagatgaaggaagccaaggatgcccgctataccaatgggcacctcttcaccaccatttcagtttcaggcatgaccatgtgctatgcctgtaacaagagcatcacagccaaggaagccctcatctgcccaacctgcaatgtgactatccacaaccgctgtaaagacaccctcgccaactgtaccaaggtcaagcagaagcaacagaaagcggccctgctgaagaacaacaccgccttgcagtccgtttctcttcgaagtaagacaaccatccgggagcggccaagctcggccatctacccctccgacagcttccggcagtccctcctgggctcccgccgtggccgctcctccttgtctttagccaagagtgtttctaccaccaacattgctggacatttcaatgatgagtctcccctggggctgcgccggatcctctcacagtccacagactccctcaacatgcggaaccgaaccctatccg

SEQ ID NO: 176022 - DNA, 764 bp, Homo sapiens
  Payload ID: 14556
  Gene Symbol: ARHGEF2
  Gene Name: Rho/Rac guanine nucleotide exchange factor (GEF) 2
  ENST ID: ENST00000497907
  CDS Start-End: 122-764
gacggtgctgggatcccgggagggagcggagcggacctgggcttggtcgcctccaagccggcgggaccgagtgctttaggccgcttgaaagaaagttgctccgacccgggaaaaggagaagatgaaggaagccaaggatgcccgctataccaatgggcacctcttcaccaccatttcagtttcaggcatgaccatgtgctatgcctgtaacaagagcatcacagccaaggaagccctcatctgcccaacctgcaatgtgactatccacaaccgctgtaaagacaccctcgccaactgtaccaaggtcaagcagaagcaacagaaagcggccctgctgaagaacaacaccgccttgcagtccgtttctcttcgaagtaagacaaccatccgggagcggccaagctcggccatctacccctccgacagcttccggcagtccctcctgggctcccgccgtggccgctcctccttgtctttagccaagagtgtttctaccaccaacattgctggacatttcaatgatgagtctcccctggggctgcgccggatcctctcacagtccacagactccctcaacatgcggaaccgaaccctatccgtggaatccctcattgacgaagcagaggtaatctacagtgagctgatgagtgactttgagatggatgagaaggactttgcagctgactcttggagtcttgctgtggacagcagcttcctgcagcagcataaaaaggaggtgatgaagcagcaagatgtcatctatg

SEQ ID NO: 176023 - DNA, 4438 bp, Homo sapiens
  Payload ID: 14556
  Gene Symbol: ARHGEF2
  Gene Name: Rho/Rac guanine nucleotide exchange factor (GEF) 2
  ENST ID: ENST00000462460
  CDS Start-End: 256-3351
acattgtaggggctgctggccatggaagggcactgtctctctgctttgacaatggtccccttgaacaagttcctttagctctggaggagactgcaagcatcgggatgcccaggccccaaggaggccctcttcctgcagatccgagaaggactggacacctttctgggactgcagcaccagggtggctacgcctcccggctggatcaggattcctgtcatccatctgctggccctttggaccactcggccactggcatgctttccaagtctgtacccgtgagtggcatcaactgtctcttggaccgttcggatacagatgggaatgtatcccagtcctctgccattgacctcaggaaacgctgcagccagctggaaggacattcaggtacccgggtaggctcctccctgcgacagaccttcagcttcctctcgggcatgaccggaaaggccaagacccgggaaaaggagaagatgaaggaagccaaggatgcccgctataccaatgggcacctcttcaccaccatttcagtttcaggcatgaccatgtgctatgcctgtaacaagagcatcacagccaaggaagccctcatctgcccaacctgcaatgtgactatccacaaccgctgtaaagacaccctcgccaactgtaccaaggtcaagcagaagcaacagaaagcggccctgctgaagaacaacaccgccttgcagtccgtttctcttcgaagtaagacaaccatccgggagcggccaagctcggccatctacccctccgacagcttccggcagtccctcctgggctcccgccgtggccgctcctccttgtctttagccaagagtgtttctaccaccaacattgctggacatttcaatgatgagtctcccctggggctgcgccggatcctctcacagtccacagactccctcaacatgcggaaccgaaccctatccgtggaatccctcattgacgaagcagaggtaatctacagtgagctgatgagtgactttgagatggatgagaaggactttgcagctgactcttggagtcttgctgtggacagcagcttcctgcagcagcataaaaaggaggtgatgaagcagcaagatgtcatctatgagctaatccagacagagctgcaccatgtgaggacactgaagatcatgacccgcctcttccgcacggggatgctggaagagctacacttggagccaggagtggtccagggcctgttcccctgcgtggacgagctcagtgacatccatacacgcttcctcagccagctattagaacgccgacgccaggccctgtgccctggcagcacccggaactttgtcatccatcgcttgggtgatctgctcatcagccagttctcaggtcctagtgcggagcagatgtgtaagacctactcggagttctgcagccgccacagcaaggccttaaagctctataaggagctgtacgcccgagacaaacgcttccagcaattcatccggaaagtgacccgccccgccgtgctcaagcggcacggggtacaggagtgcatcctgctggtgactcagcgcatcaccaagtacccgttactcatcagccgcatcctgcagcattcccacgggatcgaggaggagcgccaggacctgaccacagcactggggctagtgaaggagctgctgtccaatgtggacgagggtatttatcagctggagaaaggggcccgtctgcaggagatctacaaccgcatggaccctcgggcccaaaccccagtgcctggcaagggcccctttggccgagaggaacttctgaggcgcaaactcatccacgatggctgcctgctctggaagacagcgacggggcgcttcaaagatgtgctagtgctgctgatgacagatgtactggtgtttctccaggaaaaggaccagaagtacatctttcctaccctggacaagccttcagtggtatcgctgcagaatctaatcgtacgagacattgccaaccaggagaaagggatgtttctgatcagcgcagccccacctgagatgtacgaggtgcacacagcatcccgggatgaccggagcacctggatccgggtcattcagcagagcgtgcgcacatgcccatccagggaggacttccccctgattgagacagaggatgaggcttacctgcggcgaattaagatggagttgcagcagaaggaccgggcactggtggagctgctgcgagagaaggtcgggctgtttgctgagatgacccatttccaggccgaagaggatggtggcagtgggatggccctgcccaccctgcccaggggccttttccgctctgagtcccttgagtcccctcgtggcgagcggctgctgcaggatgccatccgtgaggtggagggtctgaaagacctgctggtggggccaggagtggaactgctcttgacaccccgagagccagccctgcccttggaaccagacagcggtggtaacacgagtcctggggtcactgccaatggtgaggccagaaccttcaatggctccattgaactctgcagagctgactcagactctagccagagggatcgaaatggaaatcagctgagatcaccgcaagaggaggcgttacagcgattggtcaatctctatggacttctacatggcctacaggcagctgtggcccagcaggacactctgatggaagcccggttccctgagggccctgagcggcgggagaagctgtgccgagccaactctcgggatggggaggctggcagggctggggctgcccctgtggcccctgaaaagcaggccacggaactggcattactgcagcggcaacatgcgctgctgcaggaggagctacggcgctgccggcggctaggtgaagaacgggcaaccgaagctggcagcctggaggcccggctccgggagagtgagcaggcccgggcactgctggagcgtgaggccgaagaggctcgaaggcagctggccgccctgggccagaccgagccactcccagctgaggccccctgggcccgcagacctgtggatcctcggcggcgcagcctccccgcaggcgatgccctgtacttgagtttcaaccccccacagcccagccgaggcactgaccgcctggatctacctgtcactactcgctctgtccatcgaaactttgaggaccgagagaggcaggaactggggagccccgaagagcggctgcaagacagcagtgaccctgacactggcagcgaggaggaaggtagcagccgtctgtctccgccccacagtccacgagactttaccagaatgcaggacatcccggaggagacggagagccgcgacggggaggctgtagcctccgagagctaagggggcccctcccccctgccccgtgccccactgaagaacattactgagggggctaaccttggggactccaatttgccaatgatgagggaacatttgaaagaactgcaaattgtccttgccagctcttgggatccttggatacctggggccatttaagaagctaggggaattaggccacaacaccccctgggacatccgaaagctacaccacagatgccagtggttcatgccttcttcccgcaactttaggaaaatttatttatttattgtttattagttatggggggagaggggagatttaaaggaccagggacatgggaaccaagccatagggatcagagggccttgtccttgaacactactggggtatattcaggctcatccacgcagctgctgggttcttgccctaacggccctcccctgcaacatccgtcttggaggagaggctgcagccacagcaccctactgccctttaaataaaggagggctgtgggcagggccatgtccctttctcctctcccctcaacctcttactgctgttctccctttctccgtccttcatggaagccctgggagataacctggcttcctggagttgatggaataaaggttggggtggccataatggtttgttgggggtgagggaaaaaacccacagggaccagaatgttttgttgttcttttgttttcttttttgtaccaaagtcaactgcacgtgttttatatttttaagagatcgtaggcaattagagatcgaagcctcctatctccacatctctgaagaagttgaggggtgggggagagaatgacttctgccttcatctgcagtaacggggggacctatactgacctcttccccagccatttagaaacaagttctagggtgggttggaaaatctccaagagccctgacctcatcttccacctcagcaaccatgacctgaaacctcagcgtgaatttgggggatttttcagtggaacccttgcccccaaatgtcgaccagcccccaaatgtcgaagaattttcttcttgccaattttgttgtttaaaaaaaaaattcagggaaaattaaaaacctggaactcc

SEQ ID NO: 176024 - DNA, 892 bp, Homo sapiens
  Payload ID: 14556
  Gene Symbol: ARHGEF2
  Gene Name: Rho/Rac guanine nucleotide exchange factor (GEF) 2
  ENST ID: ENST00000471589
  CDS Start-End: 206-892
gatccagcgtttagttctcctttgatttcctctccctctggccacccctgcccccaatcgtaaaaggggtcagtctgctcaggcctgctttgatgggaccccgaaggccaggaaggaactggtcctgggttttctaagagctgggggcggatggaattctcctgcctgcgggtctttaaagactgagacccgggaaaaggagaagatgaaggaagccaaggatgcccgctataccaatgggcacctcttcaccaccatttcagtttcaggcatgaccatgtgctatgcctgtaacaagagcatcacagccaaggaagccctcatctgcccaacctgcaatgtgactatccacaaccgctgtaaagacaccctcgccaactgtaccaaggtcaagcagaagcaacagaaagcggccctgctgaagaacaacaccgccttgcagtccgtttctcttcgaagtaagacaaccatccgggagcggccaagctcggccatctacccctccgacagcttccggcagtccctcctgggctcccgccgtggccgctcctccttgtctttagccaagagtgtttctaccaccaacattgctggacatttcaatgatgagtctcccctggggctgcgccggatcctctcacagtccacagactccctcaacatgcggaaccgaaccctatccgtggaatccctcattgacgaagcagaggtaatctacagtgagctgatgagtgactttgagatggatgagaaggactttgcagctgactcttggagtcttgctgtggacagcagcttcctgcagcagcataaaaaggaggtgatgaagcagcaagatgtcatctatgagctaatccagacagagctgcaccatgtgaggacactgaagatc

SEQ ID NO: 176025 - DNA, 372 bp, Homo sapiens
  Payload ID: 14556
  Gene Symbol: ARHGEF2
  Gene Name: Rho/Rac guanine nucleotide exchange factor (GEF) 2
  ENST ID: ENST00000470874
  CDS Start-End: 1-180
caacagaaagcggccctgctgaagaacaacaccgccttgcagtccgtttctcttcgaagtaagaacatttcaatgatgagtctcccctggggctgcgccggatcctctcacagtccacagactccctcaacatgcggaaccgaaccctatccgtggaatccctcattgacgaagaggtaatctacagtgagctgatgagtgactttgagatggatgagaaggactttgcagctgactcttggagtcttgctgtggacagcagcttcctgcagcagcataaaaaggaggtgatgaagcagcaagatgtcatctatgagctaatccagacagagctgcaccatgtgaggacactgaagatcatgacccgcctct

SEQ ID NO: 176026 - DNA, 9484 bp, Homo sapiens
  Payload ID: 14557
  Gene Symbol: ROCK1
  Gene Name: Rho-associated, coiled-coil containing protein kinase 1
  Uniprot ID: Q13464
  ENST ID: ENST00000399799
  CDS Start-End: 942-5006
gctggttccccttccgagcgtccgcgccccgcatgcgcagtctgccccggcggtctccgtttgtttgaacaggaaggcggacatattagtccctctcagcccccctcgccccaccccccaggcattcgccgccgcgactcgccctttccccggctgggaccgcagcccctcccagaagctcccccatcagcagccgccgggacccaactatcgtcttcctcttcgcccgctctccagcctttcctctgctaagtctccatcgggcatcgacctcgccctgccccaccggacaccgtagcagcagccccagcagcgacgggacaaaatgggagagtgaggctgtcctgcgtggaccagctcgtggccgagactgatcggtgcgtcgggccgggccgagtagagccggggacgcggggctagaccgtctacagcgcctctgagcggagcgggcccggcccgtggcccgagcggcggccgcagctggcacagctcctcacccgccctttgctttcgcctttcctcttctccctcccttgttgcccggagggagtctccaccctgcttctctttctctacccgctcctgcccatctcgggacggggacccctccatggcgacggcggccggggcccgctagactgaagcacctcgccggagcgacgaggctggtggcgacggcgctgtcggctgtcgtgaggggctgccgggtgggatgcgactttgggcgtccgagcggctgtgggtcgctgttgcccccggcccggggtctggagagcggaggtcccctcagtgaggggaagacgggggaaccgggcgcacctggtgaccctgaggttccggctcctccgccccgcggctgcgaacccaccgcggaggaagttggttgaaattgctttccgctgctggtgctggtaagagggcattgtcacagcagcagcaacatgtcgactggggacagttttgagactcgatttgaaaaaatggacaacctgctgcgggatcccaaatcggaagtgaattcggattgtttgctggatggattggatgctttggtatatgatttggattttcctgccttaagaaaaaacaaaaatattgacaactttttaagcagatataaagacacaataaataaaatcagagatttacgaatgaaagctgaagattatgaagtagtgaaggtgattggtagaggtgcatttggagaagttcaattggtaaggcataaatccaccaggaaggtatatgctatgaagcttctcagcaaatttgaaatgataaagagatctgattctgcttttttctgggaagaaagggacatcatggcttttgccaacagtccttgggttgttcagcttttttatgcattccaagatgatcgttatctctacatggtgatggaatacatgcctggtggagatcttgtaaacttaatgagcaactatgatgtgcctgaaaaatgggcacgattctatactgcagaagtagttcttgcattggatgcaatccattccatgggttttattcacagagatgtgaagcctgataacatgctgctggataaatctggacatttgaagttagcagattttggtacttgtatgaagatgaataaggaaggcatggtacgatgtgatacagcggttggaacacctgattatatttcccctgaagtattaaaatcccaaggtggtgatggttattatggaagagaatgtgactggtggtcggttggggtatttttatacgaaatgcttgtaggtgatacacctttttatgcagattctttggttggaacttacagtaaaattatgaaccataaaaattcacttacctttcctgatgataatgacatatcaaaagaagcaaaaaaccttatttgtgccttccttactgacagggaagtgaggttagggcgaaatggtgtagaagaaatcaaacgacatctcttcttcaaaaatgaccagtgggcttgggaaacgctccgagacactgtagcaccagttgtacccgatttaagtagtgacattgatactagtaattttgatgacttggaagaagataaaggagaggaagaaacattccctattcctaaagctttcgttggcaatcaactaccttttgtaggatttacatattatagcaatcgtagatacttatcttcagcaaatcctaatgataacagaactagctccaatgcagataaaagcttgcaggaaagtttgcaaaaaacaatctataagctggaagaacagctgcataatgaaatgcagttaaaagatgaaatggagcagaagtgcagaacctcaaacataaaactagacaagataatgaaagaattggatgaagagggaaatcaaagaagaaatctagaatctacagtgtctcagattgagaaggagaaaatgttgctacagcatagaattaatgagtaccaaagaaaagctgaacaggaaaatgagaagagaagaaatgtagaaaatgaagtttctacattaaaggatcagttggaagacttaaagaaagtcagtcagaattcacagcttgctaatgagaagctgtcccagttacaaaagcagctagaagaagccaatgacttacttaggacagaatcggacacagctgtaagattgaggaagagtcacacagagatgagcaagtcaattagtcagttagagtccctgaacagagagttgcaagagagaaatcgaattttagagaattctaagtcacaaacagacaaagattattaccagctgcaagctatattagaagctgaacgaagagacagaggtcatgattctgagatgattggagaccttcaagctcgaattacatctttacaagaggaggtgaagcatctcaaacataatctcgaaaaagtggaaggagaaagaaaagaggctcaagacatgcttaatcactcagaaaaggaaaagaataatttagagatagatttaaactacaaacttaaatcattacaacaacggttagaacaagaggtaaatgaacacaaagtaaccaaagctcgtttaactgacaaacatcaatctattgaagaggcaaagtctgtggcaatgtgtgagatggaaaaaaagctgaaagaagaaagagaagctcgagagaaggctgaaaatcgggttgttcagattgagaaacagtgttccatgctagacgttgatctgaagcaatctcagcagaaactagaacatttgactggaaataaagaaaggatggaggatgaagttaagaatctaaccctgcaactggagcaggaatcaaataagcggctgttgttacaaaatgaattgaagactcaagcatttgaggcagacaatttaaaaggtttagaaaagcagatgaaacaggaaataaatactttattggaagcaaagagattattagaatttgagttagctcagcttacgaaacagtatagaggaaatgaaggacagatgcgggagctacaagatcagcttgaagctgagcaatatttctcgacactttataaaacccaggtaaaggaacttaaagaagaaattgaagaaaaaaacagagaaaatttaaagaaaatacaggaactacaaaatgaaaaagaaactcttgctactcagttggatctagcagaaacaaaagctgagtctgagcagttggcgcgaggccttctggaagaacagtattttgaattgacgcaagaaagcaagaaagctgcttcaagaaatagacaagagattacagataaagatcacactgttagtcggcttgaagaagcaaacagcatgctaaccaaagatattgaaatattaagaagagagaatgaagagctaacagagaaaatgaagaaggcagaggaagaatataaactggagaaggaggaggagatcagtaatcttaaggctgcctttgaaaagaatatcaacactgaacgaacccttaaaacacaggctgttaacaaattggcagaaataatgaatcgaaaagattttaaaattgatagaaagaaagctaatacacaagatttgagaaagaaagaaaaggaaaatcgaaagctgcaactggaactcaaccaagaaagagagaaattcaaccagatggtagtgaaacatcagaaggaactgaatgacatgcaagcgcaattggtagaagaatgtgcacataggaatgagcttcagatgcagttggccagcaaagagagtgatattgagcaattgcgtgctaaacttttggacctctcggattctacaagtgttgctagttttcctagtgctgatgaaactgatggtaacctcccagagtcaagaattgaaggttggctttcagtaccaaatagaggaaatatcaaacgatatggctggaagaaacagtatgttgtggtaagcagcaaaaaaattttgttctataatgacgaacaagataaggagcaatccaatccatctatggtattggacatagataaactgtttcacgttagacctgtaacccaaggagatgtgtatagagctgaaactgaagaaattcctaaaatattccagatactatatgcaaatgaaggtgaatgtagaaaagatgtagagatggaaccagtacaacaagctgaaaaaactaatttccaaaatcacaaaggccatgagtttattcctacactctaccactttcctgccaattgtgatgcctgtgccaaacctctctggcatgtttttaagccaccccctgccctagagtgtcgaagatgccatgttaagtgccacagagatcacttagataagaaagaggacttaatttgtccatgtaaagtaagttatgatgtaacatcagcaagagatatgctgctgttagcatgttctcaggatgaacaaaaaaaatgggtaactcatttagtaaagaaaatccctaagaatccaccatctggttttgttcgtgcttcccctcgaacgctttctacaagatccactgcaaatcagtctttccggaaagtggtcaaaaatacatctggaaaaactagttaaccatgtgactgagtgccctgtggaatcgtgtgggatgctacctgataaaccaggcttctttaaccatgcagagcagacaggctgtttctttgacacaaatatcacaggcttcagggttaagattgctgtttttctgtccttgctttggcacaacacactgagggttttttttattgcgggtttgcctacaggtagattagattaattattactatgtaatgcaagtacagttgggggaaagcttaggtagatatattttttttaaaaggtgctgcctttttggatttataagaaaatgcctgtcagtcgtgatagaacagagttttcctcatatgagtaagaggaagggactttcactttcaagtggaacagccatcactatcaagatcagctcatggaaggagtaaagaaaatatctcaaaatgagacaaactgaagttttgttttttttttaatgacttaagtttttgtgctcttgcaagactatacaaaactattttaagaaagcagtgatatcacttgaacttcagtgccctcactgtagaatttaaaagccttactgttgattgcccatgttggacttgatggagaaattaaatatctttcattatgctttacaaaatactgtatatgtttcagcaagtttggggaatgggagaggacaaaaaaaagttacatttaatctatgcatttttgccaagccatattgagttattttactactagagacattaggaaactaactgtacaaaagaaccaagtttaaaagcattttgtggggtacatcatttctataattgtataatgtatttctttgtggttttaaatgataaagacattaagttaacaaacatataagaaatgtatgcactgtttgaaatgtaaattattcttagaacactttcaatgggggttgcattgtccttttagtgccttaatttgagataattattttactgccatgagtaagtatagaaatttcaaaaaatgtattttcaaaaaattatgtgtgtcagtgagtttttcattgataattggtttaatttaaaatatttagaggtttgttggactttcataaattgagtacaatctttgcatcaaactacctgctacaataatgactttataaaactgcaaaaaatgtagaaggttgcaccaacataaaaaggaaatatggcaatacatccatgatgttttccagttaacataggaattaccagataaatactgttaaactcttgtccagtaacaagagttgattcatatggacagtatgatttattgtttatttttttaaccaaatacctcctcagtaatttataatggctttgcagtaatgtgtatcagataagaagcactggaaaaccgatcgtctctaggatgatatgcatgtttcaagtggtattgaaagccgcactgatggatatgtaataataaacatatctgttattaatatactaatgactctgtgctcatttaatgagaaataaaagtaatttatggatgggtatctttaatttttactgcaatgtgttttctcatggctgaaatgaatggaaaacatacttcaaattagtctctgattgtatataaatgtttgtgaaattccatggttagattaaagtgtatttttaaaagataaaacgtggtcttgggctctaaaacaagagtgggaatagttcacatgaaaagctggctaaagtgtgttggaaaacaattctccatgggtctcttgcatttctacacatcagggaagcagaggctctgacaacctttcttttgactatcttttccaaggatatttatgtagtaaacagccttggaagatagagttctcccttgtgaggatgtcgggttcttttactgtccagtataataaagataacgtctcccacctatgatgcaaacccactgtgtgctcagcacccacctgggccactctgcattgcccacatggggcttggagggcaaagggaactgatggaacgtgaaacttatgctgcttttgctgtgctgtgaatgaagtcatctgactctgacccaggggtctcatctcttttgtcaggatccatgaaactgtgactggcagcatgcaaacaggataaaatctcagcacagttcctgacggtgtccttactaccttctcagactcatcaccattacctaatattttaaggtccagttgcagagaacagagttaattctaattagtttaagcaagagaagactttccaaatgacatactaatctgaacttagaattgttgagaactgagagagctttgaggaatcactcccaatgccacattacagaactgggtcaaccaggagagctgcttcctcttctaagttcaggaaaccactcactcccaagtataccaatattgagagggtccagatagtgccataatcaggaatccacactaccactgctggttctctgcaacacttgtcaggcttgctacaatctacctccagttagatgttttgtaccattcctcttgccacttaagaacctcatgtctgcacactgcctcagaaaaggcacttccatgaccctgcttgctggcatttagcacagcctgcatctcacgtctgccttctctaggtgcatctacgtggccaaaattaaatcacatccagacccctagctgcaagaaagtctgagaaatatagcctctagctttctctctaatttgttacaggaggacacactaggagtgtggaatgaaggttcagcattgagttagcccatgcacccacacctgtaagcttctctgagatcaggaactccagctttgggcaacaaagaaaacatagccactgtcattattcacaggttcactcatgacctgtcatttggggtttcagcttaaattaacccattcacccttcatttaaagtaaaaaaaataagtaaaagaacttaaatgacaaactcatagttacttgagtttgtaattcatagttaactttcacagttctataatcaatctggaattcagagtgaggtagagatcaagcagtatttctcccatatggatattcagttgatactgcagtattcattgaaaatacttctttcctgcatcgtaattcaggtgaacaatccattggtgttatttctgtgtccttgccaatatcacacttttaattactgtaactttataataagattttatatctgtagtagaagtccaactttgtaatccctcccaattggcttggctattcttggccttttgcatttccatataattttttatttttgttttgaaacgaagtttcgctcttgttgcccaggctggagtgcagtggcgcgatctcggctcactgcaacctccgcctcccaggttcaagtgatcctcctgcctcagactcccgagtagctgggattacaggtgcccaccaccatgcccagctaatttttgtatttttagtagagacagggtttcaccatgttggccagcctggtcttgaactcctgacctcaggtgatccacacccaccttggcctcccaaagtgctgggattacaggcatgagccaccgcgcctggttgcattcccatataaatttaaaaacaatctactgaaagatgtatacgacctccaccaagaaaattgtaagacatttggagaagtttaaaaagacatgaataaacggaaatggtttttttaaataaacaaatgatttttaaagttgatcattaggttaataaatagtcatataatgacaatccgatgagattatgttgcccagggtggtctctaactcctagcctcaagcagttttactctctcattacaggtgtaggccaccgtgcctggcctgacacttggaaatcttaatcacaattattctttgtttttataatgtttactgttcaaatcaatttctggttggatagtatgtatatataaagccatgctcaatggcctagatatatttactgccaaatcttttatgcttttagtgttttttttctggacaagatctatgcttattgcaataaattaaatgcaaagaatattctagtagaaagtcagtctgcacttcctaaaccccaccccaccccaccaattccttcataactgttattaacagttagctgtgttttctaatggattatctccaaagtatatgtaactcagatttttgtgaggtaggaaaagaataacattaattccacttcacatattgaaagtctaacatacaaagagattaaatatctcctttcttttgccaaatgttaatgaattgtcttatgagaattaagatatgatactttctcccaagctatactgtttcccataaagtatttgagatgttggagattcaagggaaaaaatataaatgcttagaaataaagtgtataatgcaaagattgtgaataaagtgacacttgtatgttaatcctataaattggtttcttgtaccatgtaggatggtttggctattaaattgaattaagtggttca

SEQ ID NO: 176027 - DNA, 584 bp, Homo sapiens
  Payload ID: 14557
  Gene Symbol: ROCK1
  Gene Name: Rho-associated, coiled-coil containing protein kinase 1
  ENST ID: ENST00000578051
  CDS Start-End: 1-300
ccccctgccctagagtgtcgaagatgccatgttaagtgccacagagatcacttagataagaaagaggacttaatttgtccatgtaaagtaagttatgatgtaacatcagcaagagatatgctgctgttagcatgttctcaggatgaacaaaaaaaatgggtaactcatttagtaaagaaaatccctaagaatccaccatctggttttgttcgtgcttcccctcgaacgctttctacaagatccactgcaaatcagtctttccggaaagtggtcaaaaatacatctggaaaaactaggtaaggatttgaaatgctaacgtttttaacaatgtgaaaatgattggataacagctattaaaatcagaaatctaattgtgcttttcaccacagagggcatcatttttaggtatttgtatgtgaattgcagtgactttataaattagtttaacttattcttgttagagtttaataataataatacatgcaatattatatttatttagttctgtgtctaattttattgtcataagttgctgtacatggcatagttttagcccttaatgctttaaccaacttaattttttt

SEQ ID NO: 176028 - DNA, 5656 bp, Homo sapiens
  Payload ID: 14557
  Gene Symbol: ROCK1
  Gene Name: Rho-associated, coiled-coil containing protein kinase 1
  ENST ID: ENST00000635540
  CDS Start-End: 111-3524
aggttccggctcctccgccccgcggctgcgaacccaccgcggaggaagttggttgaaattgctttccgctgctggtgctggtaagagggcattgtcacagcagcagcaacatgtcgactggggacagttttgagactcgatttgaaaaaatggacaacctgctgcgggatcccaaatcggaagtgaattcggattgtttgctggatggattggatgctttggtatatgatttggattttcctgccttaagaaaaaacaaaaatattgacaactttttaagcagatataaagacacaataaataaaatcagagatttacgaatgaaagctgaagattatgaagtagtgaaggtgattggtagaggtgcatttggagaagttcaattggtaaggcataaatccaccaggaaggtatatgctatgaagcttctcagcaaatttgaaatgataaagagatctgattctgcttttttctgggaagaaagggacatcatggcttttgccaacagtccttgggttgttcagcttttttatgcattccaagatgatcgttatctctacatggtgatggaatacatgcctggtggagatcttgtaaacttaatgagcaactatgatgtgcctgaaaaatgggcacgattctatactgcagaagtagttcttgcattggatgcaatccattccatgggttttattcacagagatgtgaagcctgataacatgctgctggataaatctggacatttgaagttagcagattttggtacttgtatgaagatgaataaggaaggcatggtacgatgtgatacagcggttggaacacctgattatatttcccctgaagtattaaaatcccaaggtggtgatggttattatggaagagaatgtgactggtggtcggttggggtatttttatacgaaatgcttgtaggtgatacacctttttatgcagattctttggttggaacttacagtaaaattatgaaccataaaaattcacttacctttcctgatgataatgacatatcaaaagaagcaaaaaaccttatttgtgccttccttactgacagggaagtgaggttagggcgaaatggtgtagaagaaatcaaacgacatctcttcttcaaaaatgaccagtgggcttgggaaacgctccgagacactgtagcaccagttgtacccgatttaagtagtgacattgatactagtaattttgatgacttggaagaagataaaggagaggaagaaacattccctattcctaaagctttcgttggcaatcaactaccttttgtaggatttacatattatagcaatcgtagatacttatcttcagcaaatcctaatgataacagaactagctccaatgcagataaaagcttgcaggaaagtttgcaaaaaacaatctataagctggaagaacagctgcataatgaaatgcagttaaaagatgaaatggagcagaagtgcagaacctcaaacataaaactagacaagataatgaaagaattggatgaagagggaaatcaaagaagaaatctagaatctacagtgtctcagattgagaaggagaaaatgttgctacagcatagaattaatgagtaccaaagaaaagctgaacaggaaaatgagaagagaagaaatgtagaaaatgaagtttctacattaaaggatcagttggaagacttaaagaaagtcagtcagaattcacagcttgctaatgagaagctgtcccagttacaaaagcagctagaagaagccaatgacttacttaggacagaatcggacacagctgtaagattgaggaagagtcacacagagatgagcaagtcaattagtcagttagagtccctgaacagagagttgcaagagagaaatcgaattttagagaattctaagtcacaaacagacaaagattattaccagctgcaagctatattagaagctgaacgaagagacagaggtcatgattctgagatgattggagaccttcaagctcgaattacatctttacaagaggaggtgaagcatctcaaacataatctcgaaaaagtggaaggagaaagaaaagaggctcaagacatgcttaatcactcagaaaaggaaaagaataatttagagatagatttaaactacaaacttaaatcattacaacaacggttagaacaagaggtaaatgaacacaaagtaaccaaagctcgtttaactgacaaacatcaatctattgaagaggcaaagtctgtggcaatgtgtgagatggaaaaaaagctgaaagaagaaagagaagctcgagagaaggctgaaaatcgggttgttcagattgagaaacagtgttccatgctagacgttgatctgaagcaatctcagcagaaactagaacatttgactggaaataaagaaaggatggaggatgaagttaagaatctaaccctgcaactggagcaggaatcaaataagcggctgttgttacaaaatgaattgaagactcaagcatttgaggcagacaatttaaaaggtttagaaaagcagatgaaacaggaaataaatactttattggaagcaaagagattattagaatttgagttagctcagcttacgaaacagtatagaggaaatgaaggacagatgcgggagctacaagatcagcttgaagctgagcaatatttctcgacactttataaaacccaggtaaaggaacttaaagaagaaattgaagaaaaaaacagagaaaatttaaagaaaatacaggaactacaaaatgaaaaagaaactcttgctactcagttggatctagcagaaacaaaagctgagtctgagcagttggcgcgaggccttctggaagaacagtattttgaattgacgcaagaaagcaagaaagctgcttcaagaaatagacaagagattacagataaagatcacactgttagtcggcttgaagaagcaaacagcatgctaaccaaagatattgaaatattaagaagagagaatgaagagctaacagagaaaatgaagaaggcagaggaagaatataaactggagaaggaggaggagatcagtaatcttaaggctgcctttgaaaagaatatcaacactgaacgaacccttaaaacacaggctgttaacaaattggcagaaataatgaatcgaaaagattttaaaattgatagaaagaaagctaatacacaagatttgagaaagaaagaaaaggaaaatcgaaagctgcaactggaactcaaccaagaaagagagaaattcaaccagatggtagtgaaacatcagaaggaactgaatgacatgcaagcgcaattggtagaagaatgtgcacataggaatgagcttcagatgcagttggccagcaaagagagtgatattgagcaattgcgtgctaaacttttggacctctcggattctacaagtgttgctagttttcctagtgctgatgaaactgatggtaacctcccagttgattctgcctgcattccttatttatttatcttctattcttgtcttctagtcaagaattgaaggttggctttcagtaccaaatagaggaaatatcaaacgatatggctggaagaaacagtatgttgtggtaagcagcaaaaaaattttgttctataatgacgaacaagataaggagcaatccaatccatctatggtattggacatagataaactgtttcacgttagacctgtaacccaaggagatgtgtatagagctgaaactgaagaaattcctaaaatattccagatactatatgcaaatgaaggtgaatgtagaaaagatgtagagatggaaccagtacaacaagctgaaaaaactaatttccaaaatcacaaaggccatgagtttattcctacactctaccactttcctgccaattgtgatgcctgtgccaaacctctctggcatgtttttaagccaccccctgccctagagtgtcgaagatgccatgttaagtgccacagagatcacttagataagaaagaggacttaatttgtccatgtaaagtaagttatgatgtaacatcagcaagagatatgctgctgttagcatgttctcaggatgaacaaaaaaaatgggtaactcatttagtaaagaaaatccctaagaatccaccatctggttttgttcgtgcttcccctcgaacgctttctacaagatccactgcaaatcagtctttccggaaagtggtcaaaaatacatctggaaaaactagttaaccatgtgactgagtgccctgtggaatcgtgtgggatgctacctgataaaccaggcttctttaaccatgcagagcagacaggctgtttctttgacacaaatatcacaggcttcagggttaagattgctgtttttctgtccttgctttggcacaacacactgagggttttttttattgcgggtttgcctacaggtagattagattaattattactatgtaatgcaagtacagttgggggaaagcttaggtagatatattttttttaaaaggtgctgcctttttggatttataagaaaatgcctgtcagtcgtgatagaacagagttttcctcatatgagtaagaggaagggactttcactttcaagtggaacagccatcactatcaagatcagctcatggaaggagtaaagaaaatatctcaaaatgagacaaactgaagttttgttttttttttaatgacttaagtttttgtgctcttgcaagactatacaaaactattttaagaaagcagtgatatcacttgaacttcagtgccctcactgtagaatttaaaagccttactgttgattgcccatgttggacttgatggagaaattaaatatctttcattatgctttacaaaatactgtatatgtttcagcaagtttggggaatgggagaggacaaaaaaaagttacatttaatctatgcatttttgccaagccatattgagttattttactactagagacattaggaaactaactgtacaaaagaaccaagtttaaaagcattttgtggggtacatcatttctataattgtataatgtatttctttgtggttttaaatgataaagacattaagttaacaaacatataagaaatgtatgcactgtttgaaatgtaaattattcttagaacactttcaatgggggttgcattgtccttttagtgccttaatttgagataattattttactgccatgagtaagtatagaaatttcaaaaaatgtattttcaaaaaattatgtgtgtcagtgagtttttcattgataattggtttaatttaaaatatttagaggtttgttggactttcataaattgagtacaatctttgcatcaaactacctgctacaataatgactttataaaactgcaaaaaatgtagaaggttgcaccaacataaaaaggaaatatggcaatacatccatgatgttttccagttaacataggaattaccagataaatactgttaaactcttgtccagtaacaagagttgattcatatggacagtatgatttattgtttatttttttaaccaaatacctcctcagtaatttataatggctttgcagtaatgtgtatcagataagaagcactggaaaaccgatcgtctctaggatgatatgcatgtttcaagtggtattgaaagccgcactgatggatatgtaat

SEQ ID NO: 176029 - DNA, 1795 bp, Homo sapiens
  Payload ID: 14558
  Gene Symbol: ROCK2
  Gene Name: Rho-associated, coiled-coil containing protein kinase 2
  ENST ID: ENST00000261535
  CDS Start-End: 6-1346
gcggcatgagccggcccccgccgacggggaaaatgcccggcgcccccgagaccgcgccgggggacggggcaggcgcgagccgccagaggaagctggaggcgctgatccgagaccctcgctcccccatcaacgtggagagcttgctggatggcttaaattccttggtccttgatttagattttcctgctttgaggaaaaacaagaacatagataatttcttaaatagatatgagaaaattgtgaaaaaaatcagaggtctacagatgaaggcagaagactatgatgttgtaaaagttattggaagaggtgcttttggtgaagtgcagttggttcgtcacaaggcatcgcagaaggtttatgctatgaagcttcttagtaagtttgaaatgataaaaagatcagattctgcctttttttgggaagaaagagatattatggcctttgccaatagcccctgggtggttcagcttttttatgcctttcaagatgataggtatctgtacatggtaatggagtacatgcctggtggagaccttgtaaaccttatgagtaattatgatgtgcctgaaaaatgggccaaattttacactgctgaagttgttcttgctctggatgcaatacactccatgggtttaatacacagagatgtgaagcctgacaacatgctcttggataaacatggacatctaaaattagcagattttggcacgtgtatgaagatggatgaaacaggcatggtacattgtgatacagcagttggaacaccggattatatatcacctgaggttctgaaatcacaagggggtgatggtttctatgggcgagaatgtgattggtggtctgtaggtgttttcctttatgagatgctagtgggggatactccattttatgcggattcacttgtaggaacatatagcaaaattatggatcataagaattcactgtgtttccctgaagatgcagaaatttccaaacatgcaaagaatctcatctgtgctttcttaacagatagggaggtacgacttgggagaaatggggtggaagaaatcagacagcatcctttctttaagaatgatcagtggcattgggataacataagagaaacggcagctcctgtagtacctgaactcagcagtgacatagacagcagcaatttcgatgacattgaagatgacaaaggagatgtagaaaccttcccaattcctaaagcttttgttggaaatcagctgcctttcatcggatttacctactatagagaaaatttattattaagtgactctccatcttgtagagaaactgattccatacaatcaaggaaaaatgaagaaagtcaagaggtatgttgatgttgtcagatatattgaaaaactgagaaaagctcatcactctcgcaaagtttaaatatagtcatatcctacctagcatttggagtactacatctacccaagagagaagttcccaacctttcttctaccaaattcagaaaaaactgtatacattagaagaacatcttagcaatgagatgcaagccaaagaggaactggaacagaagtgcaaatctgttaatactcgcctagaaaaaacagcaaaggagctagaagaggagattaccttacggaaaagtgtggaatcagcattaagacagttagaaagagaaaaggcgcttcttcagcacaaaaatgcagaatatcagaggaaagctgatcatgaagcagacaaaaaacgaaatttggaaaatgatgttaacagcttaaaagatcaacttgaagatttgaaaaaaagaaatcaaaactct

SEQ ID NO: 176030 - DNA, 8292 bp, Homo sapiens
  Payload ID: 14558
  Gene Symbol: ROCK2
  Gene Name: Rho-associated, coiled-coil containing protein kinase 2
  Uniprot ID: O75116
  ENST ID: ENST00000315872
  CDS Start-End: 450-4616
caaggcggccggcggcgaccatggcagcgggccggcggcggccgtagtggcccaggcctgggcttcagcctcccggggccccagagggcggggcggtccgggccgcggcggtggcggcgccacttccctgctcccgcccgaggactcctgcgggcactcgctgaggaccagcggaccggcggcgcgaatctgactgaggggcggggacgccgtctgttccccgccgctcccggcagggccgggccgggctgggccgggctgggccgggcgggcccctgggagcagcccccaggcgggggaccgccttggagacccgaagccggagctagaggcaggcggtgggcccgggtggagtcccggccggagctggtggttcgggggcggtgctaggccccgaggctgcgggacctgagcgcgaggagcctgagtgcgggtccagcggtggcggcatgagccggcccccgccgacggggaaaatgcccggcgcccccgagaccgcgccgggggacggggcaggcgcgagccgccagaggaagctggaggcgctgatccgagaccctcgctcccccatcaacgtggagagcttgctggatggcttaaattccttggtccttgatttagattttcctgctttgaggaaaaacaagaacatagataatttcttaaatagatatgagaaaattgtgaaaaaaatcagaggtctacagatgaaggcagaagactatgatgttgtaaaagttattggaagaggtgcttttggtgaagtgcagttggttcgtcacaaggcatcgcagaaggtttatgctatgaagcttcttagtaagtttgaaatgataaaaagatcagattctgcctttttttgggaagaaagagatattatggcctttgccaatagcccctgggtggttcagcttttttatgcctttcaagatgataggtatctgtacatggtaatggagtacatgcctggtggagaccttgtaaaccttatgagtaattatgatgtgcctgaaaaatgggccaaattttacactgctgaagttgttcttgctctggatgcaatacactccatgggtttaatacacagagatgtgaagcctgacaacatgctcttggataaacatggacatctaaaattagcagattttggcacgtgtatgaagatggatgaaacaggcatggtacattgtgatacagcagttggaacaccggattatatatcacctgaggttctgaaatcacaagggggtgatggtttctatgggcgagaatgtgattggtggtctgtaggtgttttcctttatgagatgctagtgggggatactccattttatgcggattcacttgtaggaacatatagcaaaattatggatcataagaattcactgtgtttccctgaagatgcagaaatttccaaacatgcaaagaatctcatctgtgctttcttaacagatagggaggtacgacttgggagaaatggggtggaagaaatcagacagcatcctttctttaagaatgatcagtggcattgggataacataagagaaacggcagctcctgtagtacctgaactcagcagtgacatagacagcagcaatttcgatgacattgaagatgacaaaggagatgtagaaaccttcccaattcctaaagcttttgttggaaatcagctgcctttcatcggatttacctactatagagaaaatttattattaagtgactctccatcttgtagagaaactgattccatacaatcaaggaaaaatgaagaaagtcaagagattcagaaaaaactgtatacattagaagaacatcttagcaatgagatgcaagccaaagaggaactggaacagaagtgcaaatctgttaatactcgcctagaaaaaacagcaaaggagctagaagaggagattaccttacggaaaagtgtggaatcagcattaagacagttagaaagagaaaaggcgcttcttcagcacaaaaatgcagaatatcagaggaaagctgatcatgaagcagacaaaaaacgaaatttggaaaatgatgttaacagcttaaaagatcaacttgaagatttgaaaaaaagaaatcaaaactctcaaatatccactgagaaagtgaatcaactccagagacaactggatgaaaccaatgctttactgcgaacagagtctgatactgcagcccggttaaggaaaacccaggcagaaagttcaaaacagattcagcagctggaatctaacaatagagatctacaagataaaaactgcctgctggagactgccaagttaaaacttgaaaaggaatttatcaatcttcagtcagctctagaatctgaaaggagggatcgaacccatggatcagagataattaatgatttacaaggtagaatatgtggcctagaagaagatttaaagaacggcaaaatcttactagcgaaagtagaactggagaagagacaacttcaggagagatttactgatttggaaaaggaaaaaagcaacatggaaatagatatgacataccaactaaaagttatacagcagagcctagaacaagaagaagctgaacataaggccacaaaggcacgactagcagataaaaataagatctatgagtccatcgaagaagccaaatcagaagccatgaaagaaatggagaagaagctcttggaggaaagaactttaaaacagaaagtggagaacctattgctagaagctgagaaaagatgttctctattagactgtgacctcaaacagtcacagcagaaaataaatgagctccttaaacagaaagatgtgctaaatgaggatgttagaaacctgacattaaaaatagagcaagaaactcagaagcgctgccttacacaaaatgacctgaagatgcaaacacaacaggttaacacactaaaaatgtcagaaaagcagttaaagcaagaaaataaccatctcatggaaatgaaaatgaacttggaaaaacaaaatgctgaacttcgaaaagaacgtcaggatgcagatgggcaaatgaaagagctccaggatcagctcgaagcagaacagtatttctcaaccctttataaaacacaagttagggagcttaaagaagaatgtgaagaaaagaccaaacttggtaaagaattgcagcagaagaaacaggaattacaggatgaacgggactctttggctgcccaactggagatcaccttgaccaaagcagattctgagcaactggctcgttcaattgctgaagaacaatattctgatttggaaaaagagaagatcatgaaagagctggagatcaaagagatgatggctagacacaaacaggaacttacggaaaaagatgctacaattgcttctcttgaggaaactaataggacactaactagtgatgttgccaatcttgcaaatgagaaagaagaattaaataacaaattgaaagatgttcaagagcaactgtcaagattgaaagatgaagaaataagcgcagcagctattaaagcacagtttgagaagcagctattaacagaaagaacactcaaaactcaagctgtgaataagttggctgagatcatgaatcgaaaagaacctgtcaagcgtggtaatgacacagatgtgcggagaaaagagaaggagaatagaaagctacatatggagcttaaatctgaacgtgagaaattgacccagcagatgatcaagtatcagaaagaactgaatgaaatgcaggcacaaatagctgaagagagccagattcgaattgaactgcagatgacattggacagtaaagacagtgacattgagcagctgcggtcacaactccaagccttgcatattggtctggatagttccagtataggcagtggaccaggggatgctgaggcagatgatgggtttccagaatcaagattagaaggatggctttcattgcctgtacgaaacaacactaagaaatttggatgggttaaaaagtatgtgattgtaagcagtaagaagattcttttctatgacagtgaacaagataaagaacaatccaatccttacatggttttagatatagacaagttatttcatgtccgaccagttacacagacagatgtgtatagagcagatgctaaagaaattccaaggatattccagattctgtatgccaatgaaggagaaagtaagaaggaacaagaatttccagtggagccagttggagaaaaatctaattatatttgccacaagggacatgagtttattcctactctttatcatttcccaaccaactgtgaggcttgtatgaagcccctgtggcacatgtttaagcctcctcctgctttggagtgccgccgttgccatattaagtgtcataaagatcatatggacaaaaaggaggagattatagcaccttgcaaagtatattatgatatttcaacggcaaagaatctgttattactagcaaattctacagaagagcagcagaagtgggttagtcggttggtgaaaaagatacctaaaaagcccccagctccagacccttttgcccgatcatctcctagaacttcaatgaagatacagcaaaaccagtctattagacggccaagtcgacagcttgccccaaacaaacctagctaactgccttctatgaaagcagtcattattcaaggtgatcgtattcttccagtgaaaacaagactgaaatatgatggcccaaaatttattaaaaagctatattttcctgagagactgatacatacactcatacatatatgtgttccccttttccctgtaatataaattacaaatctgggctcctttgaagcaacaggttgaaccaacaatgattggttgatagactaaggatatatgcaactcttccagacttttccataaagctctctcggcagtcgctcacactacaatgcacacaaggattgagaagagttaaaggctaaagaaaacatcttttctagcttcaacagagaggtttcaccagcacatttaccagaagaatctgggaatggattccactacagtgatattgactgcatctttaagaagtgaccattatactgtgtatatatatataaacacacacacatatatatatatatatatagtactctaatactgcaagaaggttttttaaacttcccactttattttttatacacattaatcagatatcattacttgctgcagttgcaactatgcacttgtataaagccataatgttggagtttatatcactcattcctgtgtacctgatggaagttgcatgttcatgtttaagcagttactgtaacaagaagtttaaagttaattatatcagtttcctaatgcttcatgataggcaactttacccattttgaatgccttaatttaatttttttcaaagtctcagccctgtctgtattaaaaaacaaaaaaagcgtttaccagctcttaggatgtaaactagctttgtggaagataaatcgtgcactatttttacacataaatagttatatcaatgtcagcctattttgattaacaaatgtttttaaagtattattggttatagaaacaataatggatggtgttggaactaatatatccttgatgtctgtctattattcattcaactctttttacagacctcagtattagtctgtgactacaaaatattttatttgctttaaatttgctggctaccctagatgtgtttttattcctggtaaagacatttgtgattacattttcacacttaagattcaaaatttttcccaaatataaagaaaactaagacagactgtagatgcattttaaatatttaaatatgatcctcagacatgcagctgtgtgtggcagtattttagtaccgggttaagaaaactggcaactgggaagaagtggcctcaaaggcacttaatttgatttttattttttaaatgctgtcaaagttacagtttacgcaggacattcttgccgtattctcatgatcccagataagtgtgtgttttatactgcaacaatatgcagcaatggtaagcgtaaagttttttttttgtttttgtttttttttatattatgaagtcttttaacagtctctctttatataaatacacagagtttggtatgatatttaaatacatcatctggccaggcatggtggcttacgcctgtaatcctagcactttgggaggccaagacgggcggatcacctgaggtgaggagttcaagaccagcctgcccaacatagtgaaactccgtctctaccaatatacaaaaattagccgggcatgatggtggtggcctgtaatcccagctacttgggaggctgagacaggagaatcgcttgaacccaggagacggtggttgcagtgagcgaagatcgagccactgcactccagcctgggcagctgaacaagactccgtctcaaaaaaaaaaaaaaaaaaaagtcatctaatatttcgatgaaggaaatagacatttttcattgattccctctgatgtcagttagagatatttaaaaagttagatccccataatagatactattgtggaaactgaagagtagctactggcctactgatagactgaaactggttttgttattcttaacgttctccagtctgcactctgctgtgctgtctgtgctcagactagacgtgcatgccgtttcctttgcaggtgtgttctgcagctctggttttgggggatagctcttttttaagtaagattaaaaaatgaaaaatatataaatttatatagaataaatatttccattcattagagttgttaaaaggagactgaattaatattttatataaagattttgttacattatgggaggttctatcctattctgaattggagagtatatatatatatatatatatatatatatttttaataaactttattaaggtgaaataatttcaagtttacatatgagtaactgaaatatttgagtaaaaaaggcaaaagtttaaatttggaatgctgtatatattagagaatatggggaatcatggtgtgaccaactgtacaaggaagattcatatgaaggtcttaggggaaaaagataattctgaagggtgaaaaaaaaatctctcccatggagattcttcacattatatggtttgacataagggtttataaggttgtttgtccaactaatgaaaatgcgcttaataaaaaattctgaccttgggtaagaattcgctttttaccgcattgccgctttcatgtacatacatgagtgcatgcacctatcaatgtgttttcttcccaacacttattaaatataaaacaacctgattttgtgctcgtttctcgtttttcttgaggccctgaagcttccaagataaatataagactaaaatttgcttgttccttcacacctgatttctcctagaaccataaatacctcctatggggaactaagaaatcatgaatactgggattttcttattggattttttacttttgttttgtggggataacgagacagaagtgaaaggaaaactggtgccggtattactgttgaaattaatgtacagtgaatgtttttaaagtattaattttaaaaaaccatgttctctagaaacaagttttaaaaatctatatgaaagttttaaaatgttccagctaactaatggataagcataccagtaaagccaaagtaaaggttagtgcctttaaaactaacctgtgttagagttacatgaatctggctctaaagtatctattttgcatccatttatatatagatcttaaacagaaatactctaggttgccacaccacagttttaagaagttatgctgctgctgttactctcttctaggattctggtggtaaagtagagaaactcggacactatattaaccttactgaaacatgctttaaatcgtgtctaaaatctgatttgagcaagtcactgccgagcttctgagtctgcattgacactgctactgactcacctctccttccctggaataaggcttcagcttccctatgctgtgaagacaccatttgtaagcactttgaacataagcactgtgtgacagcgctggatatcatgcttgggggggggcctctccctgactcccatccccataataatgagttttgtttggaattgtaataagtaatgaactgcatggtttagaaaattataaatatttgatcagctgtcctctctgaaaaaaattgcacccctttttcttttttaaaattttgttgcatcttcgtagtaatgtaattgtattttatgcctgcttttttataaaaaaataaaataaaataaatggagacataagcatttt

SEQ ID NO: 176031 - DNA, 4017 bp, Homo sapiens
  Payload ID: 14558
  Gene Symbol: ROCK2
  Gene Name: Rho-associated, coiled-coil containing protein kinase 2
  ENST ID: ENST00000401753
  CDS Start-End: 474-3911
atgggccatttttgtctatcttaatctatccagctagaacttaatatccctatatatttttggtctttttgatagagtctgttatattctgcaacccttaatcaatgtttaataggtggagttttttattgtacccaaagctccctcttgtggtatttggtataatatagtgtgaaatgattaacagtgcaaattatctttaatgaaaatgaagtatgaaataatttcctaatagaatgctaaacttatgtctgctatacataagagaagatgtttttgtgttgtacttccatgaatgtattgcgattttcattaaaccaaaaacttttggcactagggtacagacaaataaatcataccacatatttttagggaagataagggtggttaaggagagcaaggtgtagagaagaagaatatggggaacgggatagaatatggtacctacagaataattgtataagcatacaggcatggtacattgtgatacagcagttggaacaccggattatatatcacctgaggttctgaaatcacaagggggtgatggtttctatgggcgagaatgtgattggtggtctgtaggtgttttcctttatgagatgctagtgggggatactccattttatgcggattcacttgtaggaacatatagcaaaattatggatcataagaattcactgtgtttccctgaagatgcagaaatttccaaacatgcaaagaatctcatctgtgctttcttaacagatagggaggtacgacttgggagaaatggggtggaagaaatcagacagcatcctttctttaagaatgatcagtggcattgggataacataagagaaacggcagctcctgtagtacctgaactcagcagtgacatagacagcagcaatttcgatgacattgaagatgacaaaggagatgtagaaaccttcccaattcctaaagcttttgttggaaatcagctgcctttcatcggatttacctactatagagaaaatttattattaagtgactctccatcttgtagagaaactgattccatacaatcaaggaaaaatgaagaaagtcaagagattcagaaaaaactgtatacattagaagaacatcttagcaatgagatgcaagccaaagaggaactggaacagaagtgcaaatctgttaatactcgcctagaaaaaacagcaaaggagctagaagaggagattaccttacggaaaagtgtggaatcagcattaagacagttagaaagagaaaaggcgcttcttcagcacaaaaatgcagaatatcagaggaaagctgatcatgaagcagacaaaaaacgaaatttggaaaatgatgttaacagcttaaaagatcaacttgaagatttgaaaaaaagaaatcaaaactctcaaatatccactgagaaagtgaatcaactccagagacaactggatgaaaccaatgctttactgcgaacagagtctgatactgcagcccggttaaggaaaacccaggcagaaagttcaaaacagattcagcagctggaatctaacaatagagatctacaagataaaaactgcctgctggagactgccaagttaaaacttgaaaaggaatttatcaatcttcagtcagctctagaatctgaaaggagggatcgaacccatggatcagagataattaatgatttacaaggtagaatatgtggcctagaagaagatttaaagaacggcaaaatcttactagcgaaagtagaactggagaagagacaacttcaggagagatttactgatttggaaaaggaaaaaagcaacatggaaatagatatgacataccaactaaaagttatacagcagagcctagaacaagaagaagctgaacataaggccacaaaggcacgactagcagataaaaataagatctatgagtccatcgaagaagccaaatcagaagccatgaaagaaatggagaagaagctcttggaggaaagaactttaaaacagaaagtggagaacctattgctagaagctgagaaaagatgttctctattagactgtgacctcaaacagtcacagcagaaaataaatgagctccttaaacagaaagatgtgctaaatgaggatgttagaaacctgacattaaaaatagagcaagaaactcagaagcgctgccttacacaaaatgacctgaagatgcaaacacaacaggttaacacactaaaaatgtcagaaaagcagttaaagcaagaaaataaccatctcatggaaatgaaaatgaacttggaaaaacaaaatgctgaacttcgaaaagaacgtcaggatgcagatgggcaaatgaaagagctccaggatcagctcgaagcagaacagtatttctcaaccctttataaaacacaagttagggagcttaaagaagaatgtgaagaaaagaccaaacttggtaaagaattgcagcagaagaaacaggaattacaggatgaacgggactctttggctgcccaactggagatcaccttgaccaaagcagattctgagcaactggctcgttcaattgctgaagaacaatattctgatttggaaaaagagaagatcatgaaagagctggagatcaaagagatgatggctagacacaaacaggaacttacggaaaaagatgctacaattgcttctcttgaggaaactaataggacactaactagtgatgttgccaatcttgcaaatgagaaagaagaattaaataacaaattgaaagatgttcaagagcaactgtcaagattgaaagatgaagaaataagcgcagcagctattaaagcacagtttgagaagcagctattaacagaaagaacactcaaaactcaagctgtgaataagttggctgagatcatgaatcgaaaagaacctgtcaagcgtggtaatgacacagatgtgcggagaaaagagaaggagaatagaaagctacatatggagcttaaatctgaacgtgagaaattgacccagcagatgatcaagtatcagaaagaactgaatgaaatgcaggcacaaatagctgaagagagccagattcgaattgaactgcagatgacattggacagtaaagacagtgacattgagcagctgcggtcacaactccaagccttgcatattggtctggatagttccagtataggcagtggaccaggggatgctgaggcagatgatgggtttccagaatcaagattagaaggatggctttcattgcctgtacgaaacaacactaagaaatttggatgggttaaaaagtatgtgattgtaagcagtaagaagattcttttctatgacagtgaacaagataaagaacaatccaatccttacatggttttagatatagacaagttatttcatgtccgaccagttacacagacagatgtgtatagagcagatgctaaagaaattccaaggatattccagattctgtatgccaatgaaggagaaagtaagaaggaacaagaatttccagtggagccagttggagaaaaatctaattatatttgccacaagggacatgagtttattcctactctttatcatttcccaaccaactgtgaggcttgtatgaagcccctgtggcacatgtttaagcctcctcctgctttggagtgccgccgttgccatattaagtgtcataaagatcatatggacaaaaaggaggagattatagcaccttgcaaagtatattatgatatttcaacggcaaagaatctgttattactagcaaattctacagaagagcagcagaagtgggttagtcggttggtgaaaaagatacctaaaaagcccccagctccagacccttttgcccgatcatctcctagaacttcaatgaagatacagcaaaaccagtctattagacggccaagtcgacagcttgccccaaacaaacctagctaactgccttctatgaaagcagtcattattcaaggtgatcgtattcttccagtgaaaacaagactgaaatatgatggcccaaaatttattaaaaagctatattttcctg

SEQ ID NO: 176032 - DNA, 729 bp, Homo sapiens
  Payload ID: 14558
  Gene Symbol: ROCK2
  Gene Name: Rho-associated, coiled-coil containing protein kinase 2
  ENST ID: ENST00000431087
  CDS Start-End: 119-729
ggatggcttaaattccttggtccttgatttagattttcctgctttgaggaaaaacaagaacatagataatttcttaaatagatatgagaaaattgtgaaaaaaatcagaggtctacagatgaaggcagaagactatgatgttgtaaaagttattggaagaggtgcttttggtgaagtgcagttggttcgtcacaaggcatcgcagaaggtttatgctatgaagcttcttagtaagtttgaaatgataaaaagatcagattctgcctttttttgggaagaaagagatattatggcctttgccaatagcccctgggtggttcagacaggcatggtacattgtgatacagcagttggaacaccggattatatatcacctgaggttctgaaatcacaagggggtgatggtttctatgggcgagaatgtgattggtggtctgtaggtgttttcctttatgagatgctagtgggggatactccattttatgcggattcacttgtaggaacatatagcaaaattatggatcataagaattcactgtgtttccctgaagatgcagaaatttccaaacatgcaaagaatctcatctgtgctttcttaacagatagggaggtacgacttgggagaaatggggtggaagaaatcagacagcatcctttctttaagaatgatcagtggcattgggataacataagagaaacggcagctcctgtagtacctgaactcagcag

SEQ ID NO: 176033 - DNA, 6401 bp, Homo sapiens
  Payload ID: 14558
  Gene Symbol: ROCK2
  Gene Name: Rho-associated, coiled-coil containing protein kinase 2
  ENST ID: ENST00000616279
  CDS Start-End: 2505-4616
caaggcggccggcggcgaccatggcagcgggccggcggcggccgtagtggcccaggcctgggcttcagcctcccggggccccagagggcggggcggtccgggccgcggcggtggcggcgccacttccctgctcccgcccgaggactcctgcgggcactcgctgaggaccagcggaccggcggcgcgaatctgactgaggggcggggacgccgtctgttccccgccgctcccggcagggccgggccgggctgggccgggctgggccgggcgggcccctgggagcagcccccaggcgggggaccgccttggagacccgaagccggagctagaggcaggcggtgggcccgggtggagtcccggccggagctggtggttcgggggcggtgctaggccccgaggctgcgggacctgagcgcgaggagcctgagtgcgggtccagcggtggcggcatgagccggcccccgccgacggggaaaatgcccggcgcccccgagaccgcgccgggggacggggcaggcgcgagccgccagaggaagctggaggcgctgatccgagaccctcgctcccccatcaacgtggagagcttgctggatggcttaaattccttggtccttgatttagattttcctgctttgaggaaaaacaagaacatagataatttcttaaatagatatgagaaaattgtgaaaaaaatcagaggtctacagatgaaggcagaagactatgatgttgtaaaagttattggaagaggtgcttttggtgaagtgcagttggttcgtcacaaggcatcgcagaaggtttatgctatgaagcttcttagtaagtttgaaatgataaaaagatcagattctgcctttttttgggaagaaagagatattatggcctttgccaatagcccctgggtggttcagcttttttatgcctttcaagatgataggtatctgtacatggtaatggagtacatgcctggtggagaccttgtaaaccttatgagtaattatgatgtgcctgaaaaatgggccaaattttacactgctgaagttgttcttgctctggatgcaatacactccatgggtttaatacacagagatgtgaagcctgacaacatgctcttggataaacatggacatctaaaattagcagattttggcacgtgtatgaagatggatgaaacaggcatggtacattgtgatacagcagttggaacaccggattatatatcacctgaggttctgaaatcacaagggggtgatggtttctatgggcgagaatgtgattggtggtctgtaggtgttttcctttatgagatgctagtgggggatactccattttatgcggattcacttgtaggaacatatagcaaaattatggatcataagaattcactgtgtttccctgaagatgcagaaatttccaaacatgcaaagaatctcatctgtgctttcttaacagatagggaggtacgacttgggagaaatggggtggaagaaatcagacagcatcctttctttaagaatgatcagtggcattgggataacataagagaaacggcagctcctgtagtacctgaactcagcagtgacatagacagcagcaatttcgatgacattgaagatgacaaaggagatgtagaaaccttcccaattcctaaagcttttgttggaaatcagctgcctttcatcggatttacctactatagagaaaatttattattaagtgactctccatcttgtagagaaactgattccatacaatcaaggaaaaatgaagtacgtatacagattcagaaaaaactgtatacattagaagaacatcttagcaatgagatgcaagccaaagaggaactggaacagaagtgcaaatctgttaatactcgcctagaaaaaacagcaaaggagctagaagaggagattaccttacggaaaagtgtggaatcagcattaagacagttagaaagagaaaaggcgcttcttcagcacaaaaatgcagaatatcagaggaaagctgatcatgaagcagacaaaaaacgaaatttggaaaatgatgttaacagcttaaaagatcaacttgaagatttgaaaaaaagaaatcaaaactctcaaatatccactgagaaagtgaatcaactccagagacaactggatgaaaccaatgctttactgcgaacagagtctgatactgcagcccggttaaggaaaacccaggcagaaagttcaaaacagattcagcagctggaatctaacaatagagatctacaagataaaaactgcctgctggagactgccaagttaaaacttgaaaaggaatttatcaatcttcagtcagctctagaatctgaaaggagggatcgaacccatggatcagagataattaatgatttacaaggtagaatatgtggcctagaagaagatttaaagaacggcaaaatcttactagcgaaagtagaactggagaagagacaacttcaggagagatttactgatttggaaaaggaaaaaagcaacatggaaatagatatgacataccaactaaaagttatacagcagagcctagaacaagaagaagctgaacataaggccacaaaggcacgactagcagataaaaataagatctatgagtccatcgaagaagccaaatcagaagccatgaaagaaatggagaagaagctcttggaggaaagaactttaaaacagaaagtggagaacctattgctagaagctgagaaaagatgttctctattagactgtgacctcaaacagtcacagcagaaaataaatgagctccttaaacagaaagatgtgctaaatgaggatgttagaaacctgacattaaaaatagagcaagaaactcagaagcgctgccttacacaaaatgacctgaagatgcaaacacaacaggttaacacactaaaaatgtcagaaaagcagttaaagcaagaaaataaccatctcatggaaatgaaaatgaacttggaaaaacaaaatgctgaacttcgaaaagaacgtcaggatgcagatgggcaaatgaaagagctccaggatcagctcgaagcagaacagtatttctcaaccctttataaaacacaagttagggagcttaaagaagaatgtgaagaaaagaccaaacttggtaaagaattgcagcagaagaaacaggaattacaggatgaacgggactctttggctgcccaactggagatcaccttgaccaaagcagattctgagcaactggctcgttcaattgctgaagaacaatattctgatttggaaaaagagaagatcatgaaagagctggagatcaaagagatgatggctagacacaaacaggaacttacggaaaaagatgctacaattgcttctcttgaggaaactaataggacactaactagtgatgttgccaatcttgcaaatgagaaagaagaattaaataacaaattgaaagatgttcaagagcaactgtcaagattgaaagatgaagaaataagcgcagcagctattaaagcacagtttgagaagcagctattaacagaaagaacactcaaaactcaagctgtgaataagttggctgagatcatgaatcgaaaagaacctgtcaagcgtggtaatgacacagatgtgcggagaaaagagaaggagaatagaaagctacatatggagcttaaatctgaacgtgagaaattgacccagcagatgatcaagtatcagaaagaactgaatgaaatgcaggcacaaatagctgaagagagccagattcgaattgaactgcagatgacattggacagtaaagacagtgacattgagcagctgcggtcacaactccaagccttgcatattggtctggatagttccagtataggcagtggaccaggggatgctgaggcagatgatgggtttccagaatcaagattagaaggatggctttcattgcctgtacgaaacaacactaagaaatttggatgggttaaaaagtatgtgattgtaagcagtaagaagattcttttctatgacagtgaacaagataaagaacaatccaatccttacatggttttagatatagacaagttatttcatgtccgaccagttacacagacagatgtgtatagagcagatgctaaagaaattccaaggatattccagattctgtatgccaatgaaggagaaagtaagaaggaacaagaatttccagtggagccagttggagaaaaatctaattatatttgccacaagggacatgagtttattcctactctttatcatttcccaaccaactgtgaggcttgtatgaagcccctgtggcacatgtttaagcctcctcctgctttggagtgccgccgttgccatattaagtgtcataaagatcatatggacaaaaaggaggagattatagcaccttgcaaagtatattatgatatttcaacggcaaagaatctgttattactagcaaattctacagaagagcagcagaagtgggttagtcggttggtgaaaaagatacctaaaaagcccccagctccagacccttttgcccgatcatctcctagaacttcaatgaagatacagcaaaaccagtctattagacggccaagtcgacagcttgccccaaacaaacctagctaactgccttctatgaaagcagtcattattcaaggtgatcgtattcttccagtgaaaacaagactgaaatatgatggcccaaaatttattaaaaagctatattttcctgagagactgatacatacactcatacatatatgtgttccccttttccctgtaatataaattacaaatctgggctcctttgaagcaacaggttgaaccaacaatgattggttgatagactaaggatatatgcaactcttccagacttttccataaagctctctcggcagtcgctcacactacaatgcacacaaggattgagaagagttaaaggctaaagaaaacatcttttctagcttcaacagagaggtttcaccagcacatttaccagaagaatctgggaatggattccactacagtgatattgactgcatctttaagaagtgaccattatactgtgtatatatatataaacacacacacatatatatatatatatatagtactctaatactgcaagaaggttttttaaacttcccactttattttttatacacattaatcagatatcattacttgctgcagttgcaactatgcacttgtataaagccataatgttggagtttatatcactcattcctgtgtacctgatggaagttgcatgttcatgtttaagcagttactgtaacaagaagtttaaagttaattatatcagtttcctaatgcttcatgataggcaactttacccattttgaatgccttaatttaatttttttcaaagtctcagccctgtctgtattaaaaaacaaaaaaagcgtttaccagctcttaggatgtaaactagctttgtggaagataaatcgtgcactatttttacacataaatagttatatcaatgtcagcctattttgattaacaaatgtttttaaagtattattggttatagaaacaataatggatggtgttggaactaatatatccttgatgtctgtctattattcattcaactctttttacagacctcagtattagtctgtgactacaaaatattttatttgctttaaatttgctggctaccctagatgtgtttttattcctggtaaagacatttgtgattacattttcacacttaagattcaaaatttttcccaaatataaagaaaactaagacagactgtagatgcattttaaatatttaaatatgatcctcagacatgcagctgtgtgtggcagtattttagtaccgggttaagaaaactggcaactgggaagaagtggcctcaaaggcacttaatttgatttttattttttaaatgctgtcaaagttacagtttacgcaggacattcttgccgtattctcatgatcccagataagtgtgtgttttatactgcaacaatatgcagcaatggtaagcgtaaagttttttttttgtttttgtttttttttatattatgaagtcttttaacagtctctctttatataaatacacagagtttggtatgatatttaaatacatcatctggccaggcatggtggcttacgcctgtaatcctagcactttgggaggccaagacgggcggatcacctgaggtgaggagttcaagaccagcctgcccaacatagtgaaactccgtctctaccaatatacaaaaattagccgggcatgatggtggtggcctgtaatcccagctacttgggaggctgagacaggagaatcgcttgaacccaggagacggtggttgcagtgagcgaagatcgagccactgcactccagcctgggcagctgaacaagactccgtctc

SEQ ID NO: 176034 - DNA, 2592 bp, Homo sapiens
  Payload ID: 14559
  Gene Symbol: RHO
  Gene Name: rhodopsin
  Uniprot ID: P08100
  ENST ID: ENST00000296271
  CDS Start-End: 95-1141
gagtcatccagctggagccctgagtggctgagctcaggccttcgcagcattcttgggtgggagcagccacgggtcagccacaagggccacagccatgaatggcacagaaggccctaacttctacgtgcccttctccaatgcgacgggtgtggtacgcagccccttcgagtacccacagtactacctggctgagccatggcagttctccatgctggccgcctacatgtttctgctgatcgtgctgggcttccccatcaacttcctcacgctctacgtcaccgtccagcacaagaagctgcgcacgcctctcaactacatcctgctcaacctagccgtggctgacctcttcatggtcctaggtggcttcaccagcaccctctacacctctctgcatggatacttcgtcttcgggcccacaggatgcaatttggagggcttctttgccaccctgggcggtgaaattgccctgtggtccttggtggtcctggccatcgagcggtacgtggtggtgtgtaagcccatgagcaacttccgcttcggggagaaccatgccatcatgggcgttgccttcacctgggtcatggcgctggcctgcgccgcacccccactcgccggctggtccaggtacatccccgagggcctgcagtgctcgtgtggaatcgactactacacgctcaagccggaggtcaacaacgagtcttttgtcatctacatgttcgtggtccacttcaccatccccatgattatcatctttttctgctatgggcagctcgtcttcaccgtcaaggaggccgctgcccagcagcaggagtcagccaccacacagaaggcagagaaggaggtcacccgcatggtcatcatcatggtcatcgctttcctgatctgctgggtgccctacgccagcgtggcattctacatcttcacccaccagggctccaacttcggtcccatcttcatgaccatcccagcgttctttgccaagagcgccgccatctacaaccctgtcatctatatcatgatgaacaagcagttccggaactgcatgctcaccaccatctgctgcggcaagaacccactgggtgacgatgaggcctctgctaccgtgtccaagacggagacgagccaggtggccccggcctaagacctgcctaggactctgtggccgactataggcgtctcccatcccctacaccttcccccagccacagccatcccaccaggagcagcgcctgtgcagaatgaacgaagtcacataggctccttaattttttttttttttttaagaaataattaatgaggctcctcactcacctgggacagcctgagaagggacatccaccaagacctactgatctggagtcccacgttccccaaggccagcgggatgtgtgcccctcctcctcccaactcatctttcaggaacacgaggattcttgctttctggaaaagtgtcccagcttagggataagtgtctagcacagaatggggcacacagtaggtgcttaataaatgctggatggatgcaggaaggaatggaggaatgaatgggaagggagaacatatctatcctctcagaccctcgcagcagcagcaactcatacttggctaatgatatggagcagttgtttttccctccctgggcctcactttcttctcctataaaatggaaatcccagatccctggtcctgccgacacgcagctactgagaagaccaaaagaggtgtgtgtgtgtctatgtgtgtgtttcagcactttgtaaatagcaagaagctgtacagattctagttaatgttgtgaataacatcaattaatgtaactagttaattactatgattatcacctcctgatagtgaacattttgagattgggcattcagatgatggggtttcacccaaccttggggcaggtttttaaaaattagctaggcatcaaggccagaccagggctgggggttgggctgtaggcagggacagtcacaggaatgcagaatgcagtcatcagacctgaaaaaacaacactgggggagggggacggtgaaggccaagttcccaatgagggtgagattgggcctggggtctcacccctagtgtggggccccaggtcccgtgcctccccttcccaatgtggcctatggagagacaggcctttctctcagcctctggaagccacctgctcttttgctctagcacctgggtcccagcatctagagcatggagcctctagaagccatgctcacccgcccacatttaattaacagctgagtccctgatgtcatccttatctcgaagagcttagaaacaaagagtgggaaattccactgggcctaccttccttggggatgttcatgggccccagtttccagtttcccttgccagacaagcccatcttcagcagttgctagtccattctccattctggagaatctgctccaaaaagctggccacatctctgaggtgtcagaattaagctgcctcagtaactgctcccccttctccatataagcaaagccagaagctctagctttacccagctctgcctggagactaaggcaaattgggccattaaaagctcagctcctatgttggtattaa

SEQ ID NO: 176035 - DNA, 2992 bp, Homo sapiens
  Payload ID: 14560
  Gene Symbol: RHBDF1
  Gene Name: rhomboid 5 homolog 1 (Drosophila)
  Uniprot ID: Q96CC6
  ENST ID: ENST00000262316
  CDS Start-End: 144-2711
gcattcccgggcgggccggaccggcgggcgggcggggactcggcgcgggccctcccggccagcggcggcagcctcctccccggcgccctcaggaccccccagagcccccggcggcggcagcctgccttgctctgccaggaaccatgagtgaggcccgcagggacagcacgagcagcctgcagcgcaagaagccaccctggctaaagctggacattccctctgcggtgcccctgacggcagaagagcccagcttcctgcagcccctgaggcgacaggctttcctgaggagtgtgagtatgccagccgagacagcccacatctcttcaccccaccatgagctccggcggccggtgctgcaacgccagacgtccatcacacagaccatccgcagggggaccgccgactggtttggagtgagcaaggacagtgacagcacccagaaatggcagcgcaagagcatccgtcactgcagccagcgctacgggaagctgaagccccaggtcctccgggagctggacctgcccagccaggacaacgtgtcgctgaccagcaccgagacgccacccccactctacgtggggccatgccagctgggcatgcagaagatcatagaccccctggcccgtggccgtgccttccgtgtggcagatgacactgcggaaggcctgagtgccccacacactcccgtcacgccgggtgctgcctccctctgctccttctccagctcccgctcaggtttccaccggctcccgcggcggcgcaagcgagagtcggtggccaagatgagcttccgggcggccgcagcgctgatgaaaggccgctccgttagggatggcacctttcgccgggcacagcgtcgaagcttcactccagctagctttctggaggaggacacaactgatttccccgatgagctggacacatccttctttgcccgggaaggtatcctccatgaagagctgtccacatacccggatgaagttttcgagtccccatcggaggcagcgctaaaggactgggagaaggcaccggagcaggcggacctcaccggcggggccctggaccgcagcgagcttgagcgcagccacctgatgctgcccttggagcgaggctggcggaagcagaaggagggcgccgcagccccgcagcccaaggtgcggctccgacaggaggtggtgagcaccgcggggccgcgacggggccagcgtatcgcggtgccggtgcgcaagctcttcgcccgggagaagcggccgtatgggctgggcatggtgggacggctcaccaaccgcacctaccgcaagcgcatcgacagcttcgtcaagcgccagatcgaggacatggacgaccacaggcccttcttcacctactggcttaccttcgtgcactcgctcgtcaccatcctagccgtgtgcatctatggcatcgcgcccgtgggcttctcgcagcatgagacggtggactcggtgctgcggaaccgcggggtctacgagaacgtcaagtacgtgcagcaggagaacttctggatcgggcccagctcggaggccctcatccacctgggcgccaagttttcgccctgcatgcgccaggacccgcaggtgcacagcttcattcgctcggcgcgcgagcgcgagaagcactccgcctgctgcgtgcgcaacgacaggtcgggctgcgtgcagacctcggaggaggagtgctcgtccacgctggcagtgtgggtgaagtggcccatccatcccagcgccccagagcttgcgggccacaagagacagtttggctctgtctgccaccaggatcccagggtgtgtgatgagccctcctccgaagaccctcatgagtggccagaagacatcaccaagtggccgatctgcaccaaaaacagcgctgggaaccacaccaaccatccccacatggactgtgtcatcacaggacggccctgctgcattggcaccaagggcaggtgtgagatcacctcccgggagtactgtgacttcatgaggggctacttccatgaggaggccacgctctgctctcaggtgcactgcatggatgatgtgtgtgggctcctgccttttctcaaccccgaggtgcctgaccagttctaccgcctgtggctatccctcttcctgcacgccgggatcttgcactgcctggtgtccatctgcttccagatgactgtcctgcgggacctggagaagctggcaggctggcaccgcatagccatcatctacctgctgagtggtgtcaccggcaacctggccagtgccatcttcctgccataccgagcagaggtgggtcctgctggctcccagttcggcatcctggcctgcctcttcgtggagctcttccagagctggcagatcctggcgcggccctggcgtgccttcttcaagctgctggctgtggtgctcttcctcttcacctttgggctgctgccgtggattgacaactttgcccacatctcagggttcatcagtggcctcttcctctccttcgccttcttgccctacatcagctttggcaagttcgacctgtaccggaaacgctgccagatcatcatctttcaggtggtcttcctgggcctcctggctggcctggtggtcctcttctacgtctatcctgtccgctgtgagtggtgtgagttcctcacctgcatccccttcactgacaagttctgtgagaagtacgaactggacgctcagctccactgagctggctgcgggctccagcggccgtgtgctccagcaggccagagccagacacgacctccctgagcctcacaggcttacaggagtcacctgctccatgtggggactggcctgtttcctgaacacagacctctttcttgtgccttgttcacttctgttgaacccctcgtactgccgggcatttattatactacttcctgtcataaccttctaacttgtttcttgacgaccacctcatgtggccaataaatggactgggagcgttttagctgccattaacttga

SEQ ID NO: 176036 - DNA, 435 bp, Homo sapiens
  Payload ID: 14560
  Gene Symbol: RHBDF1
  Gene Name: rhomboid 5 homolog 1 (Drosophila)
  ENST ID: ENST00000419764
  CDS Start-End: 25-435
gcctgccttgctctgccaggaaccatgagtgaggcccgcagggacagcacgagcagcctgcagcgcaagaagccaccctggctaaagctggacattccctctgcggtgcccctgacggcagaagagcccagcttcctgcagcccctgaggcgacaggctttcctgaggagtgtgagtatgccagccgagacagcccacatctcttcaccccaccatgagctccggcggccggtgctgcaacgccagacgtccatcacacagaccatccgcagccgacaagtacgcttcgggcgtgtccacactctgcccctcttgggtccccgggctgcccgcagggccttcccacagcgccagtctctctcttggtccctgctcagggggaccgccgactggtttggagtgagcaaggacagtgacagcacccagaaatggcag

SEQ ID NO: 176037 - DNA, 901 bp, Homo sapiens
  Payload ID: 14560
  Gene Symbol: RHBDF1
  Gene Name: rhomboid 5 homolog 1 (Drosophila)
  ENST ID: ENST00000448893
  CDS Start-End: 1-698
gacggccctgctgcattggcaccaagggcaggtgtgagatcacctcccgggagtactgtgacttcatgaggggctacttccatgaggaggccacgctctgctctcaggtgcactgcatggatgatgtgtgtgggctcctgccttttctcaaccccgagatgactgtcctgcgggacctggagaagctggcaggctggcaccgcatagccatcatctacctgctgagtggtgtcaccggcaacctggccagtgccatcttcctgccataccgagcagaggtgggtcctgctggctcccagttcggcatcctggcctgcctcttcgtggagctcttccagagctggcagatcctggcgcggccctggcgtgccttcttcaagctgctggctgtggtgctcttcctcttcacctttgggctgctgccgtggattgacaactttgcccacatctcagggttcatcagtggcctcttcctctccttcgccttcttgccctacatcagctttggcaagttcgacctgtaccggaaacgctgccagatcatcatctttcaggtggtcttcctgggcctcctggctggcctggtggtcctcttctacgtctatcctgtccgctgtgagtggtgtgagttcctcacctgcatccccttcactgacaagttctgtgagaagtacgaactggacgctcagctccactgagctggctgcgggctccagcggccgtgtgctccagcaggccagagccagacacgacctccctgagcctcacaggcttacaggagtcacctgctccatgtggggactggcctgtttcctgaacacagacctctttcttgtgccttgttcacttctgttgaacccctcgtactgccgggcatttattatactacttcctgtcataa

SEQ ID NO: 176038 - DNA, 615 bp, Homo sapiens
  Payload ID: 14560
  Gene Symbol: RHBDF1
  Gene Name: rhomboid 5 homolog 1 (Drosophila)
  ENST ID: ENST00000450643
  CDS Start-End: 128-615
ctcatgctcccaccacaggctggaagcggtgggatgagagttccaactgtggcctgcagagtgggctggcgggctggtccaggacaagagaaagtggtgccaggcctgccttgctctgccaggaaccatgagtgaggcccgcagggacagcacgagcagcctgcagcgcaagaagccaccctggctaaagctggacattccctctgcggtgcccctgacggcagaagagcccagcttcctgcagcccctgaggcgacaggctttcctgaggagtgtgagtatgccagccgagacagcccacatctcttcaccccaccatgagctccggcggccggtgctgcaacgccagacgtccatcacacagaccatccgcagggggaccgccgactggtttggagtgagcaaggacagtgacagcacccagaaatggcagcgcaagagcatccgtcactgcagccagcgctacgggaagctgaagccccaggtcctccgggagctggacctgcccagccaggacaacgtgtcgctgaccagcaccgagacgccacccccactctacgtggggccatgccagctgggcatgcagaagatcatagaccccctggcccgtggccg

SEQ ID NO: 176039 - DNA, 2751 bp, Homo sapiens
  Payload ID: 14560
  Gene Symbol: RHBDF1
  Gene Name: rhomboid 5 homolog 1 (Drosophila)
  ENST ID: ENST00000428730
  CDS Start-End: 25-591
gcctgccttgctctgccaggaaccatgagtgaggcccgcagggacagcacgagcagcctgcagcgcaagaagccaccctggctaaagctggacattccctctgcggtgcccctgacggcagaagagcccagcttcctgcagcccctgaggcgacaggctttcctgaggagtgtgagtatgccagccgagacagcccacatctcttcaccccaccatgagctccggcggccggtgctgcaacgccagacgtccatcacacagaccatccgcagggggaccgccgactggtttggagtgagcaaggacagtgacagcacccagaaatggcagcgcaagagcatccgtcactgcagccagcgctacgggaagctgaagccccaggtcctccgggagctggacctgcccagccaggacaacgtgtcgctgaccagcaccgagacgccacccccactctacgtggggccatgccagctgggcatgcagaagctcccgctcaggtttccaccggctcccgcggcggcgcaagcgagagtcggtggccaagatgagcttccgggcggccgcagcgctgatgaaaggccgctccgttagggatggcacctttcgccgggcacagcgtcgaagcttcactccagctagctttctggaggaggacacaactgatttccccgatgagctggacacatccttctttgcccgggaaggtatcctccatgaagagctgtccacatacccggatgaagttttcgagtccccatcggaggcagcgctaaaggactgggagaaggcaccggagcaggcggacctcaccggcggggccctggaccgcagcgagcttgagcgcagccacctgatgctgcccttggagcgaggctggcggaagcagaaggagggcgccgcagccccgcagcccaaggtgcggctccgacaggaggtggtgagcaccgcggggccgcgacggggccagcgtatcgcggtgccggtgcgcaagctcttcgcccgggagaagcggccgtatgggctgggcatggtgggacggctcaccaaccgcacctaccgcaagcgcatcgacagcttcgtcaagcgccagatcgaggacatggacgaccacaggcccttcttcacctactggcttaccttcgtgcactcgctcgtcaccatcctagccgtgtgcatctatggcatcgcgcccgtgggcttctcgcagcatgagacggtggactcggtgctgcggaaccgcggggtctacgagaacgtcaagtacgtgcagcaggagaacttctggatcgggcccagctcggaggccctcatccacctgggcgccaagttttcgccctgcatgcgccaggacccgcaggtgcacagcttcattcgctcggcgcgcgagcgcgagaagcactccgcctgctgcgtgcgcaacgacaggtcgggctgcgtgcagacctcggaggaggagtgctcgtccacgctggcagtgtgggtgaagtggcccatccatcccagcgccccagagcttgcgggccacaagagacagtttggctctgtctgccaccaggatcccagggtgtgtgatgagccctcctccgaagaccctcatgagtggccagaagacatcaccaagtggccgatctgcaccaaaaacagcgctgggaaccacaccaaccatccccacatggactgtgtcatcacaggacggccctgctgcattggcaccaagggcaggtgtgagatcacctcccgggagtactgtgacttcatgaggggctacttccatgaggaggccacgctctgctctcaggtgcactgcatggatgatgtgtgtgggctcctgccttttctcaaccccgaggtgcctgaccagttctaccgcctgtggctatccctcttcctgcacgccgggatcttgcactgcctggtgtccatctgcttccagatgactgtcctgcgggacctggagaagctggcaggctggcaccgcatagccatcatctacctgctgagtggtgtcaccggcaacctggccagtgccatcttcctgccataccgagcagaggtgggtcctgctggctcccagttcggcatcctggcctgcctcttcgtggagctcttccagagctggcagatcctggcgcggccctggcgtgccttcttcaagctgctggctgtggtgctcttcctcttcacctttgggctgctgccgtggattgacaactttgcccacatctcagggttcatcagtggcctcttcctctccttcgccttcttgccctacatcagctttggcaagttcgacctgtaccggaaacgctgccagatcatcatctttcaggtggtcttcctgggcctcctggctggcctggtggtcctcttctacgtctatcctgtccgctgtgagtggtgtgagttcctcacctgcatccccttcactgacaagttctgtgagaagtacgaactggacgctcagctccactgagctggctgcgggctccagcggccgtgtgctccagcaggccagagccagacacgacctccctgagcctcacaggcttacaggagtcacctgctccatgtggggactggcctgtttcctgaacacagacctctttcttgtgccttgttcacttctgttgaacccctcgtactgccgggcatttattatactacttcctgtcataaccttctaacttgtttcttgacgaccacctcatgtggccaataaatggactgggagcgttttagctgccattaact

SEQ ID NO: 176040 - DNA, 816 bp, Homo sapiens
  Payload ID: 14560
  Gene Symbol: RHBDF1
  Gene Name: rhomboid 5 homolog 1 (Drosophila)
  ENST ID: ENST00000417043
  CDS Start-End: 23-289
ctgccttgctctgccaggaaccatgagtgaggcccgcagggacagcacgagcagcctgcagcgcaagaagccaccctggctaaagctggacattccctctgcggtgcccctgacggcagaagagcccagcttcctgcagcccctgaggcgacaggctttcctgaggagtgtgagtatgccagccgagacagcccacatctcttcaccccaccatgagctccggcggccggtgctgcaacgccagacgtccatcacacagaccatccgcagaccctggtccctggagtgactacaggcctgggggcagcatgctgccccggaggagggcctttgaagtcccctgcctgggaggggcgatctggccgccccttgctgagtccctgccatgccagggggaccgccgactggtttggagtgagcaaggacagtgacagcacccagaaatggcagcgcaagagcatccgtcactgcagccagcgctacgggaagctgaagccccaggtcctccgggagctggacctgcccagccaggacaacgtgtcgctgaccagcaccgagacgccacccccactctacgtggggccatgccagctgggcatgcagaagatcatagaccccctggcccgtggccgtgccttccgtgtggcagatgacactgcggaaggcctgagtgccccacacactcccgtcacgccgggtgctgcctccctctgctccttctccagctcccgctcaggtttccaccggctcccgcggcggcgcaagcgagagtcggtggccaagatgagcttccgggcggccgcagcgctgatgaaa

SEQ ID NO: 176041 - DNA, 3582 bp, Homo sapiens
  Payload ID: 14561
  Gene Symbol: RHBDF2
  Gene Name: rhomboid 5 homolog 2 (Drosophila)
  Uniprot ID: Q6PJF5
  ENST ID: ENST00000313080
  CDS Start-End: 275-2845
gccgctcgcaggcgccgcacggagttgcgtcccggggacttggggccgcagggagctgtgagtacccaggaagctgcaccgtgtggcctggagctgtctatctgtccttccagccacctgtctgtccagccacccttccacagactgaggcttgacaccggagcatctgtacagagcaaggagaagacaagaacatgctctaaagcccttcacagcaagacccaggaagccgcgggcaaactcagactcgaagccctcccgcctcctgcccacaatggcctctgctgacaagaatggcgggagcgtgtcctctgtgtccagcagccgcctgcagagccggaagccacccaacctctccatcaccatcccgccacccgagaaagagacccaggcccctggcgagcaggacagcatgctgcctgagggttttcagaataggaggctaaagaaaagccagcccaggacctgggctgcacacaccaccgcctgccctccctccttcctccccaagaggaagaacccagcctacttgaagagcgtcagcctccaggagccacgcagccgatggcaggagagttcagagaagcgccctggcttccgccgccaggcctcactgtcccagagcatccgcaagggcgcagcccagtggtttggagtcagcggcgactgggaggggcagcggcagcagtggcagcgccgcagcctgcaccactgcagcatgcgctacggccgcctgaaggcctcgtgccagcgtgacctggagctccccagccaggaggcaccgtccttccagggcactgagtccccaaagccctgcaagatgcccaagattgtggatccgctggcccggggccgggccttccgccacccggaggagatggacaggccccacgccccgcacccaccgctgacccccggagtcctgtccctcacctccttcaccagtgtccgttctggctactcccacctgccacgccgcaagagaatgtctgtggcccacatgagcttgcaagctgccgctgccctcctcaaggggcgctcggtgctggatgccaccggacagcggtgccgggtggtcaagcgcagctttgccttcccgagcttcctggaggaggatgtggtcgatggggcagacacgtttgactcctccttttttagtaaggaagaaatgagctccatgcctgatgatgtctttgagtcccccccactctctgccagctacttccgagggatcccacactcagcctcccctgtctcccccgatggggtgcaaatccctctgaaggagtatggccgagccccagtccccgggccccggcgcggcaagcgcatcgcctccaaggtgaagcactttgcctttgatcggaagaagcggcactacggcctcggcgtggtgggcaactggctgaaccgcagctaccgccgcagcatcagcagcactgtgcagcggcagctggagagcttcgacagccaccggccctacttcacctactggctgaccttcgtccatgtcatcatcacgctgctggtgatttgcacgtatggcatcgcacccgtgggctttgcccagcacgtcaccacccagctggtgctgcggaacaaaggtgtgtacgagagcgtgaagtacatccagcaggagaacttctgggttggccccagctcgattgacctgatccacctgggggccaagttctcaccctgcatccggaaggacgggcagatcgagcagctggtgctgcgcgagcgagacctggagcgggactcaggctgctgtgtccagaatgaccactccggatgcatccagacccagcggaaggactgctcggagactttggccacttttgtcaagtggcaggatgacactgggccccccatggacaagtctgatctgggccagaagcggacttcgggggctgtctgccaccaggaccccaggacctgcgaggagccagcctccagcggtgcccacatctggcccgatgacatcactaagtggccgatctgcacagagcaggccaggagcaaccacacaggcttcctgcacatggactgcgagatcaagggccgcccctgctgcatcggcaccaagggcagctgtgagatcaccacccgggaatactgtgagttcatgcacggctatttccatgaggaagcaacactctgctcccaggtgcactgcttggacaaggtgtgtgggctgctgcccttcctcaaccctgaggtcccagatcagttctacaggctctggctgtctctcttcctacatgctggcgtggtgcactgcctcgtgtctgtggtctttcaaatgaccatcctgagggacctggagaagctggccggctggcaccgtatcgccatcatcttcatcctcagtggcatcacaggcaacctcgccagtgccatctttctcccataccgggcagaggtgggcccggccggctcacagttcggcctcctcgcctgcctcttcgtggagctcttccagagctggccgctgctggagaggccctggaaggccttcctcaacctctcggccatcgtgctcttcctgttcatctgtggcctcctgccctggatcgacaacatcgcccacatcttcggcttcctcagtggcctgctgctggccttcgccttcctgccctacatcaccttcggcaccagcgacaagtaccgcaagcgggcactcatcctggtgtcactgctggcctttgccggcctcttcgccgccctcgtgctgtggctgtacatctaccccattaactggccctggatcgagcacctcacctgcttccccttcaccagccgcttctgcgagaagtatgagctggaccaggtgctgcactgaccgctgggccacacggctgcccctcagccctgctggaacagggtctgcctgcgagggctgccctctgcagagcgctctctgtgtgccagagagccagagacccaagacagggcccgggctctggacctgggtgcccccctgccaggcgaggctgactccgcgtgagatggttggttaaggcggggtttttctggggcgtgaggcctgtgagatcctgacccaagctcaggcacacccaaggcacctgcctctctgagtcttgggtctcagttcctaatatcccgctccttgctgagaccatctcctggggcagggtccttttcttcccaggtcctcagcgctgcctctgctggtgccttctcccccactactactggagcgtgcccttgctggggacgtggctgtgccctcagttgcccccagggctgggtgcccaccatgccccttcctctttctcctcctacctctgccctgtgagcccatccataaggctctcagatgggacattgtgggaaaggctttggccatggtctgggggcagagaacaaggggggagacacaagtagacctcaggtagaacgacactgggcggagccaccccagggcctgctcccagggagtgctcgaggcgcatcaggcccgttttttaccagtttatatcacggtcttcatttttaaaagtaacgctaactttgtacggacgatgtctcatggattaaataatattctttatggca

SEQ ID NO: 176042 - DNA, 613 bp, Homo sapiens
  Payload ID: 14561
  Gene Symbol: RHBDF2
  Gene Name: rhomboid 5 homolog 2 (Drosophila)
  ENST ID: ENST00000591697
  CDS Start-End: 392-613
gaggagccaccgcccagccgctcgcaggcgccgcacggagttgcgtcccggggacttggggccgcagggaggttcccagaccagaggactgttgttaggtgattggctgtgaacaccctgaggccagtgcccctcgctgcttggcactcggagatgcctgattagcacctttaatcccttaccagtgaggcaggtggaattggccccattttacagatggggagactgagccacctgtctgtccagccacccttccacagactgaggcttgacaccggagcatctgtacagagcaaggagaagacaagaacatgctctaaagcccttcacagcaagacccaggaagccgcgggcaaactcagactcgaagccctcccgcctcctgcccacaatggcctctgctgacaagaatggcgggagcgtgtcctctgtgtccagcagccgcctgcagagccggaagccacccaacctctccatcaccatcccgccacccgagaaagagacccaggcccctggcgagcaggacagcatgctgcctgagaggaagaacccagcctacttgaagagcgtcagcctccaggagccacgcagccgatggcaggagagttcagag

SEQ ID NO: 176043 - DNA, 574 bp, Homo sapiens
  Payload ID: 14561
  Gene Symbol: RHBDF2
  Gene Name: rhomboid 5 homolog 2 (Drosophila)
  ENST ID: ENST00000590322
  CDS Start-End: 489-574
aaaaataacaggggccatcttgactctaatgttctgctccaatcaggttcccagaccagaggactgttgttaggtgattggctgtgaacaccctgaggccagtgcccctcgctgcttggcactcggagatgcctgattagcacctttaatcccttaccagtgaggcaggtggaattggccccattttacagatggggagactgaggtgaggaaggttaaagcactcagtggtgggcatgccccctggagccggccctcctttcttccagctgtgagtacccaggaagctgcaccgtgtggcctggagctgtctatctgtccttccagccacctgtctgtccagccacccttccacagactgaggcttgacaccggagcatctgtacagagcaaggagaagacaagaacatgctctaaagcccttcacagcaagacccaggaagccgcgggcaaactcagactcgaagccctcccgcctcctgcccacaatggcctctgctgacaagaatggcgggagcgtgtcctctgtgtccagcagccgcctgcagagccggaagccacccaacctctccat

SEQ ID NO: 176044 - DNA, 545 bp, Homo sapiens
  Payload ID: 14561
  Gene Symbol: RHBDF2
  Gene Name: rhomboid 5 homolog 2 (Drosophila)
  ENST ID: ENST00000591255
  CDS Start-End: 506-545
accgcccagccgctcgcaggcgccgcacggagttgcgtcccggggacttggggccgcagggaggttcccagaccagaggactgttgttaggtgattggctgtgaacaccctgaggccagtgcccctcgctgcttggcactcggagatgcctgattagcacctttaatcccttaccagtgaggcaggtggaattggccccattttacagatggggagactgaggtgaggaaggttaaagcactcagtggtgggcatgccccctggagccggccctcctttcttccagctgtgagtacccaggaagctgcaccgtgtggcctggagctgtctatctgtccttccagccacctgtctgtccagccacccttccacagactgaggcttgacaccggagcatctgtacagagcaaggagaagacaagaacatgctctaaagcccttcacagcaagacccaggaagccgcgggcaaactcagactcgaagccctcccgcctcctgcccacaatggcctctgctgacaagaatggcgggagcgtgtcctctg

SEQ ID NO: 176045 - DNA, 589 bp, Homo sapiens
  Payload ID: 14561
  Gene Symbol: RHBDF2
  Gene Name: rhomboid 5 homolog 2 (Drosophila)
  ENST ID: ENST00000591879
  CDS Start-End: 371-589
actataaccgctgcctcctgggttcaagccatcctgcctcagcctcccgagtagctgggattacaggcacgtgccaccacgcctagctaattttttgtatttttagtagagacggggtttcaccatgttggccaggatggtctcgatctcctgacctcgtgatccccccacctcggcctcccaaagtgctgggattacaggcgtgagccaccgcgcccagccgcccagagatgtttgaaccaactttaggcaagttggttcttggtctgggctgcgtgccctggcgtcagggtcctgacactgcgccaccccgcaccgcccaccgctgctctcccggtctccattccagccctcccgcctcctgcccacaatggcctctgctgacaagaatggcgggagcgtgtcctctgtgtccagcagccgcctgcagagccggaagccacccaacctctccatcaccatcccgccacccgagaaagagacccaggcccctggcgagcaggacagcatgctgcctgagaggaagaacccagcctacttgaagagcgtcagcctccaggagccacgcagccgatggcaggagagttca

SEQ ID NO: 176046 - DNA, 568 bp, Homo sapiens
  Payload ID: 14561
  Gene Symbol: RHBDF2
  Gene Name: rhomboid 5 homolog 2 (Drosophila)
  ENST ID: ENST00000585989
  CDS Start-End: 231-568
ggagccaccgcccagccgctcgcaggcgccgcacggagttgcgtcccggggacttggggccgcagggagccacctgtctgtccagccacccttccacagactgaggcttgacaccggagcatctgtacagagcaaggagaagacaagaacatgctctaaagcccttcacagcaagacccaggaagccgcgggcaaactcagactcgaagccctcccgcctcctgcccacaatggcctctgctgacaagaatggcgggagcgtgtcctctgtgtccagcagccgcctgcagagccggaagccacccaacctctccatcaccatcccgccacccgagaaagagacccaggcccctggcgagcaggacagcatgctgcctgagaggaagaacccagcctacttgaagagcgtcagcctccaggagccacgcagccgatggcaggagagttcagagaagcgccctggcttccgccgccaggcctcactgtcccagagcatccgcaagggcgcagcccagtggtttggagtcagcggcgactgggaggggcagcggcagcagtggcagcgccg

SEQ ID NO: 176047 - DNA, 734 bp, Homo sapiens
  Payload ID: 14561
  Gene Symbol: RHBDF2
  Gene Name: rhomboid 5 homolog 2 (Drosophila)
  ENST ID: ENST00000590288
  CDS Start-End: 656-734
gacttggggccgcagggaggtgagcgcggggcgacgagcggggcaggactcacggccgcccagccgcaggcgccggaagggtcccgaggttgtgcccgagcctgccctggagcggtggtgcgcggccaggaagggtgcccagtgcccggtgcccgccctgcggagcgcctgggtcccacgtgggctcggctggaggcccgggctggctcagacggcgccggcggggccgctggacccggtctgctggcccctagggctcggctcggacaggacgcctaaggggtccctgggcgacggggcgccagatgtaggggcaagacgattgggcagagatttaaacctccggaggaagagaggagactgcgcagggcagtcccgcctgcgtcccagaagtgcctgcagttcagacccttctctcccctccactttctcccggctgtgagtacccaggaagctgcaccgtgtggcctggagctgtctatctgtccttccagccacctgtctgtccagccacccttccacagactgaggcttgacaccggagcatctgtacagagcaaggagaagacaagaacatgctctaaagcccttcacagcaagacccaggaagccgcgggcaaactcagactcgaagccctcccgcctcctgcccacaatggcctctgctgacaagaatggcgggagcgtgtcctctgtgtccagcagccgcctgcagagccggaagccacccaacc

SEQ ID NO: 176048 - DNA, 572 bp, Homo sapiens
  Payload ID: 14561
  Gene Symbol: RHBDF2
  Gene Name: rhomboid 5 homolog 2 (Drosophila)
  ENST ID: ENST00000585701
  CDS Start-End: 431-572
accctagcatcctgtgattcagccgcgaagacgtggccccaagcctcccaccgccctccttctgtcctgactgcccactcccagggacaccaggttcccagaccagaggactgttgttaggtgattggctgtgaacaccctgaggccagtgcccctcgctgcttggcactcggagatgcctgattagcacctttaatcccttaccagtgagctgtgagtacccaggaagctgcaccgtgtggcctggagctgtctatctgtccttccagccacctgtctgtccagccacccttccacagactgaggcttgacaccggagcatctgtacagagcaaggagaagacaagaacatgctctaaagcccttcacagcaagacccaggaagccgcgggcaaactcagactcgaagccctcccgcctcctgcccacaatggcctctgctgacaagaatggcgggagcgtgtcctctgtgtccagcagccgcctgcagagccggaagccacccaacctctccatcaccatcccgccacccgagaaagagacccaggcccctggcgagcaggacagcatgc

SEQ ID NO: 176049 - DNA, 3599 bp, Homo sapiens
  Payload ID: 14561
  Gene Symbol: RHBDF2
  Gene Name: rhomboid 5 homolog 2 (Drosophila)
  Uniprot ID: Q6PJF5
  ENST ID: ENST00000591885
  CDS Start-End: 552-3035
acttggcctgaggatgagggcgctggaagaaggggatgggagattgggtgctttttcttgatggggaggggcgacttgaagacggcaatcaagacctagatgacgtgtttggtctggggtggagtgaggacgccaagagggaaaggacggcgccctgaagagaccagctcaggcgaaaacagggctctgcccaggcggggacccagctgggtggagggcggaggcaggaacccaggaagccgactgagcaaagactgcgtccaggccccgcccccatgagcccggccacgccccctggagcccagccccgcctcccggccgcccgcgcgcagctgtgagtacccaggaagctgcaccgtgtggcctggagctgtctatctgtccttccagccacctgtctgtccagccacccttccacagactgaggcttgacaccggagcatctgtacagagcaaggagaagacaagaacatgctctaaagcccttcacagcaagacccaggaagccgcgggcaaactcagactcgaagccctcccgcctcctgcccacaatggcctctgctgacaagaatggcgggagcgtgtcctctgtgtccagcagccgcctgcagagccggaagccacccaacctctccatcaccatcccgccacccgagaaagagacccaggcccctggcgagcaggacagcatgctgcctgagaggaagaacccagcctacttgaagagcgtcagcctccaggagccacgcagccgatggcaggagagttcagagaagcgccctggcttccgccgccaggcctcactgtcccagagcatccgcaagggcgcagcccagtggtttggagtcagcggcgactgggaggggcagcggcagcagtggcagcgccgcagcctgcaccactgcagcatgcgctacggccgcctgaaggcctcgtgccagcgtgacctggagctccccagccaggaggcaccgtccttccagggcactgagtccccaaagccctgcaagatgcccaagattgtggatccgctggcccggggccgggccttccgccacccggaggagatggacaggccccacgccccgcacccaccgctgacccccggagtcctgtccctcacctccttcaccagtgtccgttctggctactcccacctgccacgccgcaagagaatgtctgtggcccacatgagcttgcaagctgccgctgccctcctcaaggggcgctcggtgctggatgccaccggacagcggtgccgggtggtcaagcgcagctttgccttcccgagcttcctggaggaggatgtggtcgatggggcagacacgtttgactcctccttttttagtaaggaagaaatgagctccatgcctgatgatgtctttgagtcccccccactctctgccagctacttccgagggatcccacactcagcctcccctgtctcccccgatggggtgcaaatccctctgaaggagtatggccgagccccagtccccgggccccggcgcggcaagcgcatcgcctccaaggtgaagcactttgcctttgatcggaagaagcggcactacggcctcggcgtggtgggcaactggctgaaccgcagctaccgccgcagcatcagcagcactgtgcagcggcagctggagagcttcgacagccaccggccctacttcacctactggctgaccttcgtccatgtcatcatcacgctgctggtgatttgcacgtatggcatcgcacccgtgggctttgcccagcacgtcaccacccagctggtgctgcggaacaaaggtgtgtacgagagcgtgaagtacatccagcaggagaacttctgggttggccccagctcgattgacctgatccacctgggggccaagttctcaccctgcatccggaaggacgggcagatcgagcagctggtgctgcgcgagcgagacctggagcgggactcaggctgctgtgtccagaatgaccactccggatgcatccagacccagcggaaggactgctcggagactttggccacttttgtcaagtggcaggatgacactgggccccccatggacaagtctgatctgggccagaagcggacttcgggggctgtctgccaccaggaccccaggacctgcgaggagccagcctccagcggtgcccacatctggcccgatgacatcactaagtggccgatctgcacagagcaggccaggagcaaccacacaggcttcctgcacatggactgcgagatcaagggccgcccctgctgcatcggcaccaagggcagctgtgagatcaccacccgggaatactgtgagttcatgcacggctatttccatgaggaagcaacactctgctcccaggtgcactgcttggacaaggtgtgtgggctgctgcccttcctcaaccctgaggtcccagatcagttctacaggctctggctgtctctcttcctacatgctggcgtggtgcactgcctcgtgtctgtggtctttcaaatgaccatcctgagggacctggagaagctggccggctggcaccgtatcgccatcatcttcatcctcagtggcatcacaggcaacctcgccagtgccatctttctcccataccgggcagaggtgggcccggccggctcacagttcggcctcctcgcctgcctcttcgtggagctcttccagagctggccgctgctggagaggccctggaaggccttcctcaacctctcggccatcgtgctcttcctgttcatctgtggcctcctgccctggatcgacaacatcgcccacatcttcggcttcctcagtggcctgctgctggccttcgccttcctgccctacatcaccttcggcaccagcgacaagtaccgcaagcgggcactcatcctggtgtcactgctggcctttgccggcctcttcgccgccctcgtgctgtggctgtacatctaccccattaactggccctggatcgagcacctcacctgcttccccttcaccagccgcttctgcgagaagtatgagctggaccaggtgctgcactgaccgctgggccacacggctgcccctcagccctgctggaacagggtctgcctgcgagggctgccctctgcagagcgctctctgtgtgccagagagccagagacccaagacagggcccgggctctggacctgggtgcccccctgccaggcgaggctgactccgcgtgagatggttggttaaggcggggtttttctggggcgtgaggcctgtgagatcctgacccaagctcaggcacacccaaggcacctgcctctctgagtcttgggtctcagttcctaatatcccgctccttgctgagaccatctcctggggcagggtccttttcttcccaggtcctcagcgctgcctctgctggtgccttctcccccactactactggagcgtgcccttgctggggacgtggctgtgccctcagttgcccccagggctgggtgcccaccatgccccttcctctttctcctcctacctctgccctgtgagcccatccataaggctctcagatgggacattgtgggaaaggctttggccatggtctgggggcagagaacaaggggggagacacaagt

SEQ ID NO: 176050 - DNA, 582 bp, Homo sapiens
  Payload ID: 14561
  Gene Symbol: RHBDF2
  Gene Name: rhomboid 5 homolog 2 (Drosophila)
  ENST ID: ENST00000591860
  CDS Start-End: 1-261
ctgcccttcctcaaccctgaggtcccagatcagttctacaggctctggctgtctctcttcctacatgctggcgtggtgcactgcctcgtgtctgtggtctttcaaatgaccatcctgagggacctggagaagctggccggctggcaccgtatcgccatcatcttcatcctcagtggcatcacaggcaacctcgccagtgccatctttctcccataccgggcagagcctcaggggtccccatgcctgccagggaggagctgatcgatgggatgacccagggtgcaggcccggcccaggccacccacctgatgcctgaagccacgtctcccctgccccgccccaggtgggcccggccggctcacagttcggcctcctcgcctgcctcttcgtggagctcttccagagctggccgctgctggagaggccctggaaggccttcctcaacctctcggccatcgtgctcttcctgttcatctgtggcctcctgccctggatcgacaacatcgcccacatcttcggcttcctcagtggcctgctgctggccttcgccttcctgccctacatcaccttcggcaccagcga

SEQ ID NO: 176051 - DNA, 935 bp, Homo sapiens
  Payload ID: 14561
  Gene Symbol: RHBDF2
  Gene Name: rhomboid 5 homolog 2 (Drosophila)
  ENST ID: ENST00000592123
  CDS Start-End: 381-935
gcccagccgctcgcaggcgccgcacggagttgcgtcccggggacttggggccgcagggaggttcccagaccagaggactgttgttaggtgattggctgtgaacaccctgaggccagtgcccctcgctgcttggcactcggagatgcctgattagcacctttaatcccttaccagtgaggcaggtggaattggccccattttacagatggggagactgagccacctgtctgtccagccacccttccacagactgaggcttgacaccggagcatctgtacagagcaaggagaagacaagaacatgctctaaagcccttcacagcaagacccaggaagccgcgggcaaactcagactcgaagccctcccgcctcctgcccacaatggcctctgctgacaagaatggcgggagcgtgtcctctgtgtccagcagccgcctgcagagccggaagccacccaacctctccatcaccatcccgccacccgagaaagagacccaggcccctggcgagcaggacagcatgctgcctgagggttttcagaataggaggctaaagaaaagccagcccaggacctgggctgcacacaccaccgcctgccctccctccttcctccccaagaggaagaacccagcctacttgaagagcgtcagcctccaggagccacgcagccgatggcaggagagttcagagaagcgccctggcttccgccgccaggcctcactgtcccagagcatccgcaagggcgcagcccagtggtttggagtcagcggcgactgggaggggcagcggcagcagtggcagcgccgcagcctgcaccactgcagcatgcgctacggccgcctgaaggcctcgtgccagcgtgacctggagctccccagccaggaggcaccgtccttccagggcactgagtccccaaagccctgcaagatgcccaag

SEQ ID NO: 176052 - DNA, 629 bp, Homo sapiens
  Payload ID: 14561
  Gene Symbol: RHBDF2
  Gene Name: rhomboid 5 homolog 2 (Drosophila)
  ENST ID: ENST00000589526
  CDS Start-End: 361-629
gtggcaagggagctggggagagaagcagtttccttgtccccagccctcaccctagcatcctgtgattcagccgcgaagacgtggccccaagcctcccaccgccctccttctgtcctgactgcccactcccagggacaccagctgtgagtacccaggaagctgcaccgtgtggcctggagctgtctatctgtccttccagccacctgtctgtccagccacccttccacagactgaggcttgacaccggagcatctgtacagagcaaggagaagacaagaacatgctctaaagcccttcacagcaagacccaggaagccgcgggcaaactcagactcgaagccctcccgcctcctgcccacaatggcctctgctgacaagaatggcgggagcgtgtcctctgtgtccagcagccgcctgcagagccggaagccacccaacctctccatcaccatcccgccacccgagaaagagacccaggcccctggcgagcaggacagcatgctgcctgagaggaagaacccagcctacttgaagagcgtcagcctccaggagccacgcagccgatggcaggagagttcagagaagcgccctggcttccgccgccaggcctcactgtcccagagcatccg

SEQ ID NO: 176053 - DNA, 554 bp, Homo sapiens
  Payload ID: 14561
  Gene Symbol: RHBDF2
  Gene Name: rhomboid 5 homolog 2 (Drosophila)
  ENST ID: ENST00000591192
  CDS Start-End: 414-554
accctagcatcctgtgattcagccgcgaagacgtggccccaagcctcccaccgccctccttctgtcctgactgcccactcccagggacaccaggttcccagaccagaggactgttgttaggtgattggctgtgaacaccctgaggccagtgcccctcgctgcttggcactcggagatgcctgattagcacctttaatcccttaccagtgaggcaggtggaattggccccattttacagatggggagactgagccacctgtctgtccagccacccttccacagactgaggcttgacaccggagcatctgtacagagcaaggagaagacaagaacatgctctaaagcccttcacagcaagacccaggaagccgcgggcaaactcagactcgaagccctcccgcctcctgcccacaatggcctctgctgacaagaatggcgggagcgtgtcctctgtgtccagcagccgcctgcagagccggaagccacccaacctctccatcaccatcccgccacccgagaaagagacccaggcccctggcgagcaggacagcatg

SEQ ID NO: 176054 - DNA, 4883 bp, Homo sapiens
  Payload ID: 14562
  Gene Symbol: RHBDD1
  Gene Name: rhomboid domain containing 1
  Uniprot ID: Q8TEB9
  ENST ID: ENST00000341329
  CDS Start-End: 243-1190
acaactaagcatgcgccgcggccgagccgtccgctttaaggccctcccctcccgcacccggccccaggaacccggggcgccccggatcgggaacgtgcgtgatgacgcacgtgcgcgcgaagacgtggggacgcaggcgggtcgtagagagcgttcagccgtctgtatatctccccagatacctgaaactgaccacctgagtacgttttcccattgctgagctgtttccctgatatctggccatgcaacggagatcaagagggataaatactggacttattctactcctttctcaaatcttccatgttgggatcaacaatattccacctgtcaccctagcaactttggccctcaacatctggttcttcttgaaccctcagaagccactgtatagctcctgccttagtgtggagaagtgttaccagcaaaaagactggcagcgtttactgctctctccccttcaccatgctgatgattggcatttgtatttcaatatggcatccatgctctggaaaggaataaatctagaaagaagactgggaagtagatggtttgcctatgttatcaccgcattttctgtacttactggagtggtatacctgctcttgcaatttgctgttgccgaatttatggatgaacctgacttcaaaaggagctgtgctgtaggtttctcaggagttttgtttgctttgaaagttcttaacaaccattattgccctggaggctttgtcaacattttgggctttcctgtaccgaacagatttgcttgttgggtcgaacttgtggctattcatttattctcaccagggacttccttcgctgggcatctggctgggattcttgttggactaatgtacactcaagggcctctgaagaaaatcatggaagcatgtgcaggcggtttttcctccagtgttggttacccaggacggcaatactactttaatagttcaggcagctctggatatcaggattattatccgcatggcaggccagatcactatgaagaagcacccaggaactatgacacgtacacagcaggactgagtgaagaagaacagctcgagagagcattacaagccagcctctgggaccgaggaaataccagaaatagcccaccaccctacgggtttcatctctcaccagaagaaatgaggagacagcggcttcacagattcgatagccagtgaggtggcatcttgggaagacatggcctattcgtgtaattattgcccatttggctcattccccaagcccctaattcattttaattcattttaaacaaaagcagagtacaccggtattgctccagatcgctcacatcacctgggacagtcccatggcccctatgagtcaactcacagcttgcggggagtgggccttctcctggccttgttcttgctcataaacaggtcacttcctccatgaagagaccagtttccacgctcccatctctcactgctgactcagcgatgcctctgcctcggtctgcttttgaagactgtgaccttcaccaggaggttttacttacaccagtcgggaagattagtccctcattctgcctggagtgccccgtgtttgacttggcagcgggtgtggagccatccccgcgtcctcctggcgcattgccactgtggctgtccaggaacaggatgtggctgccttggccgaatgttgtcctactctccccaaccccggcgcctcagctcctcagctcctcgggcccctgcgtctggctggtgtttgcagggctttcgctctgctctggtattgctctgcctttatagaaagtcttattgaagaagtgtaagaaagacctaaggtggggaagactcctacacacaccattagtatcagtgacaccagcaatgtaggttcccagccccttcccagtggcagcttgtgtgtccaggagataggacatcatttaacgcatcagcaaagtagcagcagatgccacatacagagtagagcgaaggcatttggtggatcggtcactagagatctatcttgcagaaagtatgtttttcctcataaaagtgcctcttaattggccattgtaccagccacttgtcctagccaaatgtccaaaacacgcccttgggccccgccacgttacaatccacagattgtctgtctgagtcgtttaaggcatttcctggtgcttgtgttccatgaataaaaggacaaagtcagaagatcactgatgtcttactgtcaacagagatattttaaaagagagaagcaggaaaagatcttccttttttgatctacaacttatatagttttctgattatgcacataatagatatgccttccagatgcataaggcaaacatctggaaagaaatatacccaaatcttagcaggggttatctttgggagtggagtacatgggattttgctttcttcatttttataattttatattactgtcttggaagatgtgtttatgtgtgtgtgttacttttacaatcaggaaaacatatttaataacatatagtcaagaaaacagacttaaaaataaatactatgtgtccattgagaaaattcacaatataaacagaaatacaaataaatacatacacaattttaaagtcacctgtagccctacccttagaggtacccagggttaacattttggtggtattgtcttatcaatttttccgttgatacattcagcaaatttggagcacattgaccatggagttttgtgtccaaatccaatctgaatttacctggaagaggccttgacacctgcatggaaatgagctaagaaaaccactggagccttgggagctctttggcctcctggctggcccagtaatatctgagctcctttggttaatttataactgatataaaactacatcttctttataatataaattgtacctgtgagtctagaagctttaaatgtgtttaaattaaaatattcaagctaaatgttactgctctctcccaaattctgtaagtttgactcccgttaccccaattagaagtaacttctttgtttcatgccacttttatagcatttggtaattctgctataacacatcttgcccctattattaactgtgcacagctacacaaaggtgtgccttctacgtgggaacatggattgtgaatgactctgtaatgaggcctgagtcttagttatctttccactcactccccgtctcccctttccaaccccaaaggctcacgataggggctcactaaatgtcagtgtttcaccaaagtattttttccattgtattaagagtccagtcactgtatatggaagtattttattttttatttttttatatcacttgagtccactagtagtacttccttgctctgtttgacttgtcagatacaaagacacgggattagattttgggtggtaaaattgtgatacgcatggctgttgatggagtggaacatcttagtgatgtgagaaaggtcattttagttataaatgtaaaccaattactttagcacaacaataaagatgttctggaaattattataattattttagttaatggacttgcctgtaacaagtgcttatgtttggaatgtccattttattttattttcctctacaataaggaatccctaaagttatgccaacaaactggaattggattgagaaagacaaaagcaagtgagcaagtgtattagactaattatctctagtagggaataagcacttagagctaattttttaatttggtttatttattagtagctccctgattgtctgttaagcccctggttcccacagtttggtgtggtcagtcaacttaagcgaccttttaatgcagaatctttacttggttctgaagaggaggcagtagttaaaattgcttcctcttaatgactctgaatgtattgcctgtgattccaaagttgtacataattgttcagacctcctccatccttttaaattgcctgctgcagtaaataactagtttgagtagaactagatcctgtctatctatttggcacatgttctgctgcctggggagtaagcaagctaaagggatgagaaagaccacctccccctaccctggaaattgcactgcaaggcagggcgagaatggggtagctggcagacctggcctccttgttcccagtcttagtttttcttgagagattcagtattcagtaaagaatagcattcaattagtcaaaaaatatatatataacttcttcctttcccttcccatgaatcattgcagtcattccctaagtttcttctctttttttttcatggctgctagtattttattttagaatcacagactctcagcttagagagtcacagtatctcaattatttgctctgttcaatacttaacaatacctcctcactcaattctacataactccagcttagtcttccaaaattcactttcatgatgccactcagcatctcaaatacctttcattggctctctgctgccaaaggataaaggtcaaagtcattagcctcaacagtgggcttcaaccagcctttggacctcagccccatttatccatcacagaggctggtaactagtctcactgctcaggctgtgagtgttcctgatcttgtgacattctgtgctgtgcttttacatggaacagctctttcctctctcttggcccattcagatcctcctcatccagcccccatctgaatcctgtaacagacacaaccacatctacacagtttccacataccacttggaattgctggttatgctgcaatgagagaatgtctttgtctttaaattgtaagcttcatgagggcagggaccatctgtttctctgtctctcctcacagtgccttgagcagtacgttgtctggaatgtcagaaccaataaatacttgtggattgaaacaaaaagagaa

SEQ ID NO: 176055 - DNA, 5151 bp, Homo sapiens
  Payload ID: 14562
  Gene Symbol: RHBDD1
  Gene Name: rhomboid domain containing 1
  Uniprot ID: Q8TEB9
  ENST ID: ENST00000392062
  CDS Start-End: 525-1472
ggccgagccgtccgctttaaggccctcccctcccgcacccggccccaggaacccggggcgccccggatcgggaacgtgcgtgatgacgcacgtgcgcgcgaagacgtggggacgcaggcgggtcgtagagagcgggtccattgtagggggagaaagaaatattcaggatttaaagcagctgctctaaaggctacattcactgcaatgttgagaagggagcctcttaaacagaatcttacctgtaaaactcaggagccgagaagctttaagaacagtgaggttgaagggcacaggctcttggtccttggcagcgatattaggaggcgtgcctagggaacctcggattccggggagctggacgtgaaactctgtggtggaatagaaatcctcagggcatgagctatacctaaaacgtaatggtattaagaattctggttcagccgtctgtatatctccccagatacctgaaactgaccacctgagtacgttttcccattgctgagctgtttccctgatatctggccatgcaacggagatcaagagggataaatactggacttattctactcctttctcaaatcttccatgttgggatcaacaatattccacctgtcaccctagcaactttggccctcaacatctggttcttcttgaaccctcagaagccactgtatagctcctgccttagtgtggagaagtgttaccagcaaaaagactggcagcgtttactgctctctccccttcaccatgctgatgattggcatttgtatttcaatatggcatccatgctctggaaaggaataaatctagaaagaagactgggaagtagatggtttgcctatgttatcaccgcattttctgtacttactggagtggtatacctgctcttgcaatttgctgttgccgaatttatggatgaacctgacttcaaaaggagctgtgctgtaggtttctcaggagttttgtttgctttgaaagttcttaacaaccattattgccctggaggctttgtcaacattttgggctttcctgtaccgaacagatttgcttgttgggtcgaacttgtggctattcatttattctcaccagggacttccttcgctgggcatctggctgggattcttgttggactaatgtacactcaagggcctctgaagaaaatcatggaagcatgtgcaggcggtttttcctccagtgttggttacccaggacggcaatactactttaatagttcaggcagctctggatatcaggattattatccgcatggcaggccagatcactatgaagaagcacccaggaactatgacacgtacacagcaggactgagtgaagaagaacagctcgagagagcattacaagccagcctctgggaccgaggaaataccagaaatagcccaccaccctacgggtttcatctctcaccagaagaaatgaggagacagcggcttcacagattcgatagccagtgaggtggcatcttgggaagacatggcctattcgtgtaattattgcccatttggctcattccccaagcccctaattcattttaattcattttaaacaaaagcagagtacaccggtattgctccagatcgctcacatcacctgggacagtcccatggcccctatgagtcaactcacagcttgcggggagtgggccttctcctggccttgttcttgctcataaacaggtcacttcctccatgaagagaccagtttccacgctcccatctctcactgctgactcagcgatgcctctgcctcggtctgcttttgaagactgtgaccttcaccaggaggttttacttacaccagtcgggaagattagtccctcattctgcctggagtgccccgtgtttgacttggcagcgggtgtggagccatccccgcgtcctcctggcgcattgccactgtggctgtccaggaacaggatgtggctgccttggccgaatgttgtcctactctccccaaccccggcgcctcagctcctcagctcctcgggcccctgcgtctggctggtgtttgcagggctttcgctctgctctggtattgctctgcctttatagaaagtcttattgaagaagtgtaagaaagacctaaggtggggaagactcctacacacaccattagtatcagtgacaccagcaatgtaggttcccagccccttcccagtggcagcttgtgtgtccaggagataggacatcatttaacgcatcagcaaagtagcagcagatgccacatacagagtagagcgaaggcatttggtggatcggtcactagagatctatcttgcagaaagtatgtttttcctcataaaagtgcctcttaattggccattgtaccagccacttgtcctagccaaatgtccaaaacacgcccttgggccccgccacgttacaatccacagattgtctgtctgagtcgtttaaggcatttcctggtgcttgtgttccatgaataaaaggacaaagtcagaagatcactgatgtcttactgtcaacagagatattttaaaagagagaagcaggaaaagatcttccttttttgatctacaacttatatagttttctgattatgcacataatagatatgccttccagatgcataaggcaaacatctggaaagaaatatacccaaatcttagcaggggttatctttgggagtggagtacatgggattttgctttcttcatttttataattttatattactgtcttggaagatgtgtttatgtgtgtgtgttacttttacaatcaggaaaacatatttaataacatatagtcaagaaaacagacttaaaaataaatactatgtgtccattgagaaaattcacaatataaacagaaatacaaataaatacatacacaattttaaagtcacctgtagccctacccttagaggtacccagggttaacattttggtggtattgtcttatcaatttttccgttgatacattcagcaaatttggagcacattgaccatggagttttgtgtccaaatccaatctgaatttacctggaagaggccttgacacctgcatggaaatgagctaagaaaaccactggagccttgggagctctttggcctcctggctggcccagtaatatctgagctcctttggttaatttataactgatataaaactacatcttctttataatataaattgtacctgtgagtctagaagctttaaatgtgtttaaattaaaatattcaagctaaatgttactgctctctcccaaattctgtaagtttgactcccgttaccccaattagaagtaacttctttgtttcatgccacttttatagcatttggtaattctgctataacacatcttgcccctattattaactgtgcacagctacacaaaggtgtgccttctacgtgggaacatggattgtgaatgactctgtaatgaggcctgagtcttagttatctttccactcactccccgtctcccctttccaaccccaaaggctcacgataggggctcactaaatgtcagtgtttcaccaaagtattttttccattgtattaagagtccagtcactgtatatggaagtattttattttttatttttttatatcacttgagtccactagtagtacttccttgctctgtttgacttgtcagatacaaagacacgggattagattttgggtggtaaaattgtgatacgcatggctgttgatggagtggaacatcttagtgatgtgagaaaggtcattttagttataaatgtaaaccaattactttagcacaacaataaagatgttctggaaattattataattattttagttaatggacttgcctgtaacaagtgcttatgtttggaatgtccattttattttattttcctctacaataaggaatccctaaagttatgccaacaaactggaattggattgagaaagacaaaagcaagtgagcaagtgtattagactaattatctctagtagggaataagcacttagagctaattttttaatttggtttatttattagtagctccctgattgtctgttaagcccctggttcccacagtttggtgtggtcagtcaacttaagcgaccttttaatgcagaatctttacttggttctgaagaggaggcagtagttaaaattgcttcctcttaatgactctgaatgtattgcctgtgattccaaagttgtacataattgttcagacctcctccatccttttaaattgcctgctgcagtaaataactagtttgagtagaactagatcctgtctatctatttggcacatgttctgctgcctggggagtaagcaagctaaagggatgagaaagaccacctccccctaccctggaaattgcactgcaaggcagggcgagaatggggtagctggcagacctggcctccttgttcccagtcttagtttttcttgagagattcagtattcagtaaagaatagcattcaattagtcaaaaaatatatatataacttcttcctttcccttcccatgaatcattgcagtcattccctaagtttcttctctttttttttcatggctgctagtattttattttagaatcacagactctcagcttagagagtcacagtatctcaattatttgctctgttcaatacttaacaatacctcctcactcaattctacataactccagcttagtcttccaaaattcactttcatgatgccactcagcatctcaaatacctttcattggctctctgctgccaaaggataaaggtcaaagtcattagcctcaacagtgggcttcaaccagcctttggacctcagccccatttatccatcacagaggctggtaactagtctcactgctcaggctgtgagtgttcctgatcttgtgacattctgtgctgtgcttttacatggaacagctctttcctctctcttggcccattcagatcctcctcatccagcccccatctgaatcctgtaacagacacaaccacatctacacagtttccacataccacttggaattgctggttatgctgcaatgagagaatgtctttgtctttaaattgtaagcttcatgagggcagggaccatctgtttctctgtctctcctcacagtgccttgagcagtacgttgtctggaatgtcagaaccaataaatacttgtggattg

SEQ ID NO: 176056 - DNA, 538 bp, Homo sapiens
  Payload ID: 14562
  Gene Symbol: RHBDD1
  Gene Name: rhomboid domain containing 1
  ENST ID: ENST00000409053
  CDS Start-End: 14-487
atgcactgggctaatgagaagacagaatgtctctaatcagcagcagaacaaacactcacaaagggtctccttccctcctaggacttccttcgctgggcatctggctgggattcttgttggactaatgtacactcaagggcctctgaagaaaatcatggaagcatgtgcaggcggtttttcctccagtgttggttacccaggacggcaatactactttaatagttcaggcagctctggatatcaggattattatccgcatggcaggccagatcactatgaagaagcacccaggaactatgacacgtacacagcaggactgagtgaagaagaacagctcgagagagcattacaagccagcctctgggaccgaggaaaaccaggtcataaagagacaatggcaagtctcctggaccccaagataaaggtcagaacagacaaaggacccagatgcctgggaagcctgaagcaggccgcagtttggacctaaggaatcctttgaggctgcagggtccctgtagtggagttgagcaaagactca

SEQ ID NO: 176057 - DNA, 576 bp, Homo sapiens
  Payload ID: 14562
  Gene Symbol: RHBDD1
  Gene Name: rhomboid domain containing 1
  ENST ID: ENST00000448992
  CDS Start-End: 205-576
agacgtggggacgcaggcgggtcgtagagagcgggtccattgtagggggagaaagaaatattcaggatttaaagcagctgctctaaaggctacattcactgcaatgttgagaaggttcagccgtctgtatatctccccagatacctgaaactgaccacctgagtacgttttcccattgctgagctgtttccctgatatctggccatgcaacggagatcaagagggataaatactggacttattctactcctttctcaaatcttccatgttgggatcaacaatattccacctgtcaccctagcaactttggccctcaacatctggttcttcttgaaccctcagaagccactgtatagctcctgccttagtgtggagaagtgttaccagcaaaaagactggcagcgtttactgctctctccccttcaccatgctgatgattggcatttgtatttcaatatggcatccatgctctggaaaggaataaatctagaaagaagactgggaagtagatggtttgcctatgttatcaccgcattttctgtacttactggagtggtatacctgctcttgcaattt

SEQ ID NO: 176058 - DNA, 777 bp, Homo sapiens
  Payload ID: 14562
  Gene Symbol: RHBDD1
  Gene Name: rhomboid domain containing 1
  ENST ID: ENST00000436481
  CDS Start-End: 615-777
ctttgtttggagacagtctctttctgccacccaggctggagtgcaatggtgcaatcttggatcactgtaaccgctgcctccagggttcaaacgattctcctgcctcagcttcccaggtagctgggattacaggcgtctgccaccacgcccagctaatttttgtatttttagtagagacggtttcaccacgtttgccaagctggtcccgaactcctgacctcaggggtccattgtagggggagaaagaaatattcaggatttaaagcagctgctctaaaggctacattcactgcaatgttgagaagggagcctcttaaacagaatcttacctgtaaaactcaggagccgagaagctttaagaacagtgaggttgaagggcacaggctcttggtccttggcagcgatattaggaggcgtgcctagggaacctcggattccggggagctggacgtgaaactctgtggtggaatagaaatcctcagggcatgagctatacctaaaacgtaatggtattaagaattctggttcagccgtctgtatatctccccagatacctgaaactgaccacctgagtacgttttcccattgctgagctgtttccctgatatctggccatgcaacggagatcaagagggataaatactggacttattctactcctttctcaaatcttccatgttgggatcaacaatattccacctgtcaccctagcaactttggccctcaacatctggttcttcttgaaccctcagaagccactgtatagctcctgcctta

SEQ ID NO: 176059 - DNA, 556 bp, Homo sapiens
  Payload ID: 14562
  Gene Symbol: RHBDD1
  Gene Name: rhomboid domain containing 1
  ENST ID: ENST00000423616
  CDS Start-End: 103-556
gcgcgaagacgtggggacgcaggcgggtcgtagagagcatacctgaaactgaccacctgagtacgttttcccattgctgagctgtttccctgatatctggccatgcaacggagatcaagagggataaatactggacttattctactcctttctcaaatcttccatgttgggatcaacaatattccacctgtcaccctagcaactttggccctcaacatctggttcttcttgaaccctcagaagccactgtatagctcctgccttagtgtggagaagtgttaccagcaaaaagactggcagcgtttactgctctctccccttcaccatgctgatgattggcatttgtatttcaatatggcatccatgctctggaaaggaataaatctagaaagaagactgggaagtagatggtttgcctatgttatcaccgcattttctgtacttactggagtggtatacctgctcttgcaatttgctgttgccgaatttatggatgaacctgacttcaaaaggagctgtgctgtaggtttctcaggagttttgtttgctttgaaag

SEQ ID NO: 176060 - DNA, 577 bp, Homo sapiens
  Payload ID: 14562
  Gene Symbol: RHBDD1
  Gene Name: rhomboid domain containing 1
  ENST ID: ENST00000424132
  CDS Start-End: 174-577
agcagctccccagcctccggctgcgctggggcccggaaggacgaagcttcccggcagagaacctgggcagaggcgtccgttgggttcagccgtctgtatatctccccagatacctgaaactgaccacctgagtacgttttcccattgctgagctgtttccctgatatctggccatgcaacggagatcaagagggataaatactggacttattctactcctttctcaaatcttccatgttgggatcaacaatattccacctgtcaccctagcaactttggccctcaacatctggttcttcttgaaccctcagaagccactgtatagctcctgccttagtgtggagaagtgttaccagcaaaaagactggcagcgtttactgctctctccccttcaccatgctgatgattggcatttgtatttcaatatggcatccatgctctggaaaggaataaatctagaaagaagactgggaagtagatggtttgcctatgttatcaccgcattttctgtacttactggagtggtatacctgctcttgcaatttgctgttgccgaatttatggatgaacctgactt

SEQ ID NO: 176061 - DNA, 596 bp, Homo sapiens
  Payload ID: 14562
  Gene Symbol: RHBDD1
  Gene Name: rhomboid domain containing 1
  ENST ID: ENST00000437454
  CDS Start-End: 446-596
gtgatgacgcacgtgcgcgcgaagacgtggggacgcaggcgggtcgtagagagcgggtccattgtagggggagaaagaaatattcaggatttaaagcagctgctctaaaggctacattcactgcaatgttgagaagggagcctcttaaacagaatcttacctgtaaaactcaggagccgagaagctttaagaacagtgaggttgaagggcacaggctcttggtccttggcagcgatattaggaggcgtgcctagggaacctcggattccggggagctggacgtgaaactctgtggtggaatagaaatcctcagggcatgagctatacctaaaacgtaatggtattaagaattctggttcagccgtctgtatatctccccagatacctgaaactgaccacctgagtacgttttcccattgctgagctgtttccctgatatctggccatgcaacggagatcaagagggataaatactggacttattctactcctttctcaaatcttccatgttgggatcaacaatattccacctgtcaccctagcaactttggccctcaacatctggttcttcttgaaccctcagaagccactgtata

SEQ ID NO: 176062 - DNA, 371 bp, Homo sapiens
  Payload ID: 14562
  Gene Symbol: RHBDD1
  Gene Name: rhomboid domain containing 1
  ENST ID: ENST00000443477
  CDS Start-End: 354-371
acgtgcgcgcgaagacgtggggacgcaggcgggtcgtagagagcggagcctcttaaacagaatcttacctgtaaaactcaggagccgagaagctttaagaacagtgaggttgaagggcacaggctcttggtccttggcagcgatattaggaggcgtgcctagggaacctcggattccggggagctggacgtgaaactctgtggtggaatagaaatcctcagggcatgagctatacctaaaacgtaatggtattaagaattctggttcagccgtctgtatatctccccagatacctgaaactgaccacctgagtacgttttcccattgctgagctgtttccctgatatctggccatgcaacggagatcaaga

SEQ ID NO: 176063 - DNA, 1802 bp, Homo sapiens
  Payload ID: 14563
  Gene Symbol: RHBDD2
  Gene Name: rhomboid domain containing 2
  Uniprot ID: Q6NTF9
  ENST ID: ENST00000006777
  CDS Start-End: 136-1230
atggggcggggcctctgggaggcgtggcctccggccggctcctctgctgttgccaagggaaactgccgcgaggaggcggaaggagcagaggaccggcagccggcgtcgaggcggggcgcgggaacgacggcggccatggcggcctcggggcccgggtgtcgcagctggtgcttgtgtcccgaggtgccatccgccaccttcttcactgcgctgctctcgctgctggtttccgggcctcgcctgttcctgctgcagcagcccctggcgccctcgggcctcacgctgaagtccgaggcccttcgcaactggcaagtttacaggctggtaacctacatctttgtctacgagaatcccatctccctgctctgcggcgctatcatcatctggcgctttgctggcaatttcgagagaaccgtgggcaccgtccgccactgcttcttcaccgtgatcttcgccatcttctccgctatcatcttcctgtcattcgaggctgtgtcatcactgtcaaagctgggggaagtggaggatgccagaggtttcaccccagtggcctttgccatgctgggagtcaccaccgtccgttctcggatgaggcgggccctggtgtttggcatggttgtgccctcagtcctggttccgtggctcctgctgggtgcctcgtggctcattccccagacctctttcctcagtaatgtctgcgggctgtccatcgggctggcctatggcctcacctactgctattccatcgacctctcagagcgagtggcactgaagctcgatcagaccttccccttcagcctgatgaggaggatatccgtgttcaagtacgtctcagggtcttcagccgagaggagggcagcccagagccggaaactgaacccggtgcctggctcctaccccacacagagctgccaccctcacctgtccccaagccaccctgtgtcccagacgcagcacgccagtggtcagaagctggcctcctggccctcctgcacccccgggcacatgcccaccttgcctccgtaccagcctgcctccggcctgtgctatgtgcagaaccactttggtccaaaccccacctcctccagtgtctacccagcttctgcgggcacctccctgggcatccagccccccacgcctgtgaacagccctggcacggtgtattctggggccttgggcacaccaggggctgcaggctccaaggagtcctccagggtccccatgccctgagagaatttctagggaagtcatctcacttggccttctgaaggtcctccctaagagtctcctgacaaaagttacttattgaacacctctatgtgccaggctctgtgttgggtactttgatcaatgcccctgtttcagtctcatctgtactcacggcagccctgtggagtacggtgtactggcccagcttacagatgcagaaagcgagacgttctgccatcagataaagtcacgtggctctttagtaacacggacaaggctcctcgccaaggaactcgtggcagaagagggcagcagttggcagtagctgccgatgtctgtccccagctccaccattcctccctgtggctgtgccgtgctcgtggtttcagtgtccgtgtgtccatgtgtctgcccttcaggagctcgcagctggtgtgcttggcggtcccaggcctgtgtagtgtctctcccctgctgcgggcgcccccaccccgattcctctccccagaagcggtgggatgggcccccatgaactgcagcagcatgctgaggtgtccatgttgtctgcctttgtataaagaaacagcctctga

SEQ ID NO: 176064 - DNA, 1878 bp, Homo sapiens
  Payload ID: 14563
  Gene Symbol: RHBDD2
  Gene Name: rhomboid domain containing 2
  Uniprot ID: Q6NTF9
  ENST ID: ENST00000318622
  CDS Start-End: 630-1301
gccaagggaaactgccgcgaggaggcggaaggagcagaggaccggcagccggcgtcgaggcggggcgcgggaacgacggcggccatggcggcctcggggcccgggtgtcgcagctggtgcttgtgtcccgaggtgccatccgccaccttcttcactgcgctgctctcgctgctggtttccgggcctcgcctgttcctgctgcagcagcccctggcgccctcgggcctcacgctgaagtccgaggcccttcgcaactggcaagccactatggaaggaggggtcaggattacagcagaggagactggcacacagagtgttaagtgacacccactcaatccaccccgaagctgttacacttaattaaccctcaaactgcccagtgagtttacaggctggtaacctacatctttgtctacgagaatcccatctccctgctctgcggcgctatcatcatctggcgctttgctggcaatttcgagagaaccgtgggcaccgtccgccactgcttcttcaccgtgatcttcgccatcttctccgctatcatcttcctgtcattcgaggctgtgtcatcactgtcaaagctgggggaagtggaggatgccagaggtttcaccccagtggcctttgccatgctgggagtcaccaccgtccgttctcggatgaggcgggccctggtgtttggcatggttgtgccctcagtcctggttccgtggctcctgctgggtgcctcgtggctcattccccagacctctttcctcagtaatgtctgcgggctgtccatcgggctggcctatggcctcacctactgctattccatcgacctctcagagcgagtggcactgaagctcgatcagaccttccccttcagcctgatgaggaggatatccgtgttcaagtacgtctcagggtcttcagccgagaggagggcagcccagagccggaaactgaacccggtgcctggctcctaccccacacagagctgccaccctcacctgtccccaagccaccctgtgtcccagacgcagcacgccagtggtcagaagctggcctcctggccctcctgcacccccgggcacatgcccaccttgcctccgtaccagcctgcctccggcctgtgctatgtgcagaaccactttggtccaaaccccacctcctccagtgtctacccagcttctgcgggcacctccctgggcatccagccccccacgcctgtgaacagccctggcacggtgtattctggggccttgggcacaccaggggctgcaggctccaaggagtcctccagggtccccatgccctgagagaatttctagggaagtcatctcacttggccttctgaaggtcctccctaagagtctcctgacaaaagttacttattgaacacctctatgtgccaggctctgtgttgggtactttgatcaatgcccctgtttcagtctcatctgtactcacggcagccctgtggagtacggtgtactggcccagcttacagatgcagaaagcgagacgttctgccatcagataaagtcacgtggctctttagtaacacggacaaggctcctcgccaaggaactcgtggcagaagagggcagcagttggcagtagctgccgatgtctgtccccagctccaccattcctccctgtggctgtgccgtgctcgtggtttcagtgtccgtgtgtccatgtgtctgcccttcaggagctcgcagctggtgtgcttggcggtcccaggcctgtgtagtgtctctcccctgctgcgggcgcccccaccccgattcctctccccagaagcggtgggatgggcccccatgaactgcagcagcatgctgaggtgtccatgttgtctgcctttgtataaagaaacagcctctgacctgc

SEQ ID NO: 176065 - DNA, 1274 bp, Homo sapiens
  Payload ID: 14563
  Gene Symbol: RHBDD2
  Gene Name: rhomboid domain containing 2
  Uniprot ID: Q6NTF9
  ENST ID: ENST00000428119
  CDS Start-End: 31-702
gccagaggtttcaccccagtggcctttgccatgctgggagtcaccaccgtccgttctcggatgaggcgggccctggtgtttggcatggttgtgccctcagtcctggttccgtggctcctgctgggtgcctcgtggctcattccccagacctctttcctcagtaatgtctgcgggctgtccatcgggctggcctatggcctcacctactgctattccatcgacctctcagagcgagtggcactgaagctcgatcagaccttccccttcagcctgatgaggaggatatccgtgttcaagtacgtctcagggtcttcagccgagaggagggcagcccagagccggaaactgaacccggtgcctggctcctaccccacacagagctgccaccctcacctgtccccaagccaccctgtgtcccagacgcagcacgccagtggtcagaagctggcctcctggccctcctgcacccccgggcacatgcccaccttgcctccgtaccagcctgcctccggcctgtgctatgtgcagaaccactttggtccaaaccccacctcctccagtgtctacccagcttctgcgggcacctccctgggcatccagccccccacgcctgtgaacagccctggcacggtgtattctggggccttgggcacaccaggggctgcaggctccaaggagtcctccagggtccccatgccctgagagaatttctagggaagtcatctcacttggccttctgaaggtcctccctaagagtctcctgacaaaagttacttattgaacacctctatgtgccaggctctgtgttgggtactttgatcaatgcccctgtttcagtctcatctgtactcacggcagccctgtggagtacggtgtactggcccagcttacagatgcagaaagcgagacgttctgccatcagataaagtcacgtggctctttagtaacacggacaaggctcctcgccaaggaactcgtggcagaagagggcagcagttggcagtagctgccgatgtctgtccccagctccaccattcctccctgtggctgtgccgtgctcgtggtttcagtgtccgtgtgtccatgtgtctgcccttcaggagctcgcagctggtgtgcttggcggtcccaggcctgtgtagtgtctctcccctgctgcgggcgcccccaccccgattcctctccccagaagcggtgggatgggcccccatgaactgcagcagcatgctgaggtgtccatgttgtctgcctttgtataaagaaacagcctctga

SEQ ID NO: 176066 - DNA, 1831 bp, Homo sapiens
  Payload ID: 14563
  Gene Symbol: RHBDD2
  Gene Name: rhomboid domain containing 2
  ENST ID: ENST00000454791
  CDS Start-End: 80-319
gggaaactgccgcgaggaggcggaaggagcagaggaccggcagccggcgtcgaggcggggcgcgggaacgacggcggccatggcggcctcggggcccgggtgtcgcagctggtgcttgtgtcccgaggtgccatccgccaccttcttcactgcgctgctctcgctgctggtttccgggcctcgcctgttcctgctgcagcagcccctggcgccctcgggcctcacgctgaagtccgaggcccttcgcaactggcaagccactatggaaggaggggtcaggattacagcagaggagactggcacacagagtgttaagtgacacccactcaatccaccccgaagctgttacacttaattaaccctcaaactgcccagtgagtttacaggctggtaacctacatctttgtctacgagaatcccatctccctgctctgcggcgctatcatcatctggcgctttgctggcaatttcgagagaaccgtgggcaccgtccgccactgcttcttcaccgtgatcttcgccatcttctccgctatcatcttcctgtcattcgaggctgtgtcatcactgtcaaagctgggggaagtggaggatgccagaggtttcaccccagtggcctttgccatgctgggagtcaccaccgtccgttctcggatgaggcgggccctggtgtttggcatggttgtgccctcagtcctggttccgtggctcctgctgggtgcctcgtggctcattccccagacctctttcctcagtaatgtctgcgggctgtccatcgggctggcctatggcctcacctactgctattccatcgacctctcagagcgagtggcactgaagctcgatcagaccttccccttcagcctgatgaggaggatatccgtgttcaagtacgtctcagggtcttcagccgagaggagggcagcccagagccggaaactgaacccggtgcctggctcctaccccacacagagctgccaccctcacctgtccccaagccaccctgtgtcccagacgcagcacgccagtggtcagaagctggcctcctggccctcctgcacccccgggcacatgcccaccttgcctccgtaccagcctgcctccggcctgtgctatgtgcagaaccactttggtccaaaccccacctcctccagtgtctacccagcttctgcgggcacctccctgggcatccagccccccacgcctgtgaacagccctggcacggtgtattctggggccttgggcacaccaggggctgcaggctccaaggagtcctccagggtccccatgccctgagagaatttctagggaagtcatctcacttggccttctgaaggtcctccctaagagtctcctgacaaaagttacttattgaacacctctatgtgccaggctctgtgttgggtactttgatcaatgcccctgtttcagtctcatctgtactcacggcagccctgtggagtacggtgtactggcccagcttacagatgcagaaagcgagacgttctgccatcagataaagtcacgtggctctttagtaacacggacaaggctcctcgccaaggaactcgtggcagaagagggcagcagttggcagtagctgccgatgtctgtccccagctccaccattcctccctgtggctgtgccgtgctcgtggtttcagtgtccgtgtgtccatgtgtctgcccttcaggagctcgcagctggtgtgcttggcggtcccaggcctgtgtagtgtctctcccctgctgcgggcgcccccaccccgattcctctccccagaagcggtgggatgggcccccatgaactgcagcagcatgctgaggtgtc

SEQ ID NO: 176067 - DNA, 1794 bp, Homo sapiens
  Payload ID: 14564
  Gene Symbol: RHBDD3
  Gene Name: rhomboid domain containing 3
  Uniprot ID: Q9Y3P4
  ENST ID: ENST00000216085
  CDS Start-End: 426-1586
gggagacggagatcggcgggagggctgggggaagggacccggactagaacaactgctgactaatccgcgggccgcggggaatgggtggcgcgccagccggtcggcaggggtcacgcggccgggtgtgcgcggaatggattcagggttctcgggtcgcgcccgggagctagagtcctgactcccagccggggtccccgaccggcctttcggggttgccgggcgcgctctgcaaaggggaaactgaggcccaaggaaattgagtatctctgcaaagtcaccagctgagttcgaaccagacagatcctgggaccccctactctatccgccaccggaagaatctccgtccttgtctttccattctgccctcccggcttcccagtaagcacacagccccaggaccacccttgaccgtcctcaaccaagcgatgcatgccaggggcccccatggccaactgtccccagcactgcctctggcctcctcagtcctgatgctgctgatgagcaccctgtggctggtgggggccggccccggcctggtcctggccccggagctgttgctggacccctggcaggtgcaccggctgctgacccatgccctgggccacacggccctgccaggcctgctcctgagcctgctgctcctgcccactgtgggctggcagcaggagtgccacctgggcacgctgagattcctgcatgcctcagccctgctcgccctggcttctgggctgctggcagtgctgctggcaggccttgggctgtccagtgcagccggcagctgtggatacatgcctgtccacctggccatgctggctggggagggacaccgccctagacggccccgtggggcactgccaccgtggctgtcgccgtggctgctgcttgccctgaccccactgctcagctctgagccacccttcctgcagctcctttgcggcctccttgccggcctggcctatgcagctggggccttccggtggctggaaccctcagagcgacggctgcaggtgctgcaggagggcgtcttgtgcaggaccttggcggggtgctggcccctgaggctccttgccaccccgggtagcctggcggagctgcctgtcacccatcctgccggagtgaggcctcccatccctggaccgccttatgtggcctcccctgacctctggtcccactgggaagactcagccctgcccccaccaagcctgaggcctgtgcagcccacctgggagggctcctcagaggcaggcctggactgggctggggccagcttctccccagggactccgatgtgggcggccttggatgagcagatgctgcaggagggcatccaggcctcgcttcttgacgggccagcccaggaaccccagagcgcaccatggctgtccaagtcctctgtctcctctctgcggctgcagcagctggagcgcatgggcttccctacggagcaggcggtggtggcactggcagccacaggccgtgtggagggtgccgtgtcactgttggttggaggacaagtgggcactgagaccctggtgacccatggaaagggtgggcctgcccactccgagggtcctgggcctccctagcccaggcagagagtggggcacaggcaggcccttgggtgctaagggctgggctgcatgtgggtagcccgagctcctactctgtctaaagagggccacagtggggagcaggggcacctctggaggcaggagaggccccccagcatgctgccctagtacgtgtttagaataaaaaccagtttgtttttcaacctggacctccttggaggca

SEQ ID NO: 176068 - DNA, 755 bp, Homo sapiens
  Payload ID: 14564
  Gene Symbol: RHBDD3
  Gene Name: rhomboid domain containing 3
  ENST ID: ENST00000406335
  CDS Start-End: 346-755
ggcccgggccagcggggaagggtccccaaggccggtcggctgggtgggaggcctcgaacgccgtgcctggccccgagaccctatccccggtaacggtcgaggtggagcaggccctttaatcatccctcatccgatatccttgtttctacagaaggggaaactgaggcccaaggaaattgagtatctctgcaaagtcaccagctgagttcgaaccagacagatcctgggaccccctactctatccgccaccggaagaatctccgtccttgtctttccattctgccctcccggcttcccagtaagcacacagccccaggaccacccttgaccgtcctcaaccaagcgatgcatgccaggggcccccatggccaactgtccccagcactgcctctggcctcctcagtcctgatgctgctgatgagcaccctgtggctggtgggggccggccccggcctggtcctggccccggagctgttgctggacccctggcaggtgcaccggctgctgacccatgccctgggccacacggccctgccaggcctgctcctgagcctgctgctcctgcccactgtgggctggcagcaggagtgccacctgggcacgctgagattcctgcatgcctcagccctgctcgccctggcttctgggctgctggcagtgctgctggcaggccttgggctgtccagtgcagccggcagctgtggatacatgcctgtccacctggccatgctggctggggagggacaccgccctag

SEQ ID NO: 176069 - DNA, 1555 bp, Homo sapiens
  Payload ID: 14564
  Gene Symbol: RHBDD3
  Gene Name: rhomboid domain containing 3
  ENST ID: ENST00000413137
  CDS Start-End: 393-662
gggacccggactagaacaactgctgactaatccgcgggccgcggggaatgggtggcgcgccagccggtcggcaggggtcacgcggccgggtgtgcgcggaatggattcagggttctcgggtcgcgcccgggagctagagtcctgactcccagccggggtccccgaccggcctttcggggttgccgggcgcgctctgcaaaggggaaactgaggcccaaggaaattgagtatctctgcaaagtcaccagctgagttcgaaccagacagatcctgggaccccctactctatccgccaccggaagaatctccgtccttgtctttccattctgccctcccggcttcccagtaagcacacagccccaggaccacccttgaccgtcctcaaccaagcgatgcatgccaggggcccccatggccaactgtccccagcactgcctctggcctcctcagtcctgatgctgctgatgagcaccctgtggctggtgggggccggccccggcctggtcctggccccggagctgttgctggacccctggcaggagacggggtctatgttgcccaggctggtcttgaactcctggcctcaagtgatcctcccgtctcagcctccccaagtgctgggattatacagctgtgagccactgcgtccagccctaagatgattcatacctatcggggaaaacagtgccactggagagaacaggctggcctctgcactctggattggtgacaggagttatccaggcctgtctgaaggcaatagcagacagatgcagctggggccttccggtggctggaaccctcagagcgacggctgcaggtgctgcaggagggcgtcttgtgcaggaccttggcggggtgctggcccctgaggctccttgccaccccgggtagcctggcggagctgcctgtcacccatcctgccggagtgaggcctcccatccctggaccgccttatgtggcctcccctgacctctggtcccactgggaagactcagccctgcccccaccaagcctgaggcctgtgcagcccacctgggagggctcctcagaggcaggcctggactgggctggggccagcttctccccagggactccgatgtgggcggccttggatgagcagatgctgcaggagggcatccaggcctcgcttcttgacgggccagcccaggaaccccagagcgcaccatggctgtccaagtcctctgtctcctctctgcggctgcagcagctggagcgcatgggcttccctacggagcaggcggtggtggcactggcagccacaggccgtgtggagggtgccgtgtcactgttggttggaggacaagtgggcactgagaccctggtgacccatggaaagggtgggcctgcccactccgagggtcctgggcctccctagcccaggcagagagtggggcacaggcaggcccttgggtgctaagggctgggctgcatgtgggtagcccgagctcctactctgtctaaagagggccacagtggggagcaggggcacctctggaggcaggagaggccccccagcatgctgccctagtac

SEQ ID NO: 176070 - DNA, 900 bp, Homo sapiens
  Payload ID: 14564
  Gene Symbol: RHBDD3
  Gene Name: rhomboid domain containing 3
  ENST ID: ENST00000414672
  CDS Start-End: 316-900
tcaggagggatgaaccaccgcttactcgttcttcgcgtccgcaactcttgtcccagtcctctctaaagagcgcccgacgtgacactcgggccaaaatagcatctaaggggccagagcggggaaggggaaactgaggcccaaggaaattgagtatctctgcaaagtcaccagctgagttcgaaccagacagatcctgggaccccctactctatccgccaccggaagaatctccgtccttgtctttccattctgccctcccggcttcccagtaagcacacagccccaggaccacccttgaccgtcctcaaccaagcgatgcatgccaggggcccccatggccaactgtccccagcactgcctctggcctcctcagtcctgatgctgctgatgagcaccctgtggctggtgggggccggccccggcctggtcctggccccggagctgttgctggacccctggcaggtgcaccggctgctgacccatgccctgggccacacggccctgccaggcctgctcctgagcctgctgctcctgcccactgtgggctggcagcaggagtgccacctgggcacgctgagattcctgcatgcctcagccctgctcgccctggcttctgggctgctggcagtgctgctggcaggccttgggctgtccagtgcagccggcagctgtggatacatgcctgtccacctggccatgctggctggggagggacaccgccctagacggccccgtggggcactgccaccgtggctgtcgccgtggctgctgcttgccctgaccccactgctcagctctgagccacccttcctgcagctcctttgcggcctccttgccggcctggcctatgcagctggggccttccggtggctggaaccctcagagcgacggctgcaggtg

SEQ ID NO: 176071 - DNA, 1560 bp, Homo sapiens
  Payload ID: 14565
  Gene Symbol: RHBDL1
  Gene Name: rhomboid, veinlet-like 1 (Drosophila)
  Uniprot ID: O75783
  ENST ID: ENST00000219551
  CDS Start-End: 28-1344
cttggaccttggccctcgctttccaggatgggtagggtggaagacgggggaacaactgaggagctggaggactgggacccaggcaccagtgccctgccagctcctgggatcaagcagggtcccagggaacagacaggcacggggcccctgtcccaaaagtgctgggagcctgagcctgatgctcccagccagcctggcccagccctttggtccaggggtcgggcccgcactcaggccttggctggcggctcctcactgcagcagctggaccccgagaacacaggcttcatcggtgcggacaccttcactggcctggtgcacagccatgagctgcccctggacccggccaagctggacatgctggtggccctggctcagagcaacgagcagggccaggtctgctaccaggagctggtggacctgatcagcagcaagcgctccagcagtttcaagcgggccattgctaacggacagcgggcactgccccgggacgggccgctggatgagccaggcctaggtgtctacaagcggtttgtgcgttacgtggcctacgagatcctgccttgtgaggtggaccgccgctggtacttctaccgtcaccgcagctgcccaccccccgtgttcatggcctcggtcactcttgcccagatcatcgtgttcctgtgttacggggcccgcctcaacaagtgggtgctgcagacctaccaccccgagtacatgaagagcccccttgtgtaccaccccgggcaccgtgcccgcgcctggcgcttcctcacctacatgttcatgcacgttgggctggagcagctggggttcaacgccctcctgcagctgatgatcggggtgcccctggagatggtgcacggcctgctccgcatcagcctgctctacctggcaggcgtgctggcaggctccctaaccgtctccatcaccgacatgcgggccccggtggtgggaggctccggcggggtctacgccctgtgctcggcacacctggccaacgttgtcatgaactgggctgggatgagatgtccctacaagttgctgaggatggtgctggccttggtgtgcatgagctccgaggtgggccgggccgtgtggctgcgcttctccccgccgctgcccgcctcgggcccacagcccagcttcatggcgcacctggcaggcgcggtggtgggggtgagcatgggcctgaccatcctgcggagctacgaggagcgcctgcgggaccagtgcggctggtgggtggtgctgctggcctacggcaccttcctgctcttcgccgtcttctggaacgtcttcgcctacgacctgctgggcgcccacatccccccaccgccctgaccggctacctgaggctgcacaggccagggctcgggcatgtggtggccgcccaccaggggccttcacgtctgccctttgtgaacggacgtctcagggctgctgtgccccttgggtgtgggtggcctcaaaggaggccctgtcccagccacccaccccccactcccaggacttgcggtctgagcctttttggataattaataaatattttacacagca

SEQ ID NO: 176072 - DNA, 1463 bp, Homo sapiens
  Payload ID: 14565
  Gene Symbol: RHBDL1
  Gene Name: rhomboid, veinlet-like 1 (Drosophila)
  Uniprot ID: O75783
  ENST ID: ENST00000352681
  CDS Start-End: 126-1247
ggcccaagcgcggcgccgagcggagcgggcggagcgggccggctggggcggagcggagtcgtccgcagagcagcccctcccggccgcggccgccgaccccggaccccggcccccggccaggctctatggacaggagctcgctgctgcagctcatccaggagcagcagctggaccccgagaacacaggcttcatcggtgcggacaccttcactggcctggtgcacagccatgagctgcccctggacccggccaagctggacatgctggtggccctggctcagagcaacgagcagggccaggtctgctaccaggagctggtggacctgatcagcagcaagcgctccagcagtttcaagcgggccattgctaacggacagcgggcactgccccgggacgggccgctggatgagccaggcctaggtgtctacaagcggtttgtgcgttacgtggcctacgagatcctgccttgtgaggtggaccgccgctggtacttctaccgtcaccgcagctgcccaccccccgtgttcatggcctcggtcactcttgcccagatcatcgtgttcctgtgttacggggcccgcctcaacaagtgggtgctgcagacctaccaccccgagtacatgaagagcccccttgtgtaccaccccgggcaccgtgcccgcgcctggcgcttcctcacctacatgttcatgcacgttgggctggagcagctggggttcaacgccctcctgcagctgatgatcggggtgcccctggagatggtgcacggcctgctccgcatcagcctgctctacctggcaggcgtgctggcaggctccctaaccgtctccatcaccgacatgcgggccccggtggtgggaggctccggcggggtctacgccctgtgctcggcacacctggccaacgttgtcatgaactgggctgggatgagatgtccctacaagttgctgaggatggtgctggccttggtgtgcatgagctccgaggtgggccgggccgtgtggctgcgcttctccccgccgctgcccgcctcgggcccacagcccagcttcatggcgcacctggcaggcgcggtggtgggggtgagcatgggcctgaccatcctgcggagctacgaggagcgcctgcgggaccagtgcggctggtgggtggtgctgctggcctacggcaccttcctgctcttcgccgtcttctggaacgtcttcgcctacgacctgctgggcgcccacatccccccaccgccctgaccggctacctgaggctgcacaggccagggctcgggcatgtggtggccgcccaccaggggccttcacgtctgccctttgtgaacggacgtctcagggctgctgtgccccttgggtgtgggtggcctcaaaggaggccctgtcccagccacccaccccccactcccaggacttgcggtctgagcctttttggataattaataaatattttacacagca

SEQ ID NO: 176073 - DNA, 796 bp, Homo sapiens
  Payload ID: 14565
  Gene Symbol: RHBDL1
  Gene Name: rhomboid, veinlet-like 1 (Drosophila)
  ENST ID: ENST00000561556
  CDS Start-End: 109-796
gagcggagcgggcggagcgggccggctggggcggagcggagtcgtccgcagagcagcccctcccggccgcggccgccgaccccggaccccggcccccggccaggctctatggacaggagctcgctgctgcagctcatccaggagcagcagctggaccccgagaacacaggcttcatcggtgcggacaccttcactggcctggtgcacagccatgagctgcccctggacccggccaagctggacatgctggtggccctggctcagagcaacgagcagggccaggtctgctaccaggagctggtggacctgatcatcgtgttcctgtgttacggggcccgcctcaacaagtgggtgctgcagacctaccaccccgagtacatgaagagcccccttgtgtaccaccccgggcaccgtgcccgcgcctggcgcttcctcacctacatgttcatgcacgttgggctggagcagctggggttcaacgccctcctgcagctgatgatcggggtgcccctggagatggtgcacggcctgctccgcatcagcctgctctacctggcaggcgtgctggcaggctccctaaccgtctccatcaccgacatgcgggccccggtggtgggaggctccggcggggtctacgccctgtgctcggcacacctggccaacgttgtcatgaactgggctgggatgagatgtccctacaagttgctgaggatggtgctggccttggtgtgcatgagctccgaggtgggccgggccgtgtggctgcgcttctccccgccgctgcccgcctcgggcc

SEQ ID NO: 176074 - DNA, 2129 bp, Homo sapiens
  Payload ID: 14566
  Gene Symbol: RHBDL2
  Gene Name: rhomboid, veinlet-like 2 (Drosophila)
  Uniprot ID: Q9NX52
  ENST ID: ENST00000289248
  CDS Start-End: 1010-1921
gatagggtctcgctttatcactcaggatggagtgtagtgccacgatcttggctcactgcaacctccacctcccgggttcaagcgattctcctgcctcagcatccccagtagctgggattaaaggcatctgccacctcacctggctaattttttgggtacttttcgtagagatggggttttaccatgttggtcaggctggtctcgaatgcccgacctcaggtgatccgcccgcctctgcctcccaaagtgctgggattataggcgtgagccaccgcgccctgcccgagtcaggtttttttattgcaaaagatgggaactgattctggctaattaaatcaggaaatgaattttattgaaagcacattgagtaagttacagaatcacttgaaggctgtagaaacaaggcttgggaaaaaagcagaaacagagaccaggtacctagaattacaccaaattccatcacagagccagataggtgaggacagcctcagtgctgctgctgctgaacgcccagtgctgctgcctttgtcacagccacagctggcgttggatgctggatgccatgctgaccccagtggcaaggcgtctggacactggatactgctgccactgctgcaaccactgtaaagaattttttccatcctcacctccagcctcagaaatcctaagcaaatgcagctgattggtcaagctgccctagctgcctagggacatgcaaaagtgaatattgggcatggttaatgtctgtagtgggatccgtttcctgctgcccaccaggagaagataaattccccaagaaaactgacaaatgacgactacgtacatgttgtcaaagaatccactggaagtctttgacatttgcagattcaacacttgcaattttggaaaggccttggaaagcagtcgttgcgccagacagcccagggaagagcggcagcctgaggacctagggccacctgctgttccctgggattcatgtccttctggggaggagggaggacccaggacaatggctgctgttcatgatctggagatggagagcatgaatctgaatatggggagagagatgaaagaagagctggaggaagaggagaaaatgagagaggatgggggaggtaaagatcgggccaagagtaaaaaggtccacaggattgtctcaaaatggatgctgcccgaaaagtcccgaggaacatacttggagagagctaactgcttcccgcctcccgtgttcatcatctccatcagcctggccgagctggcagtgtttatttactatgctgtgtggaagcctcagaaacagtggatcacgttggacacaggcatcttggagagtccctttatctacagtcctgagaagagggaggaagcctggaggtttatctcatacatgctggtacatgctggagttcagcacatcttggggaatctttgtatgcagcttgttttgggtattcccttggaaatggtccacaaaggcctccgtgtggggctggtgtacctggcaggagtgattgcagggtcccttgccagctccatctttgacccactcagatatcttgtgggagcttcaggaggagtctatgctctgatgggaggctattttatgaatgttctggtgaattttcaagaaatgattcctgcctttggaattttcagactgctgatcatcatcctgataattgtgttggacatgggatttgctctctatagaaggttctttgttcctgaagatgggtctccggtgtcttttgcagctcacattgcaggtggatttgctggaatgtccattggctacacggtgtttagctgctttgataaagcactgctgaaagatccaaggttttggatagcaattgctgcatatttagcttgtgtcttatttgctgtgtttttcaacattttcctatctccagcaaactgacctgcccctattgtaagtcaattaataaaaagagccatctggaggaaataaaaaaaaaaggaagactctatgaagaaacagagaagtctcagaaaaggctaacaattttatatagaggacaaaacagcattaaactcatcagttgcaaagattgcctataaaaggaccttaggatttaaggaaggggcttcttaatgtagaaagggaa

SEQ ID NO: 176075 - DNA, 1837 bp, Homo sapiens
  Payload ID: 14566
  Gene Symbol: RHBDL2
  Gene Name: rhomboid, veinlet-like 2 (Drosophila)
  Uniprot ID: Q9NX52
  ENST ID: ENST00000372990
  CDS Start-End: 229-1140
agagcgggatcttcagggcagcgggcaaccccttggcccaggaagcctggaacgcaaggaccggagggcgtgggctgggacgcccctaccttggtctttcagggaaaggccttggaaagcagtcgttgcgccagacagcccagggaagagcggcagcctgaggacctagggccacctgctgttccctgggattcatgtccttctggggaggagggaggacccaggacaatggctgctgttcatgatctggagatggagagcatgaatctgaatatggggagagagatgaaagaagagctggaggaagaggagaaaatgagagaggatgggggaggtaaagatcgggccaagagtaaaaaggtccacaggattgtctcaaaatggatgctgcccgaaaagtcccgaggaacatacttggagagagctaactgcttcccgcctcccgtgttcatcatctccatcagcctggccgagctggcagtgtttatttactatgctgtgtggaagcctcagaaacagtggatcacgttggacacaggcatcttggagagtccctttatctacagtcctgagaagagggaggaagcctggaggtttatctcatacatgctggtacatgctggagttcagcacatcttggggaatctttgtatgcagcttgttttgggtattcccttggaaatggtccacaaaggcctccgtgtggggctggtgtacctggcaggagtgattgcagggtcccttgccagctccatctttgacccactcagatatcttgtgggagcttcaggaggagtctatgctctgatgggaggctattttatgaatgttctggtgaattttcaagaaatgattcctgcctttggaattttcagactgctgatcatcatcctgataattgtgttggacatgggatttgctctctatagaaggttctttgttcctgaagatgggtctccggtgtcttttgcagctcacattgcaggtggatttgctggaatgtccattggctacacggtgtttagctgctttgataaagcactgctgaaagatccaaggttttggatagcaattgctgcatatttagcttgtgtcttatttgctgtgtttttcaacattttcctatctccagcaaactgacctgcccctattgtaagtcaattaataaaaagagccatctggaggaaataaaaaaaaaaggaagactctatgaagaaacagagaagtctcagaaaaggctaacaattttatatagaggacaaaacagcattaaactcatcagttgcaaagattgcctataaaaggaccttaggatttaaggaaggggcttcttaatgtagaaagggaagaagaagagagaaaagaagggtagtaaaaactagagattggggccaggcgcagtggctcacgcctgtaatcccagcactttgggaggctgaggcgggtgaaatcacctgaggtcatgagttcaagaccagcctgaccaatatggtgaaaccctgtctctactaaagaaaatacaaaaattagccgggcgtggtggcgtgtgcctgtagtcccagctacttgcgaggctgaggcaggagaattgcttgaacctgggaggcgaaggttgcagtgagccgagattgcgccactgcactccagcctgggtgacagagcgacactcggtctcaaaaaacaaaacaaaacaaaacaaaattagagattgggtctttcccaggcatatggtattctataaaacagacttactctccttggaggatatattttggagaatgcttcataaaatctatgaatactgtacaatgctgataataaaaactttttatacctg

SEQ ID NO: 176076 - DNA, 697 bp, Homo sapiens
  Payload ID: 14566
  Gene Symbol: RHBDL2
  Gene Name: rhomboid, veinlet-like 2 (Drosophila)
  Uniprot ID: Q9NX52
  ENST ID: ENST00000540558
  CDS Start-End: 244-642
ggaggagcgcctggcagagcgggatcttcagggcagcgggcaaccccttggcccaggaagcctggaacgcaaggaccggagggcgtgggctgggacgcccctaccttggtctttcagggaaaggccttggaaagcagtcgttgcgccagacagcccagggaagagcggcagcctgaggacctagggccacctgctgttccctgggattcatgtccttctggggaggagggaggacccaggacaatggctgctgttcatgatctggagatggagagcatgaatctgaatatggggagagagatgaaagaagagctggaggaagaggagaaaatgagagaggatgggggaggtaaagatcgggccaagagtaaaaaggtccacaggattgtctcaaaatggatgctgcccgaaaagtcccgaggaacatacttggagagagctaactgcttcccgcctcccgtgttcatcatctccatcagcctggccgagctggcagtgtttatttactatgctgtgtggaagcctcagaaacagtggatcacgttggacacaggcatcttggagagtccctttatctacagtcctgagaagagggaggaagcctggaggtttatctcatacatgctggtacatgctgggtaagcaatgatagttaagcccctggtatcagaggtgattatatcattgtaacctctaa

SEQ ID NO: 176077 - DNA, 4661 bp, Homo sapiens
  Payload ID: 14567
  Gene Symbol: RHBDL3
  Gene Name: rhomboid, veinlet-like 3 (Drosophila)
  Uniprot ID: P58872
  ENST ID: ENST00000269051
  CDS Start-End: 15-1229
accccgtctcggccatgggcgagcaccccagcccgggccccgcggtggccgcctgcgccgaggcggagcgcatcgaggagctggaacccgaggccgaggagcggctgcccgcggcgccggaggaccactggaaagtcctgtttgatcagtttgaccctgggaacacaggctacattagcacaggcaagttccggagtcttctggagagccacagctccaagctggacccgcacaaaagggaggtcctcctggctcttgccgacagccacgcggatgggcagatcggctaccaggattttgtcagcctaatgagcaacaagcgttccaacagcttccgccaagccatcctgcagggcaaccgcaggctaagcagcaaggccctgctggaggagaaggggctgagcctctcgcagcgacttatccgccatgtggcctatgagaccctgccccgggaaattgaccgcaagtggtactatgacagctacacctgctgccccccaccctggttcatgatcacagtcacgctgctggaggttgcctttttcctctacaatggggtgtcactaggtcaatttgtactgcaggtaactcatccacgttacttgaagaactccctggtttaccacccacagctgcgagcacaggtttggcgctacctgacatacatcttcatgcatgcagggatagaacacctgggactcaatgtggtgctgcagctgctggtgggggtgcccctggagatggtgcatggagccacccgaattgggcttgtctacgtggccggtgttgtggcagggtccttggcagtgtctgtggctgacatgaccgctccagtcgtgggctcttctggaggggtgtatgctctcgtctctgcccatctggccaacattgtcatgaactggtcaggcatgaagtgccagttcaagctgctgcggatggctgtggcccttatctgtatgagcatggagtttgggcgggccgtgtggctccgcttccacccgtcggcctatcccccgtgccctcacccaagctttgtggcgcacttgggtggcgtggccgtgggcatcaccctgggcgtggtggtcctgaggaactacgagcagaggctccaggaccagtcactgtggtggatttttgtggccatgtacaccgtcttcgtgctgttcgctgtcttctggaacatctttgcctacaccctgctggacttaaagctgccgcctcccccctgagggctggaggcccaaggtcggggaggggagggaaaagcagcacccacagggagcgcctgcgaggtttcttctcatcaccagctcagctaggccgggcagacaaggacagaagactctgggccactgtaatgtttgtgtttagatttggacacacagtggagacccttttctgaaaggcatctggcggaggagttgatgtggctgctgtcgtttttctcggctgctctgatgacatcgggccagggtgaaggtctggggtggggtgtgagagtggccctccctcacctgggctgggcttcttccatggggccagggggtgccccctcactgctgcggattgagcagcagcttcttcctcctcctctaccctcagagaccctaagagacatgggaaggctcgaaggttgttgcgtccaggcatggcccctctctagctcagaaataattgcaggccatgtggtgtctccttgacacctgctgtgtctggggctccagtaagaagagggcctactggacatgtcagctgtgacctggctgaaaccagggtgccctcctgggctggttggtgtgcaccggggcatgatctgttgtgcctgggttgggcagagcagggagcctgtaggctctaggacccctcttgtgctgggggtacccagtgagagggacccatgcagggggaataaacttcattccaagttccaccctggagaagacagacccaggaccagcttcagacttctccctccctttcttccaggatattggcatctcacacgggtgccccagcctccatgcccagccttgttttagggtctttttctttccttttgctgccctgacactactttgtgcctctctttggttatggagacagtgttttgaaacattcatgcgtgtgtgtgtgtgtgtgcgtatatgtgtgtatgtgatgggaaaggtaactgaggcacgacagcgcctgcagagaaggcatggaggatgcagggggcccatgtgggcatccgtgagaggtggcagaccgtggtgtgctgtggttgctgaatgtccttgctttgacaaagcctgcccccttccttcccatctcctgtcccttccacacctgcccctgagcatcactgaccggtggcagaatggccctgctggagggagagctcaagccctccaaggatccctggatgctgaggtttgccaggttcagctcttgtttccgtctgagatggccttcatatccaaaaaggttccatcctatctcccttaggagagaaagagctttgggggcgcaagagaggctggggtaggaatgttgaggccatgtgtccatttaagttagggggacaggaggctacaggaagaggaattccagtttagttggaaaactttgcctcaggagaattgttgggtgcatggatgaacctcagagggagggcagccagtagcctcggaggcttggatgcgggagagaacatggtggttatcaaatccaccccaccccattacacaggtgagaaaacaagatggagggaatgaccctcctaacaggagctggtgcaggccccgaatggagggcatgaggatgacctttgacaaaagatgacactccctttatcgtgctcttggaattctcaaccactgacagcccagaagaacaaagaacgccaggcctgggaggaggcaggggggctgggcgtgtccagaaacaggggcaggagtgtgggaacggtcttcctccagcctggtgcccatcctggcccttgagtgtagcagggtccagggtcagtcaggccaggcatttggggtcttgggccacagtggcttcccatcctggtgactacatgtaaatgggctcactcactcactggcaggcgaggcccagccataccgcatcttggcccactgctaaatagattgccctggcctcatccacatatgtagttccctaggtcctgctcccctgcaccagtgccatgctgagggccgcagcctgtggcactgtgggcccacgcctttggcggtgttgcgtcagcctggggcgtcttgtgtgtgccctgcccaccgttctctgccctagtgatagaaagatgtagatggaagtcagtgcctcagaggaggaggctctgaggctgtggagctgggctcagggaagaccaggggaggatgcagaaggagtcaggacattgctgcctctgcctgggctgcagccgcactaagctgagcgatgaggtcctttcctggagggatggagaatcccctccagattcctgtcctggcccctggggattctgtggtgtgggtggaatgagcagagtgccacctctgtctggtatgacctggagagggggcttcctctcttaggggtgagaaagcattgaactagaagattctagaaatccctcatagaagcactcagctccctcggggactcccagggaagcttgttactgagaaggacagtggaggcggaatcgtgtctcccaccatgttaagtgtgtcctctgctgccaaggaccctcgtctacaccttagaccaccagccccagctgttctctgtcagcacacccacctccatcccctctcccaaccatgacttccaagcggggccacagggtggggtcatagggtcacttcacctgacccaggcctctccccaggtcaggaggcagctgtctggtcagaggggttctctttgtggcatctggctttctcctcagcaggtcccaccaccctctcagcagcacttccccatggccaaggctggccgtgtcctctgtgcctctttccttgtctgaggtggctgccagcccagggggtggtgtgtaaatcttcaggctggtggaggtaggttggccttttatccacaggatacagaaactgaaagctggggaatccccaaacagcagccatagactcactggctctcattaaacgggagaggaatcacagaaactggggaagggaaaacaaaccttcaaaggagaaatttcgctttaatgacaccattcatcattcgttttttaattaggaaaagctccctaatgaggctcttttgccagctaataggactctcgatttccatgagaaccattcttgcccagaggattaggggagctgttgctcaccacaccaggatcttcccccagcgtccaatttaatttgcaaatacgtaatgcagattccctgggtgccgtgaaagcctttcctggcatcattcatgttgctccccgtgctggctggaaagcacggttctcctctgccttaaaaacagtgcccaacagtgaactgcccctccgaggacttgagtaagtggaaaaaacaaaacacagactgcaatgtttgtttctaagtatttttgtattgtgtacattctgtatatttttgttgtaacatattatttgagcacagattccattaaatattttttttctttttccaagc

SEQ ID NO: 176078 - DNA, 1262 bp, Homo sapiens
  Payload ID: 14567
  Gene Symbol: RHBDL3
  Gene Name: rhomboid, veinlet-like 3 (Drosophila)
  ENST ID: ENST00000431505
  CDS Start-End: 15-1262
accccgtctcggccatgggcgagcaccccagcccgggccccgcggtggccgcctgcgccgaggcggagcgcatcgaggagctggaacccgaggccgaggagcggctgcccgcggcgccggaggaccactggaaagtcctgtttgatcagtttgaccctgggaacacaggctacattagcacaggcaagttccggagtcttctggagagccacagctccaagctggacccgcacaaaagggaggtcctcctggctcttgccgacagccacgcggatgggcagatcggctaccaggattttgtcagcctaatgagcaacaagcgttccaacagcttccgccaagccatcctgcagggcaaccgcaggctaagcagcaaggccctgctggaggagaaggggctgagcctctcgcagcgacttatccgccatgtggcctatgagaccctgccccgggaaattgaccgcaagtggtactatgacagctacacctgctgccccccaccctggttcatgatcacagtcacgctgctggaggttgcctttttcctctacaatggggtgtcactaggtcaatttgtactgcaggtaactcatccacgttacttgaagaactccctggtttaccacccacagctgcgagcacaggtttggcgctacctgacatacatcttcatgcatgcagggatagaacacctgggactcaatgtggtgctgcagctgctggtgggggtgcccctggagatggtgcatggagccacccgaattgggcttgtctacgtggccggtgttgtggcagaactggtcaggcatgaagtgccagttcaagctgctgcggatggctgtggcccttatctgtatgagcatggagtttgggcgggccgtgtggctccgcttccacccgtcggcctatcccccgtgccctcacccaagctttgtggcgcacttgggtggcgtggccgtgggcatcaccctgggcgtggtggtcctgaggaactacgagcagaggctccaggaccagtcactgtggtggatttttgtggccatgtacaccgtcttcgtgctgttcgctgtcttctggaacatctttgcctacaccctgctggacttaaagctgccgcctcccccctgagggctggaggcccaaggtcggggaggggagggaaaagcagcacccacagggagcgcctgcgaggtttcttctcatcaccagctcagctaggccgggcagacaaggacagaagactctgggccactgtaatgttt

SEQ ID NO: 176079 - DNA, 1338 bp, Homo sapiens
  Payload ID: 14567
  Gene Symbol: RHBDL3
  Gene Name: rhomboid, veinlet-like 3 (Drosophila)
  Uniprot ID: P58872
  ENST ID: ENST00000538145
  CDS Start-End: 14-1204
ccccgtctcggccatgggcgagcaccccagcccgggccccgcggtggccgcctgcgccgaggcggagcgcatcgaggagctggaacccgaggccgaggagcggctgcccgcggcgccggaggactttgaccctgggaacacaggctacattagcacaggcaagttccggagtcttctggagagccacagctccaagctggacccgcacaaaagggaggtcctcctggctcttgccgacagccacgcggatgggcagatcggctaccaggattttgtcagcctaatgagcaacaagcgttccaacagcttccgccaagccatcctgcagggcaaccgcaggctaagcagcaaggccctgctggaggagaaggggctgagcctctcgcagcgacttatccgccatgtggcctatgagaccctgccccgggaaattgaccgcaagtggtactatgacagctacacctgctgccccccaccctggttcatgatcacagtcacgctgctggaggttgcctttttcctctacaatggggtgtcactaggtcaatttgtactgcaggtaactcatccacgttacttgaagaactccctggtttaccacccacagctgcgagcacaggtttggcgctacctgacatacatcttcatgcatgcagggatagaacacctgggactcaatgtggtgctgcagctgctggtgggggtgcccctggagatggtgcatggagccacccgaattgggcttgtctacgtggccggtgttgtggcagggtccttggcagtgtctgtggctgacatgaccgctccagtcgtgggctcttctggaggggtgtatgctctcgtctctgcccatctggccaacattgtcatgaactggtcaggcatgaagtgccagttcaagctgctgcggatggctgtggcccttatctgtatgagcatggagtttgggcgggccgtgtggctccgcttccacccgtcggcctatcccccgtgccctcacccaagctttgtggcgcacttgggtggcgtggccgtgggcatcaccctgggcgtggtggtcctgaggaactacgagcagaggctccaggaccagtcactgtggtggatttttgtggccatgtacaccgtcttcgtgctgttcgctgtcttctggaacatctttgcctacaccctgctggacttaaagctgccgcctcccccctgagggctggaggcccaaggtcggggaggggagggaaaagcagcacccacagggagcgcctgcgaggtttcttctcatcaccagctcagctaggccgggcagacaaggacagaagactctgggccactgtaatgttt

SEQ ID NO: 176080 - DNA, 1341 bp, Homo sapiens
  Payload ID: 14567
  Gene Symbol: RHBDL3
  Gene Name: rhomboid, veinlet-like 3 (Drosophila)
  ENST ID: ENST00000578006
  CDS Start-End: 15-170
accccgtctcggccatgggcgagcaccccagcccgggccccgcggtggccgcctgcgccgaggcggagcgcatcgaggagctggaacccgaggccgaggagcggctgcccgcggcgccggaggaccactggaaagtcctgtttgatcaggaagccttccttgacctctgacctccctgggactggattgggctccctcttgtgtgctcccacagcaaccatcactctgaactgtgattgctggttactaatctgtcttgagcaccaccgtatccctccctgtgcctgatgagcaacaagcgttccaacagcttccgccaagccatcctgcagggcaaccgcaggctaagcagcaaggccctgctggaggagaaggggctgagcctctcgcagcgacttatccgccatgtggcctatgagaccctgccccgggaaattgaccgcaagtggtactatgacagctacacctgctgccccccaccctggttcatgatcacagtcacgctgctggaggttgcctttttcctctacaatggggtgtcactaggtcaatttgtactgcaggtaactcatccacgttacttgaagaactccctggtttaccacccacagctgcgagcacaggtttggcgctacctgacatacatcttcatgcatgcagggatagaacacctgggactcaatgtggtgctgcagctgctggtgggggtgcccctggagatggtgcatggagccacccgaattgggcttgtctacgtggccggtgttgtggcagggtccttggcagtgtctgtggctgacatgaccgctccagtcgtgggctcttctggaggggtgtatgctctcgtctctgcccatctggccaacattgtcatgaactggtcaggcatgaagtgccagttcaagctgctgcggatggctgtggcccttatctgtatgagcatggagtttgggcgggccgtgtggctccgcttccacccgtcggcctatcccccgtgccctcacccaagctttgtggcgcacttgggtggcgtggccgtgggcatcaccctgggcgtggtggtcctgaggaactacgagcagaggctccaggaccagtcactgtggtggatttttgtggccatgtacaccgtcttcgtgctgttcgctgtcttctggaacatctttgcctacaccctgctggacttaaagctgccgcctcccccctgagggctggaggcccaaggtcggggaggggagggaaaagcagcacccacagggagcgcctgcgaggtttcttctcatcaccagctcagctaggccgggcagacaaggacagaagactctgggccactgtaatgtt

SEQ ID NO: 176081 - DNA, 4470 bp, Homo sapiens
  Payload ID: 14567
  Gene Symbol: RHBDL3
  Gene Name: rhomboid, veinlet-like 3 (Drosophila)
  Uniprot ID: P58872
  ENST ID: ENST00000536287
  CDS Start-End: 123-1043
atgtcagaaacatccgaggactacagagaccttggtgataagtgtgtctttctttctctcctcttcttcctctcctgcatggcctccctctctgccagcactggaaagtcctgtttgatcagatgagcaacaagcgttccaacagcttccgccaagccatcctgcagggcaaccgcaggctaagcagcaaggccctgctggaggagaaggggctgagcctctcgcagcgacttatccgccatgtggcctatgagaccctgccccgggaaattgaccgcaagtggtactatgacagctacacctgctgccccccaccctggttcatgatcacagtcacgctgctggaggttgcctttttcctctacaatggggtgtcactaggtcaatttgtactgcaggtaactcatccacgttacttgaagaactccctggtttaccacccacagctgcgagcacaggtttggcgctacctgacatacatcttcatgcatgcagggatagaacacctgggactcaatgtggtgctgcagctgctggtgggggtgcccctggagatggtgcatggagccacccgaattgggcttgtctacgtggccggtgttgtggcagggtccttggcagtgtctgtggctgacatgaccgctccagtcgtgggctcttctggaggggtgtatgctctcgtctctgcccatctggccaacattgtcatgaactggtcaggcatgaagtgccagttcaagctgctgcggatggctgtggcccttatctgtatgagcatggagtttgggcgggccgtgtggctccgcttccacccgtcggcctatcccccgtgccctcacccaagctttgtggcgcacttgggtggcgtggccgtgggcatcaccctgggcgtggtggtcctgaggaactacgagcagaggctccaggaccagtcactgtggtggatttttgtggccatgtacaccgtcttcgtgctgttcgctgtcttctggaacatctttgcctacaccctgctggacttaaagctgccgcctcccccctgagggctggaggcccaaggtcggggaggggagggaaaagcagcacccacagggagcgcctgcgaggtttcttctcatcaccagctcagctaggccgggcagacaaggacagaagactctgggccactgtaatgtttgtgtttagatttggacacacagtggagacccttttctgaaaggcatctggcggaggagttgatgtggctgctgtcgtttttctcggctgctctgatgacatcgggccagggtgaaggtctggggtggggtgtgagagtggccctccctcacctgggctgggcttcttccatggggccagggggtgccccctcactgctgcggattgagcagcagcttcttcctcctcctctaccctcagagaccctaagagacatgggaaggctcgaaggttgttgcgtccaggcatggcccctctctagctcagaaataattgcaggccatgtggtgtctccttgacacctgctgtgtctggggctccagtaagaagagggcctactggacatgtcagctgtgacctggctgaaaccagggtgccctcctgggctggttggtgtgcaccggggcatgatctgttgtgcctgggttgggcagagcagggagcctgtaggctctaggacccctcttgtgctgggggtacccagtgagagggacccatgcagggggaataaacttcattccaagttccaccctggagaagacagacccaggaccagcttcagacttctccctccctttcttccaggatattggcatctcacacgggtgccccagcctccatgcccagccttgttttagggtctttttctttccttttgctgccctgacactactttgtgcctctctttggttatggagacagtgttttgaaacattcatgcgtgtgtgtgtgtgtgtgcgtatatgtgtgtatgtgatgggaaaggtaactgaggcacgacagcgcctgcagagaaggcatggaggatgcagggggcccatgtgggcatccgtgagaggtggcagaccgtggtgtgctgtggttgctgaatgtccttgctttgacaaagcctgcccccttccttcccatctcctgtcccttccacacctgcccctgagcatcactgaccggtggcagaatggccctgctggagggagagctcaagccctccaaggatccctggatgctgaggtttgccaggttcagctcttgtttccgtctgagatggccttcatatccaaaaaggttccatcctatctcccttaggagagaaagagctttgggggcgcaagagaggctggggtaggaatgttgaggccatgtgtccatttaagttagggggacaggaggctacaggaagaggaattccagtttagttggaaaactttgcctcaggagaattgttgggtgcatggatgaacctcagagggagggcagccagtagcctcggaggcttggatgcgggagagaacatggtggttatcaaatccaccccaccccattacacaggtgagaaaacaagatggagggaatgaccctcctaacaggagctggtgcaggccccgaatggagggcatgaggatgacctttgacaaaagatgacactccctttatcgtgctcttggaattctcaaccactgacagcccagaagaacaaagaacgccaggcctgggaggaggcaggggggctgggcgtgtccagaaacaggggcaggagtgtgggaacggtcttcctccagcctggtgcccatcctggcccttgagtgtagcagggtccagggtcagtcaggccaggcatttggggtcttgggccacagtggcttcccatcctggtgactacatgtaaatgggctcactcactcactggcaggcgaggcccagccataccgcatcttggcccactgctaaatagattgccctggcctcatccacatatgtagttccctaggtcctgctcccctgcaccagtgccatgctgagggccgcagcctgtggcactgtgggcccacgcctttggcggtgttgcgtcagcctggggcgtcttgtgtgtgccctgcccaccgttctctgccctagtgatagaaagatgtagatggaagtcagtgcctcagaggaggaggctctgaggctgtggagctgggctcagggaagaccaggggaggatgcagaaggagtcaggacattgctgcctctgcctgggctgcagccgcactaagctgagcgatgaggtcctttcctggagggatggagaatcccctccagattcctgtcctggcccctggggattctgtggtgtgggtggaatgagcagagtgccacctctgtctggtatgacctggagagggggcttcctctcttaggggtgagaaagcattgaactagaagattctagaaatccctcatagaagcactcagctccctcggggactcccagggaagcttgttactgagaaggacagtggaggcggaatcgtgtctcccaccatgttaagtgtgtcctctgctgccaaggaccctcgtctacaccttagaccaccagccccagctgttctctgtcagcacacccacctccatcccctctcccaaccatgacttccaagcggggccacagggtggggtcatagggtcacttcacctgacccaggcctctccccaggtcaggaggcagctgtctggtcagaggggttctctttgtggcatctggctttctcctcagcaggtcccaccaccctctcagcagcacttccccatggccaaggctggccgtgtcctctgtgcctctttccttgtctgaggtggctgccagcccagggggtggtgtgtaaatcttcaggctggtggaggtaggttggccttttatccacaggatacagaaactgaaagctggggaatccccaaacagcagccatagactcactggctctcattaaacgggagaggaatcacagaaactggggaagggaaaacaaaccttcaaaggagaaatttcgctttaatgacaccattcatcattcgttttttaattaggaaaagctccctaatgaggctcttttgccagctaataggactctcgatttccatgagaaccattcttgcccagaggattaggggagctgttgctcaccacaccaggatcttcccccagcgtccaatttaatttgcaaatacgtaatgcagattccctgggtgccgtgaaagcctttcctggcatcattcatgttgctccccgtgctggctggaaagcacggttctcctctgccttaaaaacagtgcccaacagtgaactgcccctccgaggacttgagtaagtggaaaaaacaaaacacagactgcaatgtttgtttctaagtatttttgtattgtgtacattctgtatatttttgttgtaacatattatttgagcacagattccattaaatattttttttctttttc

SEQ ID NO: 176082 - DNA, 1614 bp, Homo sapiens
  Payload ID: 14568
  Gene Symbol: ROPN1
  Gene Name: rhophilin associated tail protein 1
  Uniprot ID: Q9HAT0
  ENST ID: ENST00000184183
  CDS Start-End: 342-980
tagcacttcatagactgctatcacgcattcatttttactagtacctattgaacactaagttccaggcactgggctaggcactgggatggtgtggtgagcaaaaactgaccagtcctgccgtggagtttgctgggggagacacatgttactcaaagaatcacactaaggatagcaatttatctcaaagctgcaagttcctgccatctacatgtgcccagagtccccaaaattgagtgtcaaacagaggctgggtgacctcctgtccaggattgctctcatcgtatgaatcgaagttttcatcttaacgtatttttttctcctgagaataggccaaccaatcaatggctcagacagataagccaacatgcatcccgccggagctgccgaagatgctgaaggagtttgccaaagccgccattagggtgcagccgcaggacctcatccagtgggcagccgattattttgaggccctgtcccgtggagagacgcctccggtgagagagcggtctgagcgagtcgctttgtgtaaccgggcagagctaacacctgagctgttaaagatcctgcattctcaggttgctggcagactgatcatccgtgcagaggagctggcccagatgtggaaagtggtgaatctcccaacagatctgtttaatagtgtgatgaatgtgggtcgcttcacggaggagatcgagtggctgaagtttttagcccttgcttgcagcgctctgggagttactattaccaaaactctcaagatagtgtgtgaggtcttatcatgtgaccataatggtgggtcgccccggatcccgttcagcaccttccagtttctctacacgtatattgccaaagtggatggggagatctctgcatcacatgtcagcaggatgctaaactacatggaacaggaagtaattggccctgatggtataatcacagtgaatgactttacccaaaaccccagggttcagctggagtaaaagcacaattttggcaattttaaaggaagatacagagatgattgtacttcagaatgactgaaacccatataccacccaaaatcaattttcttgtacaactggtacacactaataaacaattaaacatatgagatcagaaatgtgcagaattaagatgtgaaattgttggaacaaaacaccttcattaccagattagtattcttcccacatggacactgagtaaaagtggctgacaaagcatggatagaaaatgcatcttcaatcaaagccagactgtcagattttaaaaggtagtatgttaaccagacacagtgttgttgttctgtgattgttaggcataatttagatgagtgtcttttatatggtcaattgaagtttttaccagtttatttctccatttgttggtactgtgctagtcattcattcatcctctcactcatcaatatttattgaggttagctatgtgccaggaatagggttgcaagaaataaatacaggacacccagttaaatttgaatttcagacaaacaacaaatatgttttgttttggtttttgctaaacctggcagcattccaggaactatgctggcttctgagcacatacaaataaataatatcagaattctgccttcaa

SEQ ID NO: 176083 - DNA, 1007 bp, Homo sapiens
  Payload ID: 14568
  Gene Symbol: ROPN1
  Gene Name: rhophilin associated tail protein 1
  Uniprot ID: Q9HAT0
  ENST ID: ENST00000405845
  CDS Start-End: 229-867
gccaggcgaaggcggagcgctaacgtctaacgctaacggcggtcgtgccccgccgctgctgtcacccccggccgctgctgccctccccgccgaggttctactgctctccttcttaagaagggtgggaggcactcggtctctccccacacctctcgcctgaggccaggcgccaggtgtcgcctgaagccagacagccggtttgggagcgagcctgaggccaaccaatcaatggctcagacagataagccaacatgcatcccgccggagctgccgaagatgctgaaggagtttgccaaagccgccattagggtgcagccgcaggacctcatccagtgggcagccgattattttgaggccctgtcccgtggagagacgcctccggtgagagagcggtctgagcgagtcgctttgtgtaaccgggcagagctaacacctgagctgttaaagatcctgcattctcaggttgctggcagactgatcatccgtgcagaggagctggcccagatgtggaaagtggtgaatctcccaacagatctgtttaatagtgtgatgaatgtgggtcgcttcacggaggagatcgagtggctgaagtttttagcccttgcttgcagcgctctgggagttactattaccaaaactctcaagatagtgtgtgaggtcttatcatgtgaccataatggtgggtcgccccggatcccgttcagcaccttccagtttctctacacgtatattgccaaagtggatggggagatctctgcatcacatgtcagcaggatgctaaactacatggaacaggaagtaattggccctgatggtataatcacagtgaatgactttacccaaaaccccagggttcagctggagtaaaagcacaattttggcaattttaaaggaagatacagagatgattgtacttcagaatgactgaaacccatataccacccaaaatcaattttcttgtacaactggtacacactaataaacaattaaacatatgagatcagaaa

SEQ ID NO: 176084 - DNA, 683 bp, Homo sapiens
  Payload ID: 14568
  Gene Symbol: ROPN1
  Gene Name: rhophilin associated tail protein 1
  ENST ID: ENST00000467907
  CDS Start-End: 295-683
gaggttctactgctctccttcttaagaagggtgggaggcactcggtctctccccacacctctcgcctgaggccaggcgccaggtgtcgcctgaagccagacagccggtttgggagcgagcctgagcaatttatctcaaagctgcaagttcctgccatctacatgtgcccagagtccccaaaattgagtgtcaaacagaggctgggtgacctcctgtccaggattgctctcatcgtatgaatcgaagttttcatcttaacgtatttttttctcctgagaataggccaaccaatcaatggctcagacagataagccaacatgcatcccgccggagctgccgaagatgctgaaggagtttgccaaagccgccattagggtgcagccgcaggacctcatccagtgggcagccgattattttgaggccctgtcccgtggagagacgcctccggtgagagagcggtctgagcgagtcgctttgtgtaaccgggcagagctaacacctgagctgttaaagatcctgcattctcaggttgctggcagactgatcatccgtgcagaggagctggcccagatgtggaaagtggtgaatctcccaacagatctgtttaatagtgtgatgaatgtgggtcgcttcacggaggagatcgagtggctgaagtttttagcccttgcttgcagcgctct

SEQ ID NO: 176085 - DNA, 1376 bp, Homo sapiens
  Payload ID: 14568
  Gene Symbol: ROPN1
  Gene Name: rhophilin associated tail protein 1
  Uniprot ID: Q9HAT0
  ENST ID: ENST00000495093
  CDS Start-End: 312-488
aacgctaacggcggtcgtgccccgccgctgctgtcacccccggccgctgctgccctccccgccgaggttctactgctctccttcttaagaagggtgggaggcactcggtctctccccacacctctcgcctgaggccaggcgccaggtgtcgcctgaagccagacagccggtttgggagcgagcctgagagtccccaaaattgagtgtcaaacagaggctgggtgacctcctgtccaggattgctctcatcgtatgaatcgaagttttcatcttaacgtatttttttctcctgagaataggccaaccaatcaatggctcagacagataagccaacatgcatcccgccggagctgccgaagatgctgaaggagtttgccaaagccgccattagggtgcagccgcaggacctcatccagtgggcagccgagtacgtgctcctttctcgccttcaccccttggaggacggccggagacagagggtcctgtaaaaccgcggaggttgtcatggctgcagctaggaagtccggactaactggcatcgtctttgttttagctcttgcattgctttgatgctttaaaatccacacataaatgctacatctagctgggcaaggatgggatgcctcccctaagggagccagattgagcagtaggacgccaggtcaataggccgtgtcctggggcaagcagcaagttagatgaccgcgtcacaccagcgtatgcacacccacctcctccctgcacgccttttcccactcccggtggaaagaagggctgggaatctccgaagcttaatctgcctttcttcgttctcctgtctcaccactagatggcagcagtgcagccgggggagggaagcgacagccctgggtggatggggtgggaccagtcctgctagttcactcctttaaggagacacttcctcccctgctgttaaaactcatacttggacccaaccaaagaccctttatatcttgtcttggaggaaattattgttattttctttagtgtttctctgaactgattttgttctgccaacataaagatgtccgcacagtacacactgcattctggggaaaggccaagcagagtgatggggtcctcaggcatggctgaaaacagtgtgcctcaaacacgggtgccttctttcaggagagacctccagaggctgctcagtagatggagcttacacaacaatcgctgcgggcctggattgaagtagctttgcacagaaagcctctcagctatgaaattgctccttggacaaacttgcctgcttgaaactggggaaccaggacttgagacaggagttggaagataactagacctcacggaccattttcaggctatttttactgtttgatgattccctgctt

SEQ ID NO: 176086 - DNA, 548 bp, Homo sapiens
  Payload ID: 14568
  Gene Symbol: ROPN1
  Gene Name: rhophilin associated tail protein 1
  ENST ID: ENST00000496145
  CDS Start-End: 316-548
gctacccctggtgacctggcagcggagcccgcgcagggtttgccaggcgaaggcggagcgctaacgtctaacgctaacggcggtcgtgccccgccgctgctgtcacccccggccgctgctgccctccccgccgaggttctactgctctccttcttaagaagggtgggaggcactcggtctctccccacacctctcgcctgaggccaggcgccaggtgtcgcctgaagccagacagccggtttgggagcgagcctgagcaatttatctcaaagctgcaagttcctgccatctacatgtgcccaggccaaccaatcaatggctcagacagataagccaacatgcatcccgccggagctgccgaagatgctgaaggagtttgccaaagccgccattagggtgcagccgcaggacctcatccagtgggcagccgattattttgaggccctgtcccgtggagagacgcctccggtgagagagcggtctgagcgagtcgctttgtgtaaccgggcagagctaacacctgagctgttaaagatcctgcattctca

SEQ ID NO: 176087 - DNA, 566 bp, Homo sapiens
  Payload ID: 14568
  Gene Symbol: ROPN1
  Gene Name: rhophilin associated tail protein 1
  Uniprot ID: Q9HAT0
  ENST ID: ENST00000484329
  CDS Start-End: 390-566
gtttgccaggcgaaggcggagcgctaacgtctaacgctaacggcggtcgtgccccgccgctgctgtcacccccggccgctgctgccctccccgccgaggttctactgctctccttcttaagaagggtgggaggcactcggtctctccccacacctctcgcctgaggccaggcgccaggtgtcgcctgaagccagacagccggtttgggagcgagcctgagcaatttatctcaaagctgcaagttcctgccatctacatgtgcccagagtccccaaaattgagtgtcaaacagaggctgggtgacctcctgtccaggattgctctcatcgtatgaatcgaagttttcatcttaacgtatttttttctcctgagaataggccaaccaatcaatggctcagacagataagccaacatgcatcccgccggagctgccgaagatgctgaaggagtttgccaaagccgccattagggtgcagccgcaggacctcatccagtgggcagccgagtacgtgctcctttctcgccttcaccccttggaggacggccggagacagagggtcctgtaa

SEQ ID NO: 176088 - DNA, 727 bp, Homo sapiens
  Payload ID: 14568
  Gene Symbol: ROPN1
  Gene Name: rhophilin associated tail protein 1
  ENST ID: ENST00000460743
  CDS Start-End: 379-727
aggcggagcgctaacgtctaacgctaacggcggtcgtgccccgccgctgctgtcacccccggccgctgctgccctccccgccgaggttctactgctctccttcttaagaagggtgggaggcactcggtctctccccacacctctcgcctgaggccaggcgccaggtgtcgcctgaagccagacagccggtttgggagcgagcctgagttccaggcactgggctaggcactgggatggtgtggtgagcaaaaactgaccagtcctgccgtggagtttgctgggggagacacatgttactcaaagaatcacactaaggatagcaatttatctcaaagctgcaagttcctgccatctacatgtgcccaggccaaccaatcaatggctcagacagataagccaacatgcatcccgccggagctgccgaagatgctgaaggagtttgccaaagccgccattagggtgcagccgcaggacctcatccagtgggcagccgattattttgaggccctgtcccgtggagagacgcctccggtgagagagcggtctgagcgagtcgctttgtgtaaccgggcagagctaacacctgagctgttaaagatcctgcattctcaggttgctggcagactgatcatccgtgcagaggagctggcccagatgtggaaagtggtgaatctcccaacagatctgtttaatagtgtgatgaatgtgggtcgcttcacggaggaga

SEQ ID NO: 176089 - DNA, 2056 bp, Homo sapiens
  Payload ID: 14568
  Gene Symbol: ROPN1
  Gene Name: rhophilin associated tail protein 1
  Uniprot ID: Q9HAT0
  ENST ID: ENST00000479867
  CDS Start-End: 250-426
agcggagcccgcgcagggtttgccaggcgaaggcggagcgctaacgtctaacgctaacggcggtcgtgccccgccgctgctgtcacccccggccgctgctgccctccccgccgaggttctactgctctccttcttaagaagggtgggaggcactcggtctctccccacacctctcgcctgaggccaggcgccaggtgtcgcctgaagccagacagccggtttgggagcgagcctgaggccaaccaatcaatggctcagacagataagccaacatgcatcccgccggagctgccgaagatgctgaaggagtttgccaaagccgccattagggtgcagccgcaggacctcatccagtgggcagccgagtacgtgctcctttctcgccttcaccccttggaggacggccggagacagagggtcctgtaaaaccgcggaggttgtcatggctgcagctaggaagtccggactaactggcatcgtctttgttttagctcttgcattgctttgatgctttaaaatccacacataaatgctacatctagctgggcaaggatgggatgcctcccctaagggagccagattgagcagtaggacgccaggtcaataggccgtgtcctggggcaagcagcaagttagatgaccgcgtcacaccagcgtatgcacacccacctcctccctgcacgccttttcccactcccggtggaaagaagggctgggaatctccgaagcttaatctgcctttcttcgttctcctgtctcaccactagatggcagcagtgcagccgggggagggaagcgacagccctgggtggatggggtgggaccagtcctgctagttcactcctttaaggagacacttcctcccctgctgttaaaactcatacttggacccaaccaaagaccctttatatcttgtcttggaggaaattattgttattttctttagtgtttctctgaactgattttgttctgccaacataaagatgtccgcacagtacacactgcattctggggaaaggccaagcagagtgatggggtcctcaggcatggctgaaaacagtgtgcctcaaacacgggtgccttctttcaggagagacctccagaggctgctcagtagatggagcttacacaacaatcgctgcgggcctggattgaagtagctttgcacagaaagcctctcagctatgaaattgctccttggacaaacttgcctgcttgaaactggggaaccaggacttgagacaggagttggaagataactagacctcacggaccattttcaggctatttttactgtttgatgattccctgcttaggagggtttcagtgggaaagtgagagtgagagaggccgttgagagaaagccagtgagttggggaagggaagatgtcctcaggctgaggttgtgagtgggtgtcctgggcagatggtggggagagtgtggacacctttgagaagacacaaaatggcatctaagaggggcctttcggagtctctgggccagtgctgtgctcctggactggattaggatgtagcttttacaattggaaggaaaataagccagtggtgctcataaaaagaaacataaatgggggttgctttgcctagtaatgagccctgtttagttctccattttaaattttatatattgcctctaagattgaactttagcttcagaagactaatttattttggcatagtcagatagacagactttatcttatacgttagtttcaaacccatttgattgttcttgtgctgccgttttatagtaagcaaactgacattgcttagtattgtccctgacatttatggaagaggcattccactattgtagactgcttgctctcgtattgtatcacgtgctataatttttttagacatccatgaaaacttagtttgtagtttaaccacaatgaaaaaggagggcatgacctaagagccccctccattctatccagacatgaaaagcactgctcagatggttgtatgtgacttacttaaaacctgtagcattttagagaataaaactctgcaaagtgtttccaagacaaaa

SEQ ID NO: 176090 - DNA, 1909 bp, Homo sapiens
  Payload ID: 14568
  Gene Symbol: ROPN1
  Gene Name: rhophilin associated tail protein 1
  Uniprot ID: Q9HAT0
  ENST ID: ENST00000459660
  CDS Start-End: 103-279
cgccgctgctgtcacccccggccgctgctgccctccccgccgagcaatttatctcaaagctgcaagttcctgccatctacatgtgcccaggccaaccaatcaatggctcagacagataagccaacatgcatcccgccggagctgccgaagatgctgaaggagtttgccaaagccgccattagggtgcagccgcaggacctcatccagtgggcagccgagtacgtgctcctttctcgccttcaccccttggaggacggccggagacagagggtcctgtaaaaccgcggaggttgtcatggctgcagctaggaagtccggactaactggcatcgtctttgttttagctcttgcattgctttgatgctttaaaatccacacataaatgctacatctagctgggcaaggatgggatgcctcccctaagggagccagattgagcagtaggacgccaggtcaataggccgtgtcctggggcaagcagcaagttagatgaccgcgtcacaccagcgtatgcacacccacctcctccctgcacgccttttcccactcccggtggaaagaagggctgggaatctccgaagcttaatctgcctttcttcgttctcctgtctcaccactagatggcagcagtgcagccgggggagggaagcgacagccctgggtggatggggtgggaccagtcctgctagttcactcctttaaggagacacttcctcccctgctgttaaaactcatacttggacccaaccaaagaccctttatatcttgtcttggaggaaattattgttattttctttagtgtttctctgaactgattttgttctgccaacataaagatgtccgcacagtacacactgcattctggggaaaggccaagcagagtgatggggtcctcaggcatggctgaaaacagtgtgcctcaaacacgggtgccttctttcaggagagacctccagaggctgctcagtagatggagcttacacaacaatcgctgcgggcctggattgaagtagctttgcacagaaagcctctcagctatgaaattgctccttggacaaacttgcctgcttgaaactggggaaccaggacttgagacaggagttggaagataactagacctcacggaccattttcaggctatttttactgtttgatgattccctgcttaggagggtttcagtgggaaagtgagagtgagagaggccgttgagagaaagccagtgagttggggaagggaagatgtcctcaggctgaggttgtgagtgggtgtcctgggcagatggtggggagagtgtggacacctttgagaagacacaaaatggcatctaagaggggcctttcggagtctctgggccagtgctgtgctcctggactggattaggatgtagcttttacaattggaaggaaaataagccagtggtgctcataaaaagaaacataaatgggggttgctttgcctagtaatgagccctgtttagttctccattttaaattttatatattgcctctaagattgaactttagcttcagaagactaatttattttggcatagtcagatagacagactttatcttatacgttagtttcaaacccatttgattgttcttgtgctgccgttttatagtaagcaaactgacattgcttagtattgtccctgacatttatggaagaggcattccactattgtagactgcttgctctcgtattgtatcacgtgctataatttttttagacatccatgaaaacttagtttgtagtttaaccacaatgaaaaaggagggcatgacctaagagccccctccattctatccagacatgaaaagcactgctcagatggttgtatgtgacttacttaaaacctgtagcattttagagaataaaactctgcaaagtgtttccaagacaaaa

SEQ ID NO: 176091 - DNA, 1006 bp, Homo sapiens
  Payload ID: 14568
  Gene Symbol: ROPN1
  Gene Name: rhophilin associated tail protein 1
  Uniprot ID: Q9HAT0
  ENST ID: ENST00000620893
  CDS Start-End: 247-885
aaatgaacaagggctgtgtaatttttatgtaaaggacataactatttccaacaaaaagtaggggttagcagatggttttctaaccttggcgttgtgtaataatagaatgcatttgtcttgcagagtccccaaaattgagtgtcaaacagaggctgggtgacctcctgtccaggattgctctcatcgtatgaatcgaagttttcatcttaacgtatttttttctcctgagaataggccaaccaatcaatggctcagacagataagccaacatgcatcccgccggagctgccgaagatgctgaaggagtttgccaaagccgccattagggtgcagccgcaggacctcatccagtgggcagccgattattttgaggccctgtcccgtggagagacgcctccggtgagagagcggtctgagcgagtcgctttgtgtaaccgggcagagctaacacctgagctgttaaagatcctgcattctcaggttgctggcagactgatcatccgtgcagaggagctggcccagatgtggaaagtggtgaatctcccaacagatctgtttaatagtgtgatgaatgtgggtcgcttcacggaggagatcgagtggctgaagtttttagcccttgcttgcagcgctctgggagttactattaccaaaactctcaagatagtgtgtgaggtcttatcatgtgaccataatggtgggtcgccccggatcccgttcagcaccttccagtttctctacacgtatattgccaaagtggatggggagatctctgcatcacatgtcagcaggatgctaaactacatggaacaggaagtaattggccctgatggtataatcacagtgaatgactttacccaaaaccccagggttcagctggagtaaaagcacaattttggcaattttaaaggaagatacagagatgattgtacttcagaatgactgaaacccatataccacccaaaatcaattttcttgtacaactggtacacactaataaacaatt

SEQ ID NO: 176092 - DNA, 1026 bp, Homo sapiens
  Payload ID: 14569
  Gene Symbol: ROPN1B
  Gene Name: rhophilin associated tail protein 1B
  Uniprot ID: Q9BZX4
  ENST ID: ENST00000251776
  CDS Start-End: 254-892
tggcagcggagcccgcgcagggtttgccaggcgaaggcggagcgctaacgtctaacgctaacggcggtcgtgccccgccgctgctgtcacccccggccgctgctgccctccccgccgaggttctactgctctccttcttaagaagggtgggaggcactcggtctctccccacacctctcgcctgaggccaggcgccaggtgtcgcctgaagccagacagccggtttgggagcgagcctgaggtcaaccaatcaatggctcagacagataagccaacatgcatcccgccggagctgccgaaaatgctgaaggagtttgccaaagccgccattcgggcgcagccgcaggacctcatccagtggggggccgattattttgaggccctgtcccgtggagagacgcctccggtgagagagcggtctgagcgagtcgctttgtgtaactgggcagagctaacacctgagctgttaaagatcctgcattctcaggttgctggcagactgatcatccgtgcagaggagctggcccagatgtggaaagtggtgaatctcccaacagatctgtttaatagtgtgatgaatgtgggtcgcttcacggaggagatcgagtggctgaagtttttagcccttgcttgcagcgctctgggagttactattaccaaaactctcaagatagtgtgtgaggtcttatcatgtgaccacaatggtgggttgccccgaatcccattcagcaccttccagtttctctacacgtatattgccgaagtggatggggagatctgtgcatcacatgtcagcaggatgctaaactacattgaacaggaagtaattggtcctgatggtttaatcacggtgaatgactttacccaaaaccccagggtttggctggagtaacagcacaattttggcaattttaaaggaagatacagaggtgattgtacttcagaatgataaacccatataccacctaaaatcaattttcttgtacaactggtacacactaataaacaaacatgtgagatcagaaa

SEQ ID NO: 176093 - DNA, 713 bp, Homo sapiens
  Payload ID: 14569
  Gene Symbol: ROPN1B
  Gene Name: rhophilin associated tail protein 1B
  Uniprot ID: Q9BZX4
  ENST ID: ENST00000505382
  CDS Start-End: 220-582
aacagccagaggccactggtgtataggatcctcctactctctgactttttttcttgtagttattttgaggccctgtcccgtggagagacgcctccggtgagagagcggtctgagcgagtcgctttgtgtaactgggcagagctaacacctgagctgttaaagatcctgcattctcaggttgctggcagactgatcatccgtgcagaggagctggcccagatgtggaaagtggtgaatctcccaacagatctgtttaatagtgtgatgaatgtgggtcgcttcacggaggagatcgagtggctgaagtttttagcccttgcttgcagcgctctgggagttactattaccaaaactctcaagatagtgtgtgaggtcttatcatgtgaccacaatggtgggttgccccgaatcccattcagcaccttccagtttctctacacgtatattgccgaagtggatggggagatctgtgcatcacatgtcagcaggatgctaaactacattgaacaggaagtaattggtcctgatggtttaatcacggtgaatgactttacccaaaaccccagggtttggctggagtaacagcacaattttggcaattttaaaggaagatacagaggtgattgtacttcagaatgataaacccatataccacctaaaatcaattttcttgtacaactggtacacactaataaacaaacatgtgagatcag

SEQ ID NO: 176094 - DNA, 755 bp, Homo sapiens
  Payload ID: 14569
  Gene Symbol: ROPN1B
  Gene Name: rhophilin associated tail protein 1B
  ENST ID: ENST00000508088
  CDS Start-End: 448-755
acgctaacggcggtcgtgccccgccgctgctgtcacccccggccgctgctgccctccccgccgaggttctactgctctccttcttaagaagggtgggaggcactcggtctctccccacacctctcgcctgaggccaggcgccaggtgtcgcctgaagccagacagccggtttgggagcgagcctgagggcaaggggaaggcaaggggatcttcaagagaatgtgactgtgggggattatggctttctggccaatttgttacctattgaacactaagttccaggcactgggctaggcactgggatggtgtggtgagcaaaaactgaccagtcctgccgtggagtttgctgggggagacacatgttactcaaagaatcacactaaggatagcaatttatctcaaagcttcaagttcctgccatctacatgtgcccaggtcaaccaatcaatggctcagacagataagccaacatgcatcccgccggagctgccgaaaatgctgaaggagtttgccaaagccgccattcgggcgcagccgcaggacctcatccagtggggggccgattattttgaggccctgtcccgtggagagacgcctccggtgagagagcggtctgagcgagtcgctttgtgtaactgggcagagctaacacctgagctgttaaagatcctgcattctcaggttgctggcagactgatcatccgtgcagaggagctggcccagatgtggaaagtggtgaatctcccaacagatct

SEQ ID NO: 176095 - DNA, 782 bp, Homo sapiens
  Payload ID: 14569
  Gene Symbol: ROPN1B
  Gene Name: rhophilin associated tail protein 1B
  Uniprot ID: Q9BZX4
  ENST ID: ENST00000511082
  CDS Start-End: 286-648
gctttgtgtaactgggcagagctaacacctgagctgttaaagatcctgcattctcagcatgctcttcactaggatttgcaaaggtaactgccacacagagccatctttaccttcctaacaccccctcccgccccttgccatgtgctgggagatgtggacctggcctggggacagggtgtttctcagggccttgtctcaacttctcccacaacctctgtgttgtgtctgtcccctgccctgcaggttgctggcagactgatcatccgtgcagaggagctggcccagatgtggaaagtggtgaatctcccaacagatctgtttaatagtgtgatgaatgtgggtcgcttcacggaggagatcgagtggctgaagtttttagcccttgcttgcagcgctctgggagttactattaccaaaactctcaagatagtgtgtgaggtcttatcatgtgaccacaatggtgggttgccccgaatcccattcagcaccttccagtttctctacacgtatattgccgaagtggatggggagatctgtgcatcacatgtcagcaggatgctaaactacattgaacaggaagtaattggtcctgatggtttaatcacggtgaatgactttacccaaaaccccagggtttggctggagtaacagcacaattttggcaattttaaaggaagatacagaggtgattgtacttcagaatgataaacccatataccacctaaaatcaattttcttgtacaactggtacacactaataaacaaacatgtgagatcagaaa

SEQ ID NO: 176096 - DNA, 2050 bp, Homo sapiens
  Payload ID: 14569
  Gene Symbol: ROPN1B
  Gene Name: rhophilin associated tail protein 1B
  ENST ID: ENST00000504401
  CDS Start-End: 250-426
agcggagcccgcgcagggtttgccaggcgaaggcggagcgctaacgtctaacgctaacggcggtcgtgccccgccgctgctgtcacccccggccgctgctgccctccccgccgaggttctactgctctccttcttaagaagggtgggaggcactcggtctctccccacacctctcgcctgaggccaggcgccaggtgtcgcctgaagccagacagccggtttgggagcgagcctgaggtcaaccaatcaatggctcagacagataagccaacatgcatcccgccggagctgccgaaaatgctgaaggagtttgccaaagccgccattcgggcgcagccgcaggacctcatccagtggggggccgagtacgtgctcctttctcgccttcatctcttggaggacgggcggggagagagggtcctgtaaaaccgcggaggttgtcatggctgcagccagggggtcgggactaactggcatcgtctttgttttagctcttgcattgctttgatgctttaaaatccacacataaatactacatctagccgggcaaggatgggatgcctcccctaagcgagccagattgagcagtaggacgccaggtcaataggccgtgtcctggggcaagcagcaagttagatgaccgcgtcacaccagcgtatgcacacccacctcctccctgcacgccttttcccactctcggtggaaagaagggctgggaatctccgcagcttaatctgcctttcttcattctcctgtctcaccactagatggcagcagtgcagccgggggagggaagcgacagccctgggtggatggggtgggaccagtcctgctagttcactcctttaaggagacacttcctcccctgctgttaaaactcatacttggacccaaccaaagaggctttgtatctttgaggaaattattgttattttctttggtgtttctctgaactgatttgttctgccaacataatgatgtcctcacagtacacactgcattctggggaaaggccaggcagagtgatggggtcctcaggcatggctgaaaacagtgtgcctcaaacacgggtgccttctttcaggagagacctccagaggctgctcagtagatggagcttacacaacaatcgctgcgggcctggattgaagtagctttgcacagaaagcctctcagctatgaaattgctccttggacaaacttgcctgcttgaaactggggaaccaggacttgagacaggagttggaagataactagacctcacggaccattttcaggctatttttactgtttgatgattccctgcttaggagggtttcagtgggaaagtgagagtgagagaggccgttgagagaaagccagtgagttggggaagggaagatgtcctcaggctgaggttgtgagtgggtgtcctgggcagatggtggggagagtgtggacacctttgagaagacacaaaatggcacctaagaggggcctttcggagtctctgggccagtgttgtgctcctggtctggattaggatgcagcttttacaattggaaggaaaataggccagtggtgctcataaaaagaaacataaatgggggttgctttgcctagtaataagccctgtttagttttccattctaaattttatatattgcctctaagattgaactttagcttcagaagactaatttattttggcatagtcagatagacagactttatcttatacgttagtttcaaacccatttgattgttcttgtgctgccgttttatagtaagcaaaatgacattgcttagtattgtccctgacatttatggaagaggcattccactattgtagactgcttgctctcgtattgtatcacgtgctataatttttttagacatccatgaaaacttagtttgtagtttaaccacaatgaaaaaggagggcatgacctaagagccccctccattctatccagacatgaaaagcactgctcagatggttgtatgtgacttacttaaaacctgtagcattttagagaataaaactctgcaaagtgtttccaagacaaaa

SEQ ID NO: 176097 - DNA, 769 bp, Homo sapiens
  Payload ID: 14569
  Gene Symbol: ROPN1B
  Gene Name: rhophilin associated tail protein 1B
  ENST ID: ENST00000513830
  CDS Start-End: 379-769
aggcggagcgctaacgtctaacgctaacggcggtcgtgccccgccgctgctgtcacccccggccgctgctgccctccccgccgaggttctactgctctccttcttaagaagggtgggaggcactcggtctctccccacacctctcgcctgaggccaggcgccaggtgtcgcctgaagccagacagccggtttgggagcgagcctgagttccaggcactgggctaggcactgggatggtgtggtgagcaaaaactgaccagtcctgccgtggagtttgctgggggagacacatgttactcaaagaatcacactaaggatagcaatttatctcaaagcttcaagttcctgccatctacatgtgcccaggtcaaccaatcaatggctcagacagataagccaacatgcatcccgccggagctgccgaaaatgctgaaggagtttgccaaagccgccattcgggcgcagccgcaggacctcatccagtggggggccgattattttgaggccctgtcccgtggagagacgcctccggtgagagagcggtctgagcgagtcgctttgtgtaactgggcagagctaacacctgagctgttaaagatcctgcattctcaggttgctggcagactgatcatccgtgcagaggagctggcccagatgtggaaagtggtgaatctcccaacagatctgtttaatagtgtgatgaatgtgggtcgcttcacggaggagatcgagtggctgaagtttttagcccttgcttgcagcgctctgg

SEQ ID NO: 176098 - DNA, 1088 bp, Homo sapiens
  Payload ID: 14569
  Gene Symbol: ROPN1B
  Gene Name: rhophilin associated tail protein 1B
  Uniprot ID: Q9BZX4
  ENST ID: ENST00000514116
  CDS Start-End: 316-954
gctacccctggtgacctggcagcggagcccgcgcagggtttgccaggcgaaggcggagcgctaacgtctaacgctaacggcggtcgtgccccgccgctgctgtcacccccggccgctgctgccctccccgccgaggttctactgctctccttcttaagaagggtgggaggcactcggtctctccccacacctctcgcctgaggccaggcgccaggtgtcgcctgaagccagacagccggtttgggagcgagcctgagcaatttatctcaaagcttcaagttcctgccatctacatgtgcccaggtcaaccaatcaatggctcagacagataagccaacatgcatcccgccggagctgccgaaaatgctgaaggagtttgccaaagccgccattcgggcgcagccgcaggacctcatccagtggggggccgattattttgaggccctgtcccgtggagagacgcctccggtgagagagcggtctgagcgagtcgctttgtgtaactgggcagagctaacacctgagctgttaaagatcctgcattctcaggttgctggcagactgatcatccgtgcagaggagctggcccagatgtggaaagtggtgaatctcccaacagatctgtttaatagtgtgatgaatgtgggtcgcttcacggaggagatcgagtggctgaagtttttagcccttgcttgcagcgctctgggagttactattaccaaaactctcaagatagtgtgtgaggtcttatcatgtgaccacaatggtgggttgccccgaatcccattcagcaccttccagtttctctacacgtatattgccgaagtggatggggagatctgtgcatcacatgtcagcaggatgctaaactacattgaacaggaagtaattggtcctgatggtttaatcacggtgaatgactttacccaaaaccccagggtttggctggagtaacagcacaattttggcaattttaaaggaagatacagaggtgattgtacttcagaatgataaacccatataccacctaaaatcaattttcttgtacaactggtacacactaataaacaaacatgtgagatcagaaa

SEQ ID NO: 176099 - DNA, 1066 bp, Homo sapiens
  Payload ID: 14570
  Gene Symbol: ROPN1L
  Gene Name: rhophilin associated tail protein 1-like
  Uniprot ID: Q96C74
  ENST ID: ENST00000274134
  CDS Start-End: 293-985
ctcgcgtcccgggtgcctggataccgagcgcgtccgtagtggcggctggcgctagggaactgcagggtctagggtgttgtcggagtggcagttggtccgaatttctcccgaagcccgcggaggagcgggtaagagccccgcgaatccggccccaacctcgggaacgggatgggaggcggccctggccgcaagccccgcgctgctagcgggtccaccgcgtcgtagccgacagccgcccttcttcctcgcagcgcgccgcgattcaccagcctggtcccttctgcggagagcgatgccgcttcccgacaccatgttctgcgctcagcagatccacattcccccggagctgccggacatcctgaagcaattcaccaaggctgccatccgcacccagccggccgacgtgctgcggtggtccgcgggctatttttcagctctgtcgagaggagatccacttcctgtaaaggacagaatggaaatgcccacggcaacccagaaaacagacacaggcctgactcaaggactcctgaaagttttgcacaagcagtgtcaccacaagcggtatgtggaattaacagatcttgagcagaagtggaagaacttgtgcctgccgaaggaaaaattcaaagcgctcttacaactggatccttgtgaaaacaaaatcaagtggataaactttttagcgcttggatgcagcatgcttggtgggtccttgaacactgcgctgaagcacctgtgcgagatcctcacggacgatccggagggcgggcccgctcgcatccccttcaagacgttttcctacgtttaccgctacttggccagattagactcagatgtgtctcccttggagacggaatcctaccttgcctctctaaaggaaaatatagacgccaggaagaacggcatgataggtctttcagatttcttctttccaaagaggaaacttttagaaagcattgaaaactctgaagatgtaggccattaatacagagaagaatacattttaatgtcaaaatagtgctctttaaaattctggcaccaaatacaacttaccctgaatcacaca

SEQ ID NO: 176100 - DNA, 1291 bp, Homo sapiens
  Payload ID: 14570
  Gene Symbol: ROPN1L
  Gene Name: rhophilin associated tail protein 1-like
  Uniprot ID: Q96C74
  ENST ID: ENST00000503804
  CDS Start-End: 522-1214
gcggccccaggcgcaggcgggtcccgcagcggggcccgtgccgcccaggcgatcagccccttcacttaacccgcttccctcctagcaggcccgagtcccctagcctcagcctcacgcagccagagcaaggggaagagggagtccttcgtgagttcgccgctcacattcggcggtgggaaaccgatccgaagatgcttttgtaggcgaaacgctcagctcgcgcggctctgaaccaccggggagcagcggctgctgctagtcggactacgccagcacctccttgtccagcccgggagcagccccgcctcgctcagggccgcgtgcgcgtgcgcggctccaggggcggggcctgctcgcgtcccgggtgcctggataccgagcgcgtccgtagtggcggctggcgctagggaactgcagggtctagggtgttgtcggagtggcagttggtccgaatttctcccgaagcccgcggaggagcggcgcgccgcgattcaccagcctggtcccttctgcggagagcgatgccgcttcccgacaccatgttctgcgctcagcagatccacattcccccggagctgccggacatcctgaagcaattcaccaaggctgccatccgcacccagccggccgacgtgctgcggtggtccgcgggctatttttcagctctgtcgagaggagatccacttcctgtaaaggacagaatggaaatgcccacggcaacccagaaaacagacacaggcctgactcaaggactcctgaaagttttgcacaagcagtgtcaccacaagcggtatgtggaattaacagatcttgagcagaagtggaagaacttgtgcctgccgaaggaaaaattcaaagcgctcttacaactggatccttgtgaaaacaaaatcaagtggataaactttttagcgcttggatgcagcatgcttggtgggtccttgaacactgcgctgaagcacctgtgcgagatcctcacggacgatccggagggcgggcccgctcgcatccccttcaagacgttttcctacgtttaccgctacttggccagattagactcagatgtgtctcccttggagacggaatcctaccttgcctctctaaaggaaaatatagacgccaggaagaacggcatgataggtctttcagatttcttctttccaaagaggaaacttttagaaagcattgaaaactctgaagatgtaggccattaatacagagaagaatacattttaatgtcaaaatagtgctctttaaaattctggcaccaaatacaacttaccctgaatca

SEQ ID NO: 176101 - DNA, 3683 bp, Homo sapiens
  Payload ID: 14571
  Gene Symbol: RHPN1
  Gene Name: rhophilin, Rho GTPase binding protein 1
  Uniprot ID: Q8TCX5
  ENST ID: ENST00000289013
  CDS Start-End: 102-2114
cgcggcccaggtggtgcgggcggccctagcccggctgcggagcgctgcgcgagcggcgggctggctgaccccgagggacccccagcgcagcgggtgcggcgatgatcctggaggagaggccggacggcgcgggcgccggcgaggagagcccgcggctgcagggctgtgactccctgacgcagatccagtgcggccagctgcagagccgcagggcccagattcaccagcagattgacaaggagctgcagatgcggacgggcgctgagaacctctacagagccaccagcaacaaccgggtgagagagacggtcgccctggagctgagctacgtcaactccaacctgcagctgctgaaggaggagctggaggagctcagcggtggcgtggaccctggccggcatgggagcgaagctgtcactgtccccatgatccccctgggcctgaaggagaccaaggagctggactggtctacaccgctgaaggagctgatctcagtgcactttggagaggacggcgcctcctacgaggcagaaatcagggagctggaggccctgcggcaggccatgcggacccccagccggaatgagtcgggcctggagctgctcacagcctattacaaccagctgtgcttcctggatgcgcgcttcctcacccctgccaggagcctcgggctcttcttccactggtacgactcgcttactggggtcccggcccagcagcgtgccctggccttcgagaagggcagcgttctcttcaacatcggtgccctccacacgcagattggggcgcgccaggaccgctcctgcaccgagggtgcccgccgcgctatggaggccttccagagggccgctggggccttcagcctcctgagggagaacttctcccatgcgccgagcccagacatgagcgctgcgtccctctgcgcactggagcagctcatgatggcccaggcccaggaatgtgtgtttgagggcctctcaccacctgcctccatggccccccaagactgcctggcccagctgcgcctggcgcaggaggccgcccaggtggcagccgagtacaggctagtgcaccggaccatggcccagccacccgtccacgactacgtgcctgtctcctggactgccctggtgcatgtcaaggccgagtacttccgctccctggcccactaccacgtagccatggccctctgcgacggctccccagcgaccgagggagagctccccacgcacgagcaggtcttcctgcagccccccacctcctctaagccccgaggccctgtgctgccgcaggagctggaggagcgcaggcagcttggcaaggcacacctgaagcgtgccatcctggggcaggaggaggcgctgcggctgcacgccctgtgccgcgtcctgcgcgaggtggacctgcttcgggctgtgatctcccagacgctgcagcgctcactggccaagtatgcggagctcgaccgtgaggatgacttctgtgaggctgccgaggccccggacatccagcctaagacccaccagaagccagaggccaggatgccacgcctgtcccaggggaaggggcctgacatcttccatcggctggggcccctgtctgtgttctcagccaagaaccggtggcggctggtggggcccgtccacctgacccgaggagagggcggctttggcctcacgcttcggggagactcgcctgtcctcatcgctgccgtcattccagggagccaggccgcggcggctggcctgaaggagggcgactacattgtgtcagtgaatgggcagccatgcaggtggtggagacacgcggaggtggtgacggagctgaaggctgcgggagaggcgggcgccagcctgcaggtggtgtcgctgctgcccagctctagactgcccagcttgggggaccgccggcccgtcctgctgggccccagggggcttctaaggagccagagggagcatggttgcaagaccccggcatccacgtgggccagtccccggcccctcctcaactggagccgaaaggcccagcagggcaagactggaggctgcccccagccctgtgccccagtgaagccagctccgccctcatccttgaagcacccagggtggccgtgagggccaggatccctgcacgcctcagccctggctccagctggcagcaagcaccgagcatgccctccccacccagaggacctccgggcaatgcctgtcccgcctcatgctggaggctgcctcgggcacctgcctgcccattaaagactggtcagacctgtctgagcccagtgatgggagctgtggcctcttcacccacacacagaaggatgccagtccctctgtcggtctgaggtcagcttcctggggctgccccaccctgagggctccttacagggtgctcctcacagccatcccatctgtacccccgggctctgtccaccctgctgctgccctgggcacagaccctgaggtctcagtcctgcctccagccaagtttctgcctggtgcccagtgattcctgctgggcaccccttcgctcactgcccctccaccatgcagcagccagacacacccacagcacccgcagacctctaggccgggtcccagacatggccttcccccaaaatacttcctgctgtcctgtctgtgcacagagcaagggactccccacctctgcgccctgtgctggtcatcatgggctctgtgctggtcaacccagcaagtgtcccgtttgcccaggagtccctggtgtcgtggcccaggtctcatggtggccctaagcctgccagccctgctgcccgccttgctgtcctgctctgagcatgggtgccaccctccagctcctgggcgtgtcacttctctctgagcctggggcctgcatgggcccccagccctccccagcctgcttgggccgctcctgctggcctccacaggccgtgagctgtcagtgtctcaagcaggggaagtgagggctgcctccaggcctccgtgtactgggtggacaatggcccccaaaggccgtcggcaagaacaccacctccaggacccctacagcagtgggctcaggacttgggcaccaagaggagagggtgggaagggctgcagagtcagggctgcacccaagaggagccacggagccggagccggagcggaggcccccaccgagggccccagggcctggcaggttccggaagagacagggccagcgggagtcattccctgcagccactagggggcagccgccacccgctcagcagccctgggaggcggcacgggcaggtgcgccttgggagggctgaggcaaagaccccgggtagaaaggcggcccccagctctgcgagacccctgccctcttgtccagtcccttccgagggtccgcaggtgagagcagcctgccctgcatcccaggctctggttccagggtccagggccctgcgctgccacctccctcgtgcttcagccaagaaaatgggggtgcaagtagggtgtttggggtcccagagacgcaggcgccgcggcgcgatcttcctgggcaggagggcagggctccccaacctgcctgagccggggtgggggtccaggtcccccacttgcccttgtgggaaaatccctgtctcagcagaatgggccaaggtcacgcaggtctccccagcacgtgttaatttggttaataaaactgtggatcaagga

SEQ ID NO: 176102 - DNA, 3789 bp, Homo sapiens
  Payload ID: 14571
  Gene Symbol: RHPN1
  Gene Name: rhophilin, Rho GTPase binding protein 1
  Uniprot ID: Q8TCX5
  ENST ID: ENST00000620174
  CDS Start-End: 134-2221
cagtcggggaccggcgcgggcactcaggagcccgcggcccaggtggtgcgggcggccctagcccggctgcggagcgctgcgcgagcggcgggctggctgaccccgagggacccccagcgcagcgggtgcggcgatgatcctggaggagaggccggacggcgcgggcgccggcgaggagagcccgcggctgcagggctgtgactccctgacgcagatccagtgcggccagctgcagagccgcagggcccagattcaccagcagattgacaaggagctgcagatgcggacgggcgctgagaacctctacagagccaccagcaacaaccgggtgagagagacggtcgccctggagctgagctacgtcaactccaacctgcagctgctgaaggaggagctggaggagctcagcggtggcgtggaccctggccggcatgggagcgaagctgtcactgtccccatgatccccctgggcctgaaggagaccaaggagctggactggtctacaccgctgaaggagctgatctcagtgcactttggagaggacggcgcctcctacgaggcagaaatcagggagctggaggccctgcggcaggccatgcggacccccagccggaatgagtcgggcctggagctgctcacagcctattacaaccagctgtgcttcctggatgcgcgcttcctcacccctgccaggagcctcgggctcttcttccactggtacgactcgcttactggggtcccggcccagcagcgtgccctggccttcgagaagggcagcgttctcttcaacatcggtgccctccacacgcagattggggcgcgccaggaccgctcctgcaccgagggtgcccgccgcgctatggaggccttccagagggccgctggggccttcagcctcctgagggagaacttctcccatgcgccgagcccagacatgagcgctgcgtccctctgcgcactggagcagctcatgatggcccaggcccaggaatgtgtgtttgagggcctctcaccacctgcctccatggccccccaagactgcctggcccagctgcgcctggcgcaggaggccgcccaggtggcagccgagtacaggctagtgcaccggaccatggcccagccacccgtccacgactacgtgcctgtctcctggactgccctggtgcatgtcaaggccgagtacttccgctccctggcccactaccacgtagccatggccctctgcgacggctcccgtgagtgcccaccacacttgcccatggtactgccaaggcccccccgcgcaggctcacagcctctctgtcccccagcagcgaccgagggagagctccccacgcacgagcaggtcttcctgcagccccccacctcctctaagccccgaggccctgtgctgccgcaggagctggaggagcgcaggcagcttggcaaggcacacctgaagcgtgccatcctggggcaggaggaggcgctgcggctgcacgccctgtgccgcgtcctgcgcgaggtggacctgcttcgggctgtgatctcccagacgctgcagcgctcactggccaagtatgcggagctcgaccgtgaggatgacttctgtgaggctgccgaggccccggacatccagcctaagacccaccagaagccagaggccaggatgccacgcctgtcccaggggaaggggcctgacatcttccatcggctggggcccctgtctgtgttctcagccaagaaccggtggcggctggtggggcccgtccacctgacccgaggagagggcggctttggcctcacgcttcggggagactcgcctgtcctcatcgctgccgtcattccagggagccaggccgcggcggctggcctgaaggagggcgactacattgtgtcagtgaatgggcagccatgcaggtggtggagacacgcggaggtggtgacggagctgaaggctgcgggagaggcgggcgccagcctgcaggtggtgtcgctgctgcccagctctagactgcccagcttgggggaccgccggcccgtcctgctgggccccagggggcttctaaggagccagagggagcatggttgcaagaccccggcatccacgtgggccagtccccggcccctcctcaactggagccgaaaggcccagcagggcaagactggaggctgcccccagccctgtgccccagtgaagccagctccgccctcatccttgaagcacccagggtggccgtgagggccaggatccctgcacgcctcagccctggctccagctggcagcaagcaccgagcatgccctccccacccagaggacctccgggcaatgcctgtcccgcctcatgctggaggctgcctcgggcacctgcctgcccattaaagactggtcagacctgtctgagcccagtgatgggagctgtggcctcttcacccacacacagaaggatgccagtccctctgtcggtctgaggtcagcttcctggggctgccccaccctgagggctccttacagggtgctcctcacagccatcccatctgtacccccgggctctgtccaccctgctgctgccctgggcacagaccctgaggtctcagtcctgcctccagccaagtttctgcctggtgcccagtgattcctgctgggcaccccttcgctcactgcccctccaccatgcagcagccagacacacccacagcacccgcagacctctaggccgggtcccagacatggccttcccccaaaatacttcctgctgtcctgtctgtgcacagagcaagggactccccacctctgcgccctgtgctggtcatcatgggctctgtgctggtcaacccagcaagtgtcccgtttgcccaggagtccctggtgtcgtggcccaggtctcatggtggccctaagcctgccagccctgctgcccgccttgctgtcctgctctgagcatgggtgccaccctccagctcctgggcgtgtcacttctctctgagcctggggcctgcatgggcccccagccctccccagcctgcttgggccgctcctgctggcctccacaggccgtgagctgtcagtgtctcaagcaggggaagtgagggctgcctccaggcctccgtgtactgggtggacaatggcccccaaaggccgtcggcaagaacaccacctccaggacccctacagcagtgggctcaggacttgggcaccaagaggagagggtgggaagggctgcagagtcagggctgcacccaagaggagccacggagccggagccggagcggaggcccccaccgagggccccagggcctggcaggttccggaagagacagggccagcgggagtcattccctgcagccactagggggcagccgccacccgctcagcagccctgggaggcggcacgggcaggtgcgccttgggagggctgaggcaaagaccccgggtagaaaggcggcccccagctctgcgagacccctgccctcttgtccagtcccttccgagggtccgcaggtgagagcagcctgccctgcatcccaggctctggttccagggtccagggccctgcgctgccacctccctcgtgcttcagccaagaaaatgggggtgcaagtagggtgtttggggtcccagagacgcaggcgccgcggcgcgatcttcctgggcaggagggcagggctccccaacctgcctgagccggggtgggggtccaggtcccccacttgcccttgtgggaaaatccctgtctcagcagaatgggccaaggtcacgcaggtctccccagcacgtgttaatttggttaataaaactgtggatcaagg

SEQ ID NO: 176103 - DNA, 3500 bp, Homo sapiens
  Payload ID: 14572
  Gene Symbol: RHPN2
  Gene Name: rhophilin, Rho GTPase binding protein 2
  Uniprot ID: Q8IUC4
  ENST ID: ENST00000254260
  CDS Start-End: 37-2097
agtccgccgtccgccctccgcgcccgcgccgctagcatgaccgacgcgctgttgcccgcggccccccagccgctggagaaggagaacgacggctactttcggaagggctgtaatccccttgcacaaaccggccggagtaaattgcagaatcaaagagctgctttgaatcagcagatcctgaaagccgtgcggatgaggaccggagcggaaaaccttctgaaagtggccacaaactcaaaggtgcgggagcaagtgcggctggagctgagcttcgtcaactcagacctgcagatgctcaaggaagagctggaggggctgaacatctcggtgggcgtctatcagaacacagaggaggcatttacgattcccctgattcctcttggcctgaaggaaacgaaagacgtcgactttgcagtcgtcctcaaggattttatcctggaacattacagtgaagatggctatttatatgaagatgaaattgcagatcttatggatctgagacaagcttgtcggacgcctagccgggatgaggccggggtggaactgctgatgacatacttcatccagctgggctttgtcgagagtcgattcttcccgcccacacggcagatgggactcctgttcacctggtatgactctctcaccggggttccggtcagccagcagaacctgctgctggagaaggccagtgtcctgttcaacactggggccctctacacccagattgggacccggtgtgatcggcagacgcaggctgggctggagagtgccatagatgcctttcagagagccgcaggggttttaaattacctgaaagacacatttacccatactccaagttacgacatgagccctgccatgctcagcgtgctcgtcaaaatgatgcttgcacaagcccaagaaagcgtgtttgagaaaatcagccttcctgggatccggaatgaattcttcatgctggtgaaggtggctcaggaggctgctaaggtgggagaggtctaccaacagctacacgcagccatgagccaggcgccggtgaaagagaacatcccctactcctgggccagcttagcctgcgtgaaggcccaccactacgcggccctggcccactacttcactgccatcctcctcatcgaccaccaggtgaagccaggcacggatctggaccaccaggagaagtgcctgtcccagctctacgaccacatgccagaggggctgacacccttggccacactgaagaatgatcagcagcgccgacagctggggaagtcccacttgcgcagagccatggctcatcacgaggagtcggtgcgggaggccagcctctgcaagaagctgcggagcattgaggtgctacagaaggtgctgtgtgccgcacaggaacgctcccggctcacgtacgcccagcaccaggaggaggatgacctgctgaacctgatcgacgcccccagtgttgttgctaaaactgagcaagaggttgacattatattgccccagttctccaagctgacagtcacggacttcttccagaagctgggccccttatctgtgttttcggctaacaagcggtggacgcctcctcgaagcatccgcttcactgcagaagaaggggacttggggttcaccttgagagggaacgcccccgttcaggttcacttcctggatccttactgctctgcctcggtggcaggagcccgggaaggagattatattgtctccattcagcttgtggattgtaagtggctgacgctgagtgaggttatgaagctgctgaagagctttggcgaggacgagatcgagatgaaagtcgtgagcctcctggactccacatcatccatgcataataagagtgccacatactccgtgggaatgcagaaaacgtactccatgatctgcttagccattgatgatgacgacaaaactgataaaaccaagaaaatctccaagaagctttccttcctgagttggggcaccaacaagaacagacagaagtcagccagcaccttgtgcctcccatcggtcggggctgcacggcctcaggtcaagaagaagctgccctcccctttcagccttctcaactcagacagttcttggtactaatgtgaggaaacaaacatgttcaggccctgaacatttccggtgctgactcggccttaaacgtttgtgccataatggaaaatatctatctatctgttctcaaatcctgtttttctcatagtgtaaactcacatttgatgtgtttttatgaaggaaagtaaccaagaaacctctaggaattagtgaaaaaagaacttttttgaggtgtgttactatactgctgtaagttatttattatataaagtattgtaaatagaatagtgttgaagatatgaaatatggctatttttaatggtgacaattatgacttttagtcactattaaattggggttacctatatcagtacaatttgtagttgtttccaggtttggctaataatcattccttaacctagaattcagatgatcctggaattaaggcaggtcagaggactgtaatgatagaattaaattagtgtcactaaaaactgtcccaaagtgctgcttcctaataggaattcattaacctaaaacaagatgttactattatatcgatagactatgaatgctatttctagaaaaagtctagtgccaaatttgtcttattaaataaaaacaatgtaggagcagcttttcttctagtttgatgtcatttaagaattactaacacagtggcagtgttagatgaagatgctgtctacaaggtagataatatactgtttgatactcaaaacatttttcattttgtttaaagtagaagttacataattctatattttaagtcttgggtaaaaaagtagttttacattttataaagtaaagatgtaaatgattcaggtttaaagctctatttgacttcctttttttgtttgagatagcgtcttgctgtgttgcccaggctggagtgcagtggtgtgatctcagctcagtgcaacctccgccccctgggatcaagcgattctcctacctcagcctcccaaatagctgggactacaaggtgccctccagcatgcctggctgatttttgtatttttagttgaggtgaggtttcaccatgttggccaggcgggtttcgaaatcctgacctcaaatgatccacccacctcagcctcccaaagtgctgggattacaggcatgagccaccacaaccgtcccactattttactttttaaaatgacattcctactgattgatttttatcttgctataagttcgatgacaccgtgaatctaataaggttcactgttgacacagtacaagttacatagctaaaatacatagcattgaagactaattttaaggattgacaagagtttattttctattgtgcaatatcttaaaggaagcaaccacctttgggaaagtgtatctgctgctcctagggccatgcttgtatacatatttaaataaacatattcatttacccg

SEQ ID NO: 176104 - DNA, 2378 bp, Homo sapiens
  Payload ID: 14572
  Gene Symbol: RHPN2
  Gene Name: rhophilin, Rho GTPase binding protein 2
  ENST ID: ENST00000588388
  CDS Start-End: 37-423
agtccgccgtccgccctccgcgcccgcgccgctagcatgaccgacgcgctgttgcccgcggccccccagccgctggagaaggagaacgacggctactttcggaagggctgtaatccccttgcacaaaccggccggagtaaattgcagaatcaaagagctgctttgaatcagcagatcctgaaagccgtgcggatgaggaccggagcggaaaaccttctgaaagtggccacaaactcaaaggtgcgggagcaagtgcggctggagctgagcttcgtcaactcagacctgcagatgctcaaggaagagctggaggggctgaacatctcggtgggcgtctatcagaacacagagattttatcctggaacattacagtgaagatggctatttatatgaagatgaaattgcagatcttatggatctgagacaagcttgtcggacgcctagccgggatgaggccggggtggaactgctgatgacatacttcatccagctgggctttgtcgagagtcgattcttcccgcccacacggcagatgggactcctgttcacctggtatgactctctcaccggggttccggtcagccagcagaacctgctgctggagaaggccagtgtcctgttcaacactggggccctctacacccagattgggacccggtgtgatcggcagacgcaggctgggctggagagtgccatagatgcctttcagagagccgcaggggttttaaattacctgaaagacacatttacccatactccaagttacgacatgagccctgccatgctcagcgtgctcgtcaaaatgatgcttgcacaagcccaagaaagcgtgtttgagaaaatcagccttcctgggatccggaatgaattcttcatgctggtgaaggtggctcaggaggctgctaaggtgggagaggtctaccaacagctacacgcagccatgagccaggcgccggtgaaagagaacatcccctactcctgggccagcttagcctgcgtgaaggcccaccactacgcggccctggcccactacttcactgccatcctcctcatcgaccaccaggtgaagccaggcacggatctggaccaccaggagaagtgcctgtcccagctctacgaccacatgccagaggggctgacacccttggccacactgaagaatgatcagcagcgccgacagctggggaagtcccacttgcgcagagccatggctcatcacgaggagtcggtgcgggaggccagcctctgcaagaagctgcggagcattgaggtgctacagaaggtgctgtgtgccgcacaggaacgctcccggctcacgtacgcccagcaccaggaggaggatgacctgctgaacctgatcgacgcccccagtgttgttgctaaaactgagcaagaggttgacattatattgccccagttctccaagctgacagtcacggacttcttccagaagctgggccccttatctgtgttttcggctaacaagcggtggacgcctcctcgaagcatccgcttcactgcagaagaaggggacttggggttcaccttgagagggaacgcccccgttcaggttcacttcctggatccttactgctctgcctcggtggcaggagcccgggaaggagattatattgtctccattcagcttgtggattgtaagtggctgacgctgagtgaggttatgaagctgctgaagagctttggcgaggacgagatcgagatgaaagtcgtgagcctcctggactccacatcatccatgcataataagagtgccacatactccgtgggaatgcagaaaacgtactccatgatctgcttagccattgatgatgacgacaaaactgataaaaccaagaaaatctccaagaagctttccttcctgagttggggcaccaacaagaacagacagaagtcagccagcaccttgtgcctcccatcggtcggggctgcacggcctcaggtcaagaagaagctgccctcccctttcagccttctcaactcagacagttcttggtactaatgtgaggaaacaaacatgttcaggccctgaacatttccggtgctgactcggccttaaacgtttgtgccataatggaaaatatctatctatctgttctcaaatcctgtttttctcatagtgtaaactcacatttgatgtgtttttatgaaggaaagtaaccaagaaacctctaggaattagtgaaaaaagaacttttttgaggtgtgttactatactgctgtaagttatttattatataaagtattgtaaatagaatagtgttgaagatatgaaatatggctatttttaatggtgacaattatgacttttagtcactattaaattggggttacctatatcagtacaatttgtagttgt

SEQ ID NO: 176105 - DNA, 4473 bp, Homo sapiens
  Payload ID: 14573
  Gene Symbol: RHOBTB1
  Gene Name: Rho-related BTB domain containing 1
  Uniprot ID: O94844
  ENST ID: ENST00000337910
  CDS Start-End: 339-2429
ggggtgggggcaggcgaaggggagggctgcgggtggaaaggggcgagcccctctcgcccgggactgggaagagcggccacggcgccgggcgaggcggcagggcgaggcagtgccatgctgcctttgtgcaaagttgggcggcgggcggcgcgccgcgcgcaggggccccgcacacccgcgaccgcgcgcagccgtggctgctgctgagtggcgggggcccccccgctccccccggcccttgaaggcggagagagctcgcgtctcgctcggcttcagggtaagtccagctgtgagcagagtgttctgttcttcacttccagcaagccagagtttcataaatggacgctgacatggactacgaaagacccaacgttgaaactatcaaatgtgtggtcgtgggtgacaatgccgtggggaagacgcgcttgatctgtgccagggcgtgcaacaccacactcacgcagtatcagctgctggccacccacgtgccaacagtgtgggcgattgaccagtaccgcgtgtgccaggaggtcttggagcgttctcgggatgttgttgatgaagtgagtgtttctctcaggctttgggatacttttggtgatcatcacaaagacagacgctttgcatatggcaggtctgatgttgtggtcctctgtttttcgattgctaatcccaattccctaaatcatgtgaaaagcatgtggtatccagaaatcaagcacttttgccctcgaacacccgttatccttgttgggtgccagcttgatctccgctatgccgacctggaagctgttaatcgagccaggcgcccgttagcaaggcccataaagagaggggatattttgcccccagaaaaaggccgagaggtagcaaaggaacttggcttaccatactatgaaacaagcgtgtttgaccagtttggtatcaaggatgtgtttgacaatgcaatccgagcagcgctgatttcccgcaggcacctgcaattctggaaatcccacctaaagaaagtccagaaacctttacttcaggcacccttcctacctccaaaagcccctccaccggtcatcaaaattccagagtgtccttccatggggacaaatgaagctgcctgtttactggacaatcctctatgtgccgatgttctgttcatccttcaggaccaggaacacatctttgcacatcgaatttacctcgctacctcttcttccaaattttatgatctgtttttaatggaatgtgaagaatccccaaatgggagtgaaggagcctgtgagaaagagaagcagagcagagatttccaggggcggatattgagtgtcgacccagaggaagaaagggaggagggcccgcctaggattcctcaggccgaccagtggaagtcttcaaacaagagcctggtggaggctctggggctggaagccgagggtgcagttcctgagacacagactttgaccggatggagtaaggggttcattggcatgcacagggaaatgcaagtcaaccccatttcaaagcggatggggcccatgactgtggtcaggatggacgcttcagtccagccaggcccttttcggaccctgctccagtttctttatacgggacaactggatgaaaaggaaaaggatttggtgggcctggctcagatcgcagaggtcctcgagatgttcgatttgaggatgatggtggaaaacatcatgaacaaggaagccttcatgaaccaggagattacgaaagcctttcacgtaaggaaagccaatcggataaaagagtgtctcagcaagggaacgttctcggacgtgacatttaaattggacgatggagccatcagtgcccacaagccgctgctgatctgtagctgtgagtggatggcagccatgttcggggggtcatttgtggaaagtgccaacagtgaggtgtatctcccgaacataaacaagatatcaatgcaagcagtattggattatctctataccaagcagttgtctcctaacttggatctggacccgctggaattaattgccttggcaaacagattttgcctgccacacttggttgcacttgcagaacagcatgccgttcaggagttgaccaaagccgccacgagtggcgtgggcattgacggagaagtgctctcttacttggaattggctcagtttcacaatgcccaccagttggccgcctggtgtttgcaccacatctgcaccaactacaacagtgtatgctccaagttccgtaaggaaatcaaatcaaaatctgcagacaaccaggaatacttcgagcggcaccgctggccccctgtgtggtacctgaaggaagaagatcactaccagcgtgtgaaaagggaacgagagaaggaagatattgcactaaataagcatcgctcaagacgaaagtggtgcttctggaattcatctccagcagtggcctgaagaggaagagaaaaaaaacaaaaaacagaaaccaatcggtaatctgatccaccacttttcaaagcactactataaaattcgtcttgttagagatacgacatagttcaggtttcgggcactgatcttcctccacttttgtgcatttatctttgttaggatcaaagcacaagctcaccatcaatgagcctggacaaaaagggaagctgactctcactgcattccttaaactgatatgtatattttttttgttaggaggcttaataaactttagtctgttattttgtttctttttatacaaagaaaaaaaattcagctttcatgtttctgattccagattggaaaatatttttatatggtctgttgtattttgttgaaatgaaaatactgtgtattactttattttacaggccacaattgattatgaagtcaccctgtgattctctttgcccacatgaccaccgagcattattacgtaattagagggttatccttttgttgtgaaaggaaggaggggactgaaatctcccaaagtgcaaattggagagtgtttaatctttgttctgttgaataacatcggtgtaattacaaagtcaactccaagaatgtgtatttacaatatttgccatgttaagtgctggtaattatatggttatatgtgccatgtaaaatatagtgatatcaaatattctgttgtttccaatgtctagtttcaagaggacaatctttataatcattagaagggcttattaaatcccagcattatccagggcaaactcactggtggacctgaatacataagataccattagtgcgctggtgttcggattgctgtattagggtttacatctctcagtattccttgaacttgccatgcttctgcatgcagattcttcactgacttgaattgagatgggcaagggaaaaggtccctggactccctcctgccatctacaggcttgtcacatctcaccaccagaaacaggcttcctcaggcttctcacctgtggccaacttcactttgtaagacccatatttttaactcttcccagggaaaattcatgttgctgcagaagtaggctaaggcagaccacccacttctgctgaaatgcattgggagcctgtgaaagcacaaagctggaggctgggcgcctgcgttctcctacacggaaaggaatctaattccaagagtctaggaaatggtgctattgtgagttcgttctgactctttctcattctgagttttcagtgttaaactaggaagtgtgacagcaggggagctttcgtgaggcagtcagtcattgcttctctgtaaattaaaatgttacagcacacacatacacacacagagagcatttcaaggccacagctccacacctgccatgggatgttaatgtggcagggggtggggctcattctgttgggaggtcaaattaccaatgccaaggactgttgattttgtttttatttttattttttcttctagcttttcagaagatggaaatgagacagttgagtccaaaccccaatgctgacagccatatgcatttgaaaatctatctagattacagatgggcatttattactggcagtggaaacaccagatagaagatcttaggagaggcccagaaatgcatcaccttgtcatgacaaaagagaaggcagtagagtagggatagttacaaatgcatccatcttaattattttcaataggcttgtaaatcttatcgatggaaggagaaaggagacaagatgtggaagaattgacatgtatcccaccataaaatggtagaagatgagttttcaatgagtagtcatagttgaaattttacaaccaaagctcccatttgattgtaatcttgccaaaatataatggatgtataaatgaacttggggtataagcaataatatccactagtgttgttatcagctactgtaaccaagtggctggttcatttggttgatgctgattatggcctttaaccatggtggtttgttgtgtgttttttatttcacaaaaagccaataaaattgtttagctataaaa

SEQ ID NO: 176106 - DNA, 4339 bp, Homo sapiens
  Payload ID: 14573
  Gene Symbol: RHOBTB1
  Gene Name: Rho-related BTB domain containing 1
  Uniprot ID: O94844
  ENST ID: ENST00000357917
  CDS Start-End: 205-2295
ggcgggacccagagccgccgcgggagcttccagcgtccccaggttttataataatcaagaagcacatgaaagaggcctcttcatcaagcattcttgactaagttatgaaaatggaattgaagtttattttcccccttcatatggtaagtccagctgtgagcagagtgttctgttcttcacttccagcaagccagagtttcataaatggacgctgacatggactacgaaagacccaacgttgaaactatcaaatgtgtggtcgtgggtgacaatgccgtggggaagacgcgcttgatctgtgccagggcgtgcaacaccacactcacgcagtatcagctgctggccacccacgtgccaacagtgtgggcgattgaccagtaccgcgtgtgccaggaggtcttggagcgttctcgggatgttgttgatgaagtgagtgtttctctcaggctttgggatacttttggtgatcatcacaaagacagacgctttgcatatggcaggtctgatgttgtggtcctctgtttttcgattgctaatcccaattccctaaatcatgtgaaaagcatgtggtatccagaaatcaagcacttttgccctcgaacacccgttatccttgttgggtgccagcttgatctccgctatgccgacctggaagctgttaatcgagccaggcgcccgttagcaaggcccataaagagaggggatattttgcccccagaaaaaggccgagaggtagcaaaggaacttggcttaccatactatgaaacaagcgtgtttgaccagtttggtatcaaggatgtgtttgacaatgcaatccgagcagcgctgatttcccgcaggcacctgcaattctggaaatcccacctaaagaaagtccagaaacctttacttcaggcacccttcctacctccaaaagcccctccaccggtcatcaaaattccagagtgtccttccatggggacaaatgaagctgcctgtttactggacaatcctctatgtgccgatgttctgttcatccttcaggaccaggaacacatctttgcacatcgaatttacctcgctacctcttcttccaaattttatgatctgtttttaatggaatgtgaagaatccccaaatgggagtgaaggagcctgtgagaaagagaagcagagcagagatttccaggggcggatattgagtgtcgacccagaggaagaaagggaggagggcccgcctaggattcctcaggccgaccagtggaagtcttcaaacaagagcctggtggaggctctggggctggaagccgagggtgcagttcctgagacacagactttgaccggatggagtaaggggttcattggcatgcacagggaaatgcaagtcaaccccatttcaaagcggatggggcccatgactgtggtcaggatggacgcttcagtccagccaggcccttttcggaccctgctccagtttctttatacgggacaactggatgaaaaggaaaaggatttggtgggcctggctcagatcgcagaggtcctcgagatgttcgatttgaggatgatggtggaaaacatcatgaacaaggaagccttcatgaaccaggagattacgaaagcctttcacgtaaggaaagccaatcggataaaagagtgtctcagcaagggaacgttctcggacgtgacatttaaattggacgatggagccatcagtgcccacaagccgctgctgatctgtagctgtgagtggatggcagccatgttcggggggtcatttgtggaaagtgccaacagtgaggtgtatctcccgaacataaacaagatatcaatgcaagcagtattggattatctctataccaagcagttgtctcctaacttggatctggacccgctggaattaattgccttggcaaacagattttgcctgccacacttggttgcacttgcagaacagcatgccgttcaggagttgaccaaagccgccacgagtggcgtgggcattgacggagaagtgctctcttacttggaattggctcagtttcacaatgcccaccagttggccgcctggtgtttgcaccacatctgcaccaactacaacagtgtatgctccaagttccgtaaggaaatcaaatcaaaatctgcagacaaccaggaatacttcgagcggcaccgctggccccctgtgtggtacctgaaggaagaagatcactaccagcgtgtgaaaagggaacgagagaaggaagatattgcactaaataagcatcgctcaagacgaaagtggtgcttctggaattcatctccagcagtggcctgaagaggaagagaaaaaaaacaaaaaacagaaaccaatcggtaatctgatccaccacttttcaaagcactactataaaattcgtcttgttagagatacgacatagttcaggtttcgggcactgatcttcctccacttttgtgcatttatctttgttaggatcaaagcacaagctcaccatcaatgagcctggacaaaaagggaagctgactctcactgcattccttaaactgatatgtatattttttttgttaggaggcttaataaactttagtctgttattttgtttctttttatacaaagaaaaaaaattcagctttcatgtttctgattccagattggaaaatatttttatatggtctgttgtattttgttgaaatgaaaatactgtgtattactttattttacaggccacaattgattatgaagtcaccctgtgattctctttgcccacatgaccaccgagcattattacgtaattagagggttatccttttgttgtgaaaggaaggaggggactgaaatctcccaaagtgcaaattggagagtgtttaatctttgttctgttgaataacatcggtgtaattacaaagtcaactccaagaatgtgtatttacaatatttgccatgttaagtgctggtaattatatggttatatgtgccatgtaaaatatagtgatatcaaatattctgttgtttccaatgtctagtttcaagaggacaatctttataatcattagaagggcttattaaatcccagcattatccagggcaaactcactggtggacctgaatacataagataccattagtgcgctggtgttcggattgctgtattagggtttacatctctcagtattccttgaacttgccatgcttctgcatgcagattcttcactgacttgaattgagatgggcaagggaaaaggtccctggactccctcctgccatctacaggcttgtcacatctcaccaccagaaacaggcttcctcaggcttctcacctgtggccaacttcactttgtaagacccatatttttaactcttcccagggaaaattcatgttgctgcagaagtaggctaaggcagaccacccacttctgctgaaatgcattgggagcctgtgaaagcacaaagctggaggctgggcgcctgcgttctcctacacggaaaggaatctaattccaagagtctaggaaatggtgctattgtgagttcgttctgactctttctcattctgagttttcagtgttaaactaggaagtgtgacagcaggggagctttcgtgaggcagtcagtcattgcttctctgtaaattaaaatgttacagcacacacatacacacacagagagcatttcaaggccacagctccacacctgccatgggatgttaatgtggcagggggtggggctcattctgttgggaggtcaaattaccaatgccaaggactgttgattttgtttttatttttattttttcttctagcttttcagaagatggaaatgagacagttgagtccaaaccccaatgctgacagccatatgcatttgaaaatctatctagattacagatgggcatttattactggcagtggaaacaccagatagaagatcttaggagaggcccagaaatgcatcaccttgtcatgacaaaagagaaggcagtagagtagggatagttacaaatgcatccatcttaattattttcaataggcttgtaaatcttatcgatggaaggagaaaggagacaagatgtggaagaattgacatgtatcccaccataaaatggtagaagatgagttttcaatgagtagtcatagttgaaattttacaaccaaagctcccatttgattgtaatcttgccaaaatataatggatgtataaatgaacttggggtataagcaataatatccactagtgttgttatcagctactgtaaccaagtggctggttcatttggttgatgctgattatggcctttaaccatggtggtttgttgtgtgttttttatttcacaaaaagccaataaaattgtttagctataaaa

SEQ ID NO: 176107 - DNA, 5451 bp, Homo sapiens
  Payload ID: 14574
  Gene Symbol: RHOBTB2
  Gene Name: Rho-related BTB domain containing 2
  Uniprot ID: Q9BYZ6
  ENST ID: ENST00000251822
  CDS Start-End: 538-2721
atttttttctcctcctttttttaccctcccgtttttttcttttcttttttttttccctatcctttttttgtgaatgaaaaaaggaggtcgcgagcggtacctgggactgcagcgccaggcgtcttcgcggcagcgccttcgccgcgggcccgggcgcgtagcggcggcggcctcgcccctctcccggcgcccctgcgcgccgcccgctgcctccgcagcccggctccgcgcgccgccgtgacattgggcgcctggcgcgcggggcgatgctgatccggaaggggcagcggctgcagtgcagcgcgcgcgtccgctcctgggcccacgtccggcctgggctgccctgccggagtttctgagtggccgcgagctggccgggaggctggagcccagcagcagcgcggcggcgccggcgtcgtcccaacttgcaggcgcggagggacccctgacatttcactaaaatgagcgtgctcagcaggaagagatgtgttcctcacgctagaagccaccccgtcacatgtagtggtgtcccgtttaatggattctgacatggattatgaaaggccaaacgtagagaccatcaagtgcgttgtggtgggggacaacgccgtgggtaagaccaggctcatctgtgcccgcgcttgcaatgccaccctcacccagtaccagctgctggccacgcatgtgcccacagtatgggccatcgaccaatatcgtgtgtgccaggaggtgctggaacgctcccgagacgtggtagatgatgtcagcgtctctctgcgcctctgggacacctttggagaccaccacaaagaccgtcgctttgcttatgggagatctgatgtggtggttctgtgcttctccattgccaaccccaattccctccaccatgtcaagaccatgtggtacccagaaatcaagcacttctgcccccgagcacctgtcatcttggtgggctgccagttggacctgcgctacgctgacctggaggctgtcaacagggctaggcgacccttggctaggcccatcaaacctaatgaaatcctgcccccagagaagggtcgggaggtggccaaggagctgggcatcccctactatgagaccagcgtggtggcccagttcggcatcaaggacgtctttgacaacgccatccgagctgcactcatctcccgccgccacctgcagttctggaagtcccacctccgcaatgtgcagcggcctctgctgcaggcacccttcctaccccccaagccaccgcccccgatcatcgtggtgcccgaccctccctccagcagcgaggagtgccccgcccacctcctggaggacccgctctgcgcggacgtcatcctggtgctgcaggagcgggtgcgcatctttgcccacaagatctacctctccacctcttcctccaagttctatgacctgttcctcatggacctgagtgagggggagctggggggcccctcggagccagggggcacccacccagaggaccaccagggccactctgatcaacaccaccaccatcaccaccaccaccatgggcgagacttcctgctccgagcagccagctttgacgtgtgcgagagcgtggatgaggctgggggctccggtcctgctggcctccgtgcttccaccagcgacgggatcttacggggcaacggaacagggtacctaccgggcaggggtcgtgtgctgtcttcctggagccgagcttttgtgagcatccaggaagagatggcagaagatcctctcacctacaaatcccggctgatggtggtggtgaagatggacagttccatccagccggggcccttccgggctgtcctcaagtacctgtacacgggggagctagatgagaacgagcgtgacctcatgcacattgcccacattgctgagctgctcgaggtctttgatctgcgcatgatggtggccaacattctcaacaatgaggccttcatgaaccaggagatcaccaaggccttccacgtccgccggaccaaccgggttaaggagtgcttggcaaaaggcaccttctcagatgtgaccttcatcctggatgatggcaccatcagcgcccacaagcccctgttgatttccagctgtgactggatggctgccatgtttggggggccatttgtggagagctccacccgggaggtggtgtttccctacacaagcaagagctgcatgcgggccgtgctggaatacctctacaccggcatgttcacctccagccccgacctggatgacatgaagctcatcattctagccaaccgcctctgcctgccacacctggttgccctcacagagcagtacacagtgaccgggctgatggaagcgacccagatgatggtggacatcgatggggacgtccttgtgttcctggaactggctcagttccactgtgcgtaccagctggccgactggtgtctccaccacatctgcaccaactacaacaacgtgtgccgcaagttcccccgagacatgaaggccatgtccccagaaaaccaggagtatttcgagaagcatcggtggccacctgtgtggtacctgaaggaggaagatcattaccagcgggcacggaaggagcgtgagaaggaggactacctccacctcaagcggcagcccaaacggcgttggctcttctggaacagtccatcctccccgtcttcctcggcagcctcctcctcatccccatcttcctcctcggctgtggtctgagatgctgccaccctcttctgaccctgctgctgttgtccccatccgccttcacccctctgctcttccgcatcaccccatccaccttacagggaccagggggcccacgtaaccaggacccagagggtggagctcttcttaccagccaccgtggctcagccagagaggagctgagccctgtggagcagaacgggaaccacctgcagaggtccccagacccaaagcaggacgggagacaactgcttggaggagcgaagagccctggcattttatctctgggtttgagagccctagagtcaaagggaaagcctcccagcctccagggcttctctgtgtgtcttggttgctgctctggccagggaggcagccccactcccagcaagcagaagtgatcctcgagggtcctgcccctgttggccatatctttccaccgacggacttgagtgttgcatttgttttgtgggcatttccacacgaagcctactcacaccctcactggagaagtcagggtagaaattgagccttcagagcccaactcaaggcttctacatcctggggtgcagctgcaaaaggccagacgtggaaaggcctgtatcctgccagtgtccctccgtcccagggggctgtgctagcacagacctgagaatggggacacaggtcattcagagctccaggcctggaagcagtgcctcttggtgcaacaagaaacttctccctcaccccctcctttaccctcagatttggagatggtaaccaaaggaagcagctgggacaggtggagaaggaagtaggaatgagtgcacggcgaccccgtgctcctcagggccctcccctgcctctgggtggcactgctttttatagggtggggcaaaattagcaaaaaacaaaaaccaatgacaaccaaactgaaaccgaaacgaaaaatcaacaaacactctgtcctctatccctccaaagaatgaaaatcagaaaaagcccctgcctagctcacatttctataaacagaggcccccatgatgaggaggtgaagatttaggttgcagaatcgactccaatgcctttcaggaaaggactcggcacttctctgactgcggaggccctgaccctgccagctggctccgagggcaacacaggggcctggcctctagagggctggtgattgaggggcccgggctggcggcaaagaggggtttggtctcggggcttaaatggcaccagactcttgcttttgcccatctggagactgcaggctcccttccttaccctcagagagtgcttatggtgggtgtttttgcggggctgcaataggggccaaaagtcagggaaaggggcactgacctgtagtgaaaggccacaggacacagccttattactgctggggtgggataaggggaaggagaagagggagaatggagcaggaggaaaagcagagttggtctagagaggaggagggcggggctggaggaatgtgggggattgaaactagctcccagcccccatggggcagcagctgggccacaattgcccctttccgttttctaaccccgactcagatttcaccacccacactctttttaggtgtaaaagatggagtcccacggaggaggggcagagccaggaggcagtggggctgtgggctcagagctcaggagtcgccttacctgagagagatgttctagctgagagggcctggccctggggtgggctccaggaaaacgctggttaggcctgggattgagctaacctgaaacaaaggtagcaggcaggacctaatgaccagaggttaaatcctcatcaagagagaccaggcggctggaggacaagcggctctaaccctgggggcggccatgttgtccaggcccaggcccctccaggactgtggctgcctcccctccacggcctccagggcggctggctggaaagccacgcgtatgctgccctctacaggctgctcggcctccctgcagctcagcgcagcccagggctccaagtgaggcccagaagcccatgggcagggctggggggacgaagggggaacccggagcacctccacttctagggaagatggacagcgtgggggcacacctgggcctcccggaagctgtggacgaaagggagagcgggtcctccagggcaaggggaacgggaaataggtctcctaggtgcctgaagcgctgagcaacctgggtaccctggtggggatgcagggaaggccggggcagagaaagtgaaggtcgacccagggctgtaggaagccataggagagtgaccacgggattccctgagaaacagggccggccccccaacttcagggacccaccgcccattccccgagagctgtcggaaccagatgcaacccggcagcccagagaactctcctgggaggctgtgggtgagccaggccaacattggtgtccctgtccccagagggaggagcaggcaggagagagaggggaaggaggtatgaatcccagtccccaggaacctagctctttaaactctggggagtcggattcaggaaacacccccaggaggccaagcctgaaaacagaggggagggaggaaggaaggagtcccagcaggagcacagccctggtttcctgtcactcagagctgattcacaggaggaggggaggttggggggcgggagacaaaaaccacacctctttttatataaggtttcatatttaatttggtcatggattcataaatacataagtattttgtacacaa

SEQ ID NO: 176108 - DNA, 3505 bp, Homo sapiens
  Payload ID: 14574
  Gene Symbol: RHOBTB2
  Gene Name: Rho-related BTB domain containing 2
  Uniprot ID: Q9BYZ6
  ENST ID: ENST00000519685
  CDS Start-End: 284-2533
gtccttcacctgccttcccataagctggactttggatcccagcccttaaaacccttgtgttgtttcttcctgcagacctggtcgagaacactacttcaggacagggaatagtgacaggccagcagagccccagaggcgaggtggcagtaaacaagaatatgcacgcgcagtggaccacttctgaaggtcaacatataactttctcatccctgacatcaactgtcatccctgtgagcagaaccaactaccaaaggagagaggagcctggagggaacacagagcgatgcaagcctggagaaaaggccccgatggcccccagaagacctcttcagacagcatgtcccgtttaatggattctgacatggattatgaaaggccaaacgtagagaccatcaagtgcgttgtggtgggggacaacgccgtgggtaagaccaggctcatctgtgcccgcgcttgcaatgccaccctcacccagtaccagctgctggccacgcatgtgcccacagtatgggccatcgaccaatatcgtgtgtgccaggaggtgctggaacgctcccgagacgtggtagatgatgtcagcgtctctctgcgcctctgggacacctttggagaccaccacaaagaccgtcgctttgcttatgggagatctgatgtggtggttctgtgcttctccattgccaaccccaattccctccaccatgtcaagaccatgtggtacccagaaatcaagcacttctgcccccgagcacctgtcatcttggtgggctgccagttggacctgcgctacgctgacctggaggctgtcaacagggctaggcgacccttggctaggcccatcaaacctaatgaaatcctgcccccagagaagggtcgggaggtggccaaggagctgggcatcccctactatgagaccagcgtggtggcccagttcggcatcaaggacgtctttgacaacgccatccgagctgcactcatctcccgccgccacctgcagttctggaagtcccacctccgcaatgtgcagcggcctctgctgcaggcacccttcctaccccccaagccaccgcccccgatcatcgtggtgcccgaccctccctccagcagcgaggagtgccccgcccacctcctggaggacccgctctgcgcggacgtcatcctggtgctgcaggagcgggtgcgcatctttgcccacaagatctacctctccacctcttcctccaagttctatgacctgttcctcatggacctgagtgagggggagctggggggcccctcggagccagggggcacccacccagaggaccaccagggccactctgatcaacaccaccaccatcaccaccaccaccatgggcgagacttcctgctccgagcagccagctttgacgtgtgcgagagcgtggatgaggctgggggctccggtcctgctggcctccgtgcttccaccagcgacgggatcttacggggcaacggaacagggtacctaccgggcaggggtcgtgtgctgtcttcctggagccgagcttttgtgagcatccaggaagagatggcagaagatcctctcacctacaaatcccggctgatggtggtggtgaagatggacagttccatccagccggggcccttccgggctgtcctcaagtacctgtacacgggggagctagatgagaacgagcgtgacctcatgcacattgcccacattgctgagctgctcgaggtctttgatctgcgcatgatggtggccaacattctcaacaatgaggccttcatgaaccaggagatcaccaaggccttccacgtccgccggaccaaccgggttaaggagtgcttggcaaaaggcaccttctcagatgtgaccttcatcctggatgatggcaccatcagcgcccacaagcccctgttgatttccagctgtgactggatggctgccatgtttggggggccatttgtggagagctccacccgggaggtggtgtttccctacacaagcaagagctgcatgcgggccgtgctggaatacctctacaccggcatgttcacctccagccccgacctggatgacatgaagctcatcattctagccaaccgcctctgcctgccacacctggttgccctcacagagcagtacacagtgaccgggctgatggaagcgacccagatgatggtggacatcgatggggacgtccttgtgttcctggaactggctcagttccactgtgcgtaccagctggccgactggtgtctccaccacatctgcaccaactacaacaacgtgtgccgcaagttcccccgagacatgaaggccatgtccccagaaaaccaggagtatttcgagaagcatcggtggccacctgtgtggtacctgaaggaggaagatcattaccagcgggcacggaaggagcgtgagaaggaggactacctccacctcaagcggcagcccaaacggcgttggctcttctggaacagtccatcctccccgtcttcctcggcagcctcctcctcatccccatcttcctcctcggctgtggtctgagatgctgccaccctcttctgaccctgctgctgttgtccccatccgccttcacccctctgctcttccgcatcaccccatccaccttacagggaccagggggcccacgtaaccaggacccagagggtggagctcttcttaccagccaccgtggctcagccagagaggagctgagccctgtggagcagaacgggaaccacctgcagaggtccccagacccaaagcaggacgggagacaactgcttggaggagcgaagagccctggcattttatctctgggtttgagagccctagagtcaaagggaaagcctcccagcctccagggcttctctgtgtgtcttggttgctgctctggccagggaggcagccccactcccagcaagcagaagtgatcctcgagggtcctgcccctgttggccatatctttccaccgacggacttgagtgttgcatttgttttgtgggcatttccacacgaagcctactcacaccctcactggagaagtcagggtagaaattgagccttcagagcccaactcaaggcttctacatcctggggtgcagctgcaaaaggccagacgtggaaaggcctgtatcctgccagtgtccctccgtcccagggggctgtgctagcacagacctgagaatggggacacaggtcattcagagctccaggcctggaagcagtgcctcttggtgcaacaagaaacttctccctcaccccctcctttaccctcagatttggagatggtaaccaaaggaagcagctgggacaggtggagaaggaagtaggaatgagtgcacggcgaccccgtgctcctcagggccctcccctgcctctgggtggcactgctttttatagggtggggcaaaattagcaaaaaacaaaaaccaatgacaaccaaactgaaaccgaaacgaaaaatcaacaaacactctgtcctctatccctccaaagaatgaaaatcagaaaaag

SEQ ID NO: 176109 - DNA, 4959 bp, Homo sapiens
  Payload ID: 14574
  Gene Symbol: RHOBTB2
  Gene Name: Rho-related BTB domain containing 2
  Uniprot ID: Q9BYZ6
  ENST ID: ENST00000522948
  CDS Start-End: 32-2236
agaggctgtagtgttccaggagaggggtgccatgaaagcgcggtcccgtttaatggattctgacatggattatgaaaggccaaacgtagagaccatcaagtgcgttgtggtgggggacaacgccgtgggtaagaccaggctcatctgtgcccgcgcttgcaatgccaccctcacccagtaccagctgctggccacgcatgtgcccacagtatgggccatcgaccaatatcgtgtgtgccaggaggtgctggaacgctcccgagacgtggtagatgatgtcagcgtctctctgcgcctctgggacacctttggagaccaccacaaagaccgtcgctttgcttatgggagatctgatgtggtggttctgtgcttctccattgccaaccccaattccctccaccatgtcaagaccatgtggtacccagaaatcaagcacttctgcccccgagcacctgtcatcttggtgggctgccagttggacctgcgctacgctgacctggaggctgtcaacagggctaggcgacccttggctaggcccatcaaacctaatgaaatcctgcccccagagaagggtcgggaggtggccaaggagctgggcatcccctactatgagaccagcgtggtggcccagttcggcatcaaggacgtctttgacaacgccatccgagctgcactcatctcccgccgccacctgcagttctggaagtcccacctccgcaatgtgcagcggcctctgctgcaggcacccttcctaccccccaagccaccgcccccgatcatcgtggtgcccgaccctccctccagcagcgaggagtgccccgcccacctcctggaggacccgctctgcgcggacgtcatcctggtgctgcaggagcgggtgcgcatctttgcccacaagatctacctctccacctcttcctccaagttctatgacctgttcctcatggacctgagtgagggggagctggggggcccctcggagccagggggcacccacccagaggaccaccagggccactctgatcaacaccaccaccatcaccaccaccaccatgggcgagacttcctgctccgagcagccagctttgacgtgtgcgagagcgtggatgaggctgggggctccggtcctgctggcctccgtgcttccaccagcgacgggatcttacggggcaacggaacagggtacctaccgggcaggggtcgtgtgctgtcttcctggagccgagcttttgtgagcatccaggaagagatggcagaagatcctctcacctacaaatcccggctgatggtggtggtgaagatggacagttccatccagccggggcccttccgggctgtcctcaagtacctgtacacgggggagctagatgagaacgagcgtgacctcatgcacattgcccacattgctgagctgctcgaggtctttgatctgcgcatgatggtggccaacattctcaacaatgaggccttcatgaaccaggagatcaccaaggccttccacgtccgccggaccaaccgggttaaggagtgcttggcaaaaggcaccttctcagatgtgaccttcatcctggatgatggcaccatcagcgcccacaagcccctgttgatttccagctgtgactggatggctgccatgtttggggggccatttgtggagagctccacccgggaggtggtgtttccctacacaagcaagagctgcatgcgggccgtgctggaatacctctacaccggcatgttcacctccagccccgacctggatgacatgaagctcatcattctagccaaccgcctctgcctgccacacctggttgccctcacagagcagtacacagtgaccgggctgatggaagcgacccagatgatggtggacatcgatggggacgtccttgtgttcctggaactggctcagttccactgtgcgtaccagctggccgactggtgtctccaccacatctgcaccaactacaacaacgtgtgccgcaagttcccccgagacatgaaggccatgtccccagaaaaccaggagtatttcgagaagcatcggtggccacctgtgtggtacctgaaggaggaagatcattaccagcgggcacggaaggagcgtgagaaggaggactacctccacctcaagcggcagcccaaacggcgttggctcttctggaacagtccatcctccccgtcttcctcggcagcctcctcctcatccccatcttcctcctcggctgtggtctgagatgctgccaccctcttctgaccctgctgctgttgtccccatccgccttcacccctctgctcttccgcatcaccccatccaccttacagggaccagggggcccacgtaaccaggacccagagggtggagctcttcttaccagccaccgtggctcagccagagaggagctgagccctgtggagcagaacgggaaccacctgcagaggtccccagacccaaagcaggacgggagacaactgcttggaggagcgaagagccctggcattttatctctgggtttgagagccctagagtcaaagggaaagcctcccagcctccagggcttctctgtgtgtcttggttgctgctctggccagggaggcagccccactcccagcaagcagaagtgatcctcgagggtcctgcccctgttggccatatctttccaccgacggacttgagtgttgcatttgttttgtgggcatttccacacgaagcctactcacaccctcactggagaagtcagggtagaaattgagccttcagagcccaactcaaggcttctacatcctggggtgcagctgcaaaaggccagacgtggaaaggcctgtatcctgccagtgtccctccgtcccagggggctgtgctagcacagacctgagaatggggacacaggtcattcagagctccaggcctggaagcagtgcctcttggtgcaacaagaaacttctccctcaccccctcctttaccctcagatttggagatggtaaccaaaggaagcagctgggacaggtggagaaggaagtaggaatgagtgcacggcgaccccgtgctcctcagggccctcccctgcctctgggtggcactgctttttatagggtggggcaaaattagcaaaaaacaaaaaccaatgacaaccaaactgaaaccgaaacgaaaaatcaacaaacactctgtcctctatccctccaaagaatgaaaatcagaaaaagcccctgcctagctcacatttctataaacagaggcccccatgatgaggaggtgaagatttaggttgcagaatcgactccaatgcctttcaggaaaggactcggcacttctctgactgcggaggccctgaccctgccagctggctccgagggcaacacaggggcctggcctctagagggctggtgattgaggggcccgggctggcggcaaagaggggtttggtctcggggcttaaatggcaccagactcttgcttttgcccatctggagactgcaggctcccttccttaccctcagagagtgcttatggtgggtgtttttgcggggctgcaataggggccaaaagtcagggaaaggggcactgacctgtagtgaaaggccacaggacacagccttattactgctggggtgggataaggggaaggagaagagggagaatggagcaggaggaaaagcagagttggtctagagaggaggagggcggggctggaggaatgtgggggattgaaactagctcccagcccccatggggcagcagctgggccacaattgcccctttccgttttctaaccccgactcagatttcaccacccacactctttttaggtgtaaaagatggagtcccacggaggaggggcagagccaggaggcagtggggctgtgggctcagagctcaggagtcgccttacctgagagagatgttctagctgagagggcctggccctggggtgggctccaggaaaacgctggttaggcctgggattgagctaacctgaaacaaaggtagcaggcaggacctaatgaccagaggttaaatcctcatcaagagagaccaggcggctggaggacaagcggctctaaccctgggggcggccatgttgtccaggcccaggcccctccaggactgtggctgcctcccctccacggcctccagggcggctggctggaaagccacgcgtatgctgccctctacaggctgctcggcctccctgcagctcagcgcagcccagggctccaagtgaggcccagaagcccatgggcagggctggggggacgaagggggaacccggagcacctccacttctagggaagatggacagcgtgggggcacacctgggcctcccggaagctgtggacgaaagggagagcgggtcctccagggcaaggggaacgggaaataggtctcctaggtgcctgaagcgctgagcaacctgggtaccctggtggggatgcagggaaggccggggcagagaaagtgaaggtcgacccagggctgtaggaagccataggagagtgaccacgggattccctgagaaacagggccggccccccaacttcagggacccaccgcccattccccgagagctgtcggaaccagatgcaacccggcagcccagagaactctcctgggaggctgtgggtgagccaggccaacattggtgtccctgtccccagagggaggagcaggcaggagagagaggggaaggaggtatgaatcccagtccccaggaacctagctctttaaactctggggagtcggattcaggaaacacccccaggaggccaagcctgaaaacagaggggagggaggaaggaaggagtcccagcaggagcacagccctggtttcctgtcactcagagctgattcacaggaggaggggaggttggggggcgggagacaaaaaccacacctctttttatataaggtttcatatttaatttggtcatggattcataaatacataagtattttg

SEQ ID NO: 176110 - DNA, 803 bp, Homo sapiens
  Payload ID: 14574
  Gene Symbol: RHOBTB2
  Gene Name: Rho-related BTB domain containing 2
  ENST ID: ENST00000524077
  CDS Start-End: 256-803
cttcctgcagacctggtcgagaacactacttcaggacagggaatagtgacaggccagcagagccccagaggcgaggtggcagcctgttctgttccacgcactcctttatctggaagcagtaaacaagaatatgcacgcgcagtggaccacttctgaaggtcaacatataactttctcatccctgacatcaactgtcatccctgtgagcagaaccaactaccaaaggagagaggagcctggagggaacacagagcgatgcaagcctggagaaaaggccccgatggcccccagaagacctcttcagacagcatgtcccgtttaatggattctgacatggattatgaaaggccaaacgtagagaccatcaagtgcgttgtggtgggggacaacgccgtgggtaagaccaggctcatctgtgcccgcgcttgcaatgccaccctcacccagtaccagctgctggccacgcatgtgcccacagtatgggccatcgaccaatatcgtgtgtgccaggaggtgctggaacgctcccgagacgtggtagatgatgtcagcgtctctctgcgcctctgggacacctttggagaccaccacaaagaccgtcgctttgcttatgggagatctgatgtggtggttctgtgcttctccattgccaaccccaattccctccaccatgtcaagaccatgtggtacccagaaatcaagcacttctgcccccgagcacctgtcatcttggtgggctgccagttggacctgcgctacgctgacctggaggctgtcaacagggctaggcgacccttggctag

SEQ ID NO: 176111 - DNA, 5537 bp, Homo sapiens
  Payload ID: 14575
  Gene Symbol: RHOBTB3
  Gene Name: Rho-related BTB domain containing 3
  Uniprot ID: O94955
  ENST ID: ENST00000379982
  CDS Start-End: 509-2344
ccgccaccggagctcccggggcctccgcggggagcgcgtcccccgcatccgcccgacccccggggctggcacgtgctgcgcccggtccgctgagggggcggaggccccgatctccccgaccccccttctctgcttagaggaggaggagcagcggcagcggcagcaggaggcgacagctgccagccgaggaggcgcggcggagaggggactgcggtcagctgcgtccacttggggctgtgcggcggtcccgcgcccggcgatgttcccgggcactccctgagtagcggcagcttatcccccgcccgctagcccgccctggtccccggctcgctcgctggctggcgcggccccggccccgctctgcgtcggccccgccgcggtggaggcgcgcgagggggacgcggccggggatgagcggattgcgggtgaactcgccgcccgggggccccgcgaagccgtgagccgctgcttttctccgagtcgccgccctgcccttggatttgagatcatgtccatccacatcgtggcgctggggaacgagggggacacattccaccaggacaaccggccgtcggggcttatccgcacttacctggggagaagccctctggtctccggggacgagagcagcttgttgctgaacgcggccagcacggtcgcgcgtccggtgttcaccgagtatcaggccagtgcgtttgggaatgtcaagctggtggtccacgactgtcccgtctgggacatatttgacagtgattggtacacttctcgaaatctaattgggggcgctgacatcattgtgatcaaatacaacgttaatgacaagttttcattccatgaagtaaaggataattatattccagtgataaaaagagcattaaattcagttccagtaattattgctgctgttggtaccagacaaaatgaagagttaccttgtacatgcccactatgtacctcagacagagggagctgtgttagtacaactgaagggatccaacttgcaaaagaactaggagcgacctatcttgaactccacagccttgatgacttctacataggaaagtattttggaggagtgttggagtattttatgattcaagccttaaatcagaagacaagtgaaaaaatgaagaaaagaaaaatgagcaactcctttcatggaattagaccacctcaacttgaacaaccagaaaaaatgcctgtcttaaaggctgaagcgtcacattataactctgacttaaataacttgctgttctgctgccagtgtgtggacgtggtattttacaaccccaatttaaagaaagttgtagaggcccacaagatcgttctctgcgctgtaagccatgttttcatgctgcttttcaatgtgaagagtcccactgacattcaggattccagtatcatccgaactacccaggatctttttgctataaacagagatactgcatttccaggtgctagccatgaatcttcaggcaacccaccattacgagtcattgttaaagacgccctcttctgttcttgtttatcagacatccttcgcttcatttattcaggtgcttttcagtgggaagaattggaagaagatatcaggaagaagttgaaagattctggggatgtttcaaatgtaatcgagaaagttaaatgcattttaaaaacaccaggaaagattaattgcctaaggaattgcaaaacctatcaagccagaaaacctttgtggttttataacacttccctcaagtttttccttaataagccgatgcttgccgatgttgtcttcgaaattcaaggtacgacagtgccagcccacagggccatcctggtggcccgttgtgaagtgatggcagccatgtttaatggtaattacatggaagcaaagagtgtcctgattcccgtttatggtgtttccaaagagactttcttgtcatttttagaatacctgtacacagactcctgctgcccagctggcatattccaggccatgtgtctcctgatctgtgccgagatgtaccaagtgtccagactgcagcacatctgtgagctgttcatcattacccagctgcagagcatgccaagcagggaactggcatccatgaaccttgatatagttgacctgcttaaaaaggccaagtttcaccactctgattgcctttcaacctggctacttcatttcattgctactaactacctcatcttcagtcaaaagcctgaatttcaggatctttcagtggaagaacgcagttttgttgaaaagcacagatggccgtcgaatatgtacttgaagcagcttgcggaatacaggaagtatattcactcccggaaatgtcgttgcttagtaatgtaacctggagcttttatacactacatttcttttttattattatgaagaatgggatacctccaggttccagtaaaattcttctgaccgaaaccaatgtgggtgttagaaaaattaccatatagcttaatatgtttattagttctctttggaaaaaaactaccactgtggtcttaaaagggaacaaaatataccataggctaaaactaaggctttcactctagaatgcaaagctgttttgcagctgttttcccttaaagatgtcctgttgctttagtgatatttagacccctctcagttaagaaatgcttagattaaaaaaaaaaaattacgtaggattaatacagaaatttaatcatgtctgattaattgctctattaaaataaggggcatttaaagacccagcataaccatttgtataatgagaaatctaggggaaaaccaatcagtccaacatgagattttaggaatagaaatttgccggccatttggaaagtgaaatgccacttagttctcaattgatgacagtgtttgaatcatcataaaaaaaatacctgcttttcatctggacaacccaattgagccactttatctccttttggcaatctgagtaggcggggaacctaggcagggctggctttcttagcgtgtaacttgtgtagcagcacagggcccacacttagaaggaccccacacttggttcaaggctctgctatagcggaaattcttaataatgtttgaagaagggccccatgatttcattttgtgctgagccctcaaaattatgtctgtttcgtggtgggaaatatcctatgttttcttgctcaaacacctttctctctgaaagcagaaaaaggcactgatataaagggaagagaaggaggctcaccggagggaagagaacatagtgaagattcccgcctttggggaggtctggaccacccagggcctccactgccaccttggctggcaagggagaaatgtgttgtgttgtcttagctttaaaacagtcacagttcttgctctatcatagatgaacaaatactttcttgatcattctgtaagaccaggaggttggtaagagtgactaaccagcctaactttaatacacatgtataaagatgttcacagagaaagatgctctgtagagaatttgctaccgaagttggctcaagaatttgtttttagtgttatttaccaagattaggacgtcagtggcttaaattctttgaattcttttcaaggactgcaagattatttgataaagagtagcatgaatcttgtgctctaatattacacagtaagttcaaagaaaggatgtaagtcaaagacttgttacatagagggaaaatggactgggatagaggacagactgatagtttctttctttcatatcacatgtatagagaaataattatatcagaaactcacaaacctagacatggaaaaacagattactgtctattgtcagcatcattttcatctgtaagtcactactggaatatatttttcttttaatttccagtgactttagaatacacacagtttttccgacttttcaaaaatttgattaaatggttttatagtataatattgggaccccataccgttagcccttgtatgtataccaacactgccaaagtaaaacattaggtcaggcatggtggctcaggcctgtaatcccagcattttgggaggctgaggcaagtggataacttgaggtcatgagttcgaaaccagcctggccaaaacagtgaaaccccgtctctactaaaaatacaaaattagccagatgtggtggcgcacacctgtaatcccagctactcaggaagctgaggcaggaaaatcgcttgaacctgggaggtggaagttgcagtgagccgagatcgcaccactgcactccagcctgggtgacaagagcgaaactccatctcaaaaaaaaaaaaaaaaccaaagtgaaacactaaaaattccctatagatatattccaggaaatattttaattgggctgattttaattaggctgtatcattgatgattactggaatcgattttatgtcttttgtattttaatcacttgagttaatcaaccactggcaaatcccatttgacaaagattagcattgtaaaaaacagatactgtggtagatttctagaaattcattcacatttaagacttctaaaatggaataatagccttttgtttttcatgagcatattcgcacccctatatgaattacagcatttaaagttcaaaatcagtaacttttaatctaggaaattgaaaaatattaagttgcaaagcaaaaaaaggtattttcttgaaaatactatttaatgtttaactagactataggtagttccttaaggttgtttgacctgaagtggagttgggtttggaagctggtgcccagttggtgtggagtgtgtagttttgttatgaaagttctctaccacctacctgtgtgagtgacaccaacatccagatgtcacagctctccagagctagtcagaagagaaatcaaattagtgtttaaacccatttgcatattgacttgtcagtacctttaactcaatttaatataacaagaaatcgtaaaatacttataacctatcttagagaaatgagtgctggttttgagagttgttttttaactgaaagattatttctagatgggtagtgctttgtgctggtttctgcttccatatatttcccagtcattttaattagagaagatactctatggtagaactaaggcctttcctttcttggccaaagtctttaccctatttaaccctttgtatatttctgactgctcactgttcatattataggggaccagatttgtaatatagaattctccataacatgaatgaaattaattctgtccaagccagcatggtggcttcatattaagtagtaacagaagtctgaacaattggataaatttgacttccaagacagctaaacttttcaactgcaattttaaaaactacactacactgttatagttaatctgacaaaaatgtcctcaaagagtactttattttatttaaagcatctgtttaattcaacctttaataattttgcaaagaagggtatgtgtgtattttaatatagcctgacctgaatttatatgtttttagctttagtatttaactttttgtaacaaataaaccttttttaaaacaagtttaa

SEQ ID NO: 176112 - DNA, 693 bp, Homo sapiens
  Payload ID: 14575
  Gene Symbol: RHOBTB3
  Gene Name: Rho-related BTB domain containing 3
  ENST ID: ENST00000502541
  CDS Start-End: 1-310
tgacatcattgtgatcaaatacaacgttaatgacaagttttcattccatgaagtaaaggataattatattccagtgataaaaagagcattaaattcagttccagtaattattgctgctgttggtaccagacaaaatgaagagttaccttgtacatgcccactatgtacctcagacagagggagctgtgttagtacaactgaagggatccaacttgcaaaagaactaggagcgacctatcttgaactccacagccttgatgacttctacataggaaagtattttggaggagtgaaaaaatgcctgtcttaaaggctgaagcgtcacattataactctgacttaaataacttgctgttctgctgccagtgtgtggacgtggtattttacaaccccaatttaaagaaagttgtagaggcccacaagatcgttctctgcgctgtaagccatgttttcatgctgcttttcaatgtgaagagtcccactgacattcaggattccagtatcatccgaactacccaggatctttttgctataaacagagatactgcatttccaggtgctagccatgaatcttcaggcaacccaccattacgagtcattgttaaagacgccctcttctgttcttgtttatcagacatccttcgcttcatttattcaggtgcttttcagtgggaagaattggaagaagatatc

SEQ ID NO: 176113 - DNA, 883 bp, Homo sapiens
  Payload ID: 14575
  Gene Symbol: RHOBTB3
  Gene Name: Rho-related BTB domain containing 3
  ENST ID: ENST00000504179
  CDS Start-End: 83-811
aagactcatagggtttcaggaccttgcagcttctcagcaatggagctgagttttcacttaggcaatttgtttactgctgtgaatgccaaagagagcagtgttgttcactgacaggcagcccatacagttcttaaagattaattgcctaaggaattgcaaaacctatcaagccagaaaacctttgtggttttataacacttccctcaagtttttccttaataagccgatgcttgccgatgttgtcttcgaaattcaaggtacgacagtgccagcccacagggccatcctggtggcccgttgtgaagtgatggcagccatgtttaatggtaattacatggaagcaaagagtgtcctgattcccgtttatggtgtttccaaagagactttcttgtcatttttagaatacctgtacacagactcctgctgcccagctggcatattccaggccatgtgtctcctgatctgtgccgagatgtaccaagtgtccagactgcagcacatctgtgagctgttcatcattacccagctgcagagcatgccaagcagggaactggcatccatgaaccttgatatagttgacctgcttaaaaaggccaagtttcaccactctgattgcctttcaacctggctacttcatttcattgctactaactacctcatcttcagtcaaaagcctgaatttcaggatctttcagtggaagaacgcagttttgttgaaaagcacagatggccgtcgaatatgtacttgaagcagcttgcggaatacaggaagtatattcactcccggaaatgtcgttgcttagtaatgtaacctggagcttttatacactacatttcttttttattattatgaagaatgggatacctccaggttccagtaaaa

SEQ ID NO: 176114 - DNA, 333 bp, Homo sapiens
  Payload ID: 14575
  Gene Symbol: RHOBTB3
  Gene Name: Rho-related BTB domain containing 3
  ENST ID: ENST00000510623
  CDS Start-End: 1-219
ctggtctccggggacgagagcagcttgttgctgaacgcggccagcacggtcgcgcgtccggtgttcaccgagtatcaggccagtgcgtttgggaatgtcaagctggtggtccacgactgtcccgtctggaagagttaccttgtacatgcccactatgtacctcagacagagggagctgtgttagtacaactgaagggatccaacttgcaaaagaactaggagcgacctatcttgaactccacagccttgatgacttctacataggaaagtattttggaggagtgttggagtattttatgattcaagccttaaatcagaagacaagtgaaaaaa

SEQ ID NO: 176115 - DNA, 547 bp, Homo sapiens
  Payload ID: 14575
  Gene Symbol: RHOBTB3
  Gene Name: Rho-related BTB domain containing 3
  ENST ID: ENST00000506959
  CDS Start-End: 6-547
gacaaatgagaaagcggcagacgtggtccatccacatcgtggcgctggggaacgagggggacacattccaccaggacaaccggccgtcggggcttatccgcacttacctggggagaagccctctggtctccggggacgagagcagcttgttgctgaacgcggccagcacggtcgcgcgtccggtgttcaccgagtatcaggccagtgcgtttgggaatgtcaagctggtggtccacgactgtcccgtctgggacatatttgacagtgattggtacacttctcgaaatctaattgggggcgctgacatcattgtgatcaaatacaacgttaatgacaagttttcattccatgaagtaaaggataattatattccagtgataaaaagagcattaaattcagttccagtaattattgctgctgttggtaccagacaaaatgaagagttaccttgtacatgcccactatgtacctcagacagagggagctgtgttagtacaactgaagggatccaacttgcaaaagaactaggagcgacctatcttgaact

SEQ ID NO: 176116 - DNA, 496 bp, Homo sapiens
  Payload ID: 14575
  Gene Symbol: RHOBTB3
  Gene Name: Rho-related BTB domain containing 3
  ENST ID: ENST00000514198
  CDS Start-End: 1-112
catcttcagtcaaaagcctgaatttcaggatctttcagtctttttcttaaaacttcagtggaagaacgcagttttgttgaaaagcacagatggccgtcgaatatgtacttgaagcagcttgcggaatacaggaagtatattcactcccggaaatgtcgttgcttagtaatgtaacctggagcttttatacactacatttcttttttattattatgaagaatgggatacctccaggttccagtaaaattcttctgaccgaaaccaatgtgggtgttagaaaaattaccatatagcttaatatgtttattagttctctttggaaaaaaactaccactgtggtcttaaaagggaacaaaatataccataggctaaaactaaggctttcactctagaatgcaaagctgttttgcagctgttttcccttaaagatgtcctgttgctttagtgatatttagacccctctcagttaagaaatgcttagattaaaaaaaaaaaa

SEQ ID NO: 176117 - DNA, 990 bp, Homo sapiens
  Payload ID: 14575
  Gene Symbol: RHOBTB3
  Gene Name: Rho-related BTB domain containing 3
  ENST ID: ENST00000510313
  CDS Start-End: 1-518
ttgccgatgttgtcttcgaaattcaaggtacgacagtgccagcccacagggccatcctggtggcccgttgtgaagtgatggcagccatgtttaatggtaattacatggaagcaaagagtgtcctgattcccgtttatggtgtttccaaagagactttcttgtcatttttagaatacctgtacacagactcctgctgcccagctggcatattccaggccatgtgtctcctgatctgtgccgagatgtaccaagtgtccagactgcagcacatctgtgagctgttcatcattacccagctgcagagcatgccaagcagggaactggcatccatgaaccttgatatagttgacctgcttaaaaaggccaagtttcaccactctgattgcctttcaacctggctacttcatttcattgctactaactacctcatcttcagtcaaaagcctgaatttcaggatctttcaggtagattgctaatttctgttttgaaaagaaaactttatgttctttgttcttagatttgagacataagttgtagaagtagtacttttagcaaaataagaatagtcaatgtaataaatttcttgtaaattatgcagtgtggtaattgaggaaacaatttatagtcacctgtgttacataagtgccttaacctgtgttacacaagaagttttctaatgattattttatagctccatccgtttttaaatgcattttctttccctgaaatagataaggtgacaaaatgtgtcctcaggtgacatttggttgtgaaaagtgatatcttagttctaactacctaagtcagcagcaaagtttaaacagtacagatttaaaaattttttataaaggaatttaactcttgttaactatattatatttagctttattgtactggatatctgtatttactgagtatacctatatgggagtcccttatattactttggaataacagtttttcatatataaaaaatgttgtgaaactta

SEQ ID NO: 176118 - DNA, 591 bp, Homo sapiens
  Payload ID: 14575
  Gene Symbol: RHOBTB3
  Gene Name: Rho-related BTB domain containing 3
  ENST ID: ENST00000513091
  CDS Start-End: 1-229
ctacctcatcttcagtcaaaagcctgaatttcaggatctttcaggaagttttatggtgaaaccagagtatcttcaaagaggcggggccaaggccagagctggacaccacgactgccacgtaagaggaatcccaagcatactgcgatcaagggaagggaagaaaatccactcccagaagcagctttttactgtgactctcatcgttactagaattaaaatggcaaaatgagaaagccagattctgagtcacggagggggagctaagtgacagctctgtccagagaaaaggatgtggcagggctgggaggcccctcacgtggtcagggctccggacttcccacttcccacttccctccaaagtaggctctgccacagagtctgagcctcctctcttttttcattcttttacctcagaaccctgtggccaggctccttccagaggcccctgccaggaggtccagggtctgtttcagggccctcaggctgttgccttaagttccctcagcctgaggtttatccacacgacttgcacctgctactcactcagagcctttctcttctccggtctgttgttggctcctcccttcctgg

SEQ ID NO: 176119 - DNA, 653 bp, Homo sapiens
  Payload ID: 14575
  Gene Symbol: RHOBTB3
  Gene Name: Rho-related BTB domain containing 3
  ENST ID: ENST00000503737
  CDS Start-End: 1-352
cgagatgtaccaagtgtccagactgcagcacatctgtgagctgttcatcattacccagctgcagagcatgccaagcagggaactggcatccatgaaccttgatatagttgacctgcttaaaaaggccaagtttcaccactctgattgcctttcaacctggctacttcatttcattgctactaactacctcatcttcagtcaaaagcctgaatttcaggatctttcagtggaagaacgcagttttgttgaaaagcacagatggccgtcgaatatgtacttgaagcagcttgcggaatacaggaagtatattcactcccggaaatgtcgttgcttagtaataaaaaggcactgatataaagggaagagaaggaggctcaccggagggaagagaacatagtgaagattcccgcctttggggaggtctggaccacccagggcctccactgccaccttggctggcaagggagaaatgtgttgtgttgtcttagctttaaaacagtcacagttcttgctctatcatagatgaacaaatactttcttgatcattctgtaagaccaggaggttggtaagagtgactaaccagcctaactttaatacacatgtataaagatgttcacagagaaagatgctctgtagagaatttgctaccgaa

SEQ ID NO: 176120 - DNA, 1432 bp, Homo sapiens
  Payload ID: 14575
  Gene Symbol: RHOBTB3
  Gene Name: Rho-related BTB domain containing 3
  ENST ID: ENST00000506817
  CDS Start-End: 538-852
cgcgcgggcggctcctttgtgtccagccgccgccaccggagctcccggggcctccgcggggagcgcgtcccccgcatccgcccgacccccggggctggcacgtgctgcgcccggtccgctgagggggcggaggccccgatctccccgaccccccttctctgcttagaggaggaggagcagcggcagcggcagcaggaggcgacagctgccagccgaggaggcgcggcggagaggggactgcggtcagctgcgtccacttggggctgtgcggcggtcccgcgcccggcgatgttcccgggcactccctgagtagcggcagcttatcccccgcccgctagcccgccctggtccccggctcgctcgctggctggcgcggccccggccccgctctgcgtcggccccgccgcggtggaggcgcgcgagggggacgcggccggggatgagcggattgcgggtgaactcgccgcccgggggccccgcgaagccgtgagccgctgcttttctccgagtcgccgccctgcccttggatttgagatcatgtccatccacatcgtggcgctggggaacgagggggacacattccaccaggacaaccggccgtcggggcttatccgcacttacctggggagaagccctctggtctccggggacgagagcagcttgttgctgaacgcggccagcacggtcgcgcgtccggtgttcaccgagtatcaggccagtgcgtttgggaatgtcaagctggtggtccacgactgtcccgtctgggtaaggaagagcagctgctccgcgctgaggctgaagaagcttttctttccttttttttccccctcccccttctgcccacttccgtgagtgtggagtgtccgcgttacatgggtcaaatttttaaacatttttgagaaaatctttggtcctttgtttcactgggcagggaacagccctgtcagagaacactcttaggaagatagaaggccccagtgggaatgtggagcacttactggtacacttcacgactgtgggttgacccttggtaggcagcagacagttgaatgtgccaactccaagggacggggtcactaagtttcatcagcaaaaagcagtgtttttttatgtctaccctatgggtgatagtgtaatattggtgttctaaaaatacatccctctcaaagctcaacacaggcaaaaatacttttcactgggacagttcagaaatagttcctctggaaagcggaggaaaagacagggactgggagttaattttaaatgactcatttatagcactattaattgatctctgaaaacttaattttaataatgcaaatactctttatgtgttagccatttgtcttagtgactcataaatcagaaataacattactaatgttgtttggaaaacttttaaaaaattaaaatttgtaataattgaacaaaa

SEQ ID NO: 176121 - DNA, 2220 bp, Homo sapiens
  Payload ID: 14576
  Gene Symbol: RTKN
  Gene Name: rhotekin
  Uniprot ID: Q9BST9
  ENST ID: ENST00000233330
  CDS Start-End: 319-1860
ggaggggcctgtgagctggggccgcccctgggattagcccggccttcggggacagctcggaggagctggggcggagccgcagggcctggcggccgccgagtgaagtgtgactccgtgggcctggcgtggaggcgggggcgctaggctgcagctggctcggaatcggggctggtttcctgtctggaagggaaggggcctgcagaagggagcggggacagcagcagacaggcacacccctgccttcctctctccctctcctcccttctctggaaaagcgaggacacggagttgcagaggaagctagaccatgagatccggatgagggaaggggcctgtaagctgctggcagcctgctcccagcgagagcaggctctggaggccaccaagagcctgctagtgtgcaacagccgcatcctcagctacatgggcgagctgcagcggcgcaaggaggcgcaggtgctggggaagacaagccggcggccttctgacagtggcccgcccgctgagcgctccccctgccgcggccgggtctgcatctctgacctccggattccactcatgtggaaggacacagaatatttcaagaacaaaggtgacttgcaccgctgggctgtgttcctgctgctgcagctgggggaacacatccaggacacagagatgatcctagtggacaggaccctcacagacatctcctttcagagcaatgtgctcttcgctgaggcggggccagactttgaactgcggttagagctgtatggggcctgtgtggaagaagagggggccctgactggcggccccaagaggcttgccaccaaactcagcagctccctgggccgctcctcagggaggcgtgtccgggcatcgctggacagtgctgggggttcagggagcagtcccatcttgctccccaccccagttgttggtggtcctcgttaccacctcttggctcacaccacactcaccctggcagcagtgcaagatggattccgcacacatgacctcacccttgccagtcatgaggagaaccctgcctggctgcccctttatggtagcgtgtgttgccgtctggcagctcagcctctctgcatgactcagcccactgcaagtggtaccctcagggtgcagcaagctggggagatgcagaactgggcacaagtgcatggagttctgaaaggcacaaacctcttctgttaccggcaacctgaggatgcagacactggggaagagccgctgcttactattgctgtcaacaaggagactcgagtccgggcaggggagctggaccaggctctaggacggcccttcaccctaagcatcagtaaccagtatggggatgatgaggtgacacacacccttcagacagaaagtcgggaagcactgcagagctggatggaggctctgtggcagcttttctttgacatgagccaatggaagcagtgctgtgatgaaatcatgaaaattgaaactcctgctccccggaaaccaccccaagcactggcaaagcaggggtccttgtaccatgagatggctattgagccgctggatgacatcgcagcggtgacagacatcctgacccagcgggagggcgcaaggctggagacacccccaccctggctggcaatgtttacagaccagcctgccctgcctaacccctgctcgcctgcctcagtggccccagccccagactggacccaccccctgccctgggggagaccccgaaccttttccctggatgctgtccccccagaccactcccctagggctcgctcggttgcccccctcccacctcagcgatccccacggaccagaggcctctgcagcaaaggccaacctcgcacttggctccagtcaccagtgtgagagagaaaggtgctggcataggatctgcccagaagagaaaatgacccatgcgcagttgggctctggatacggcgctgtctatagcaagttggccagtctggcctcctgttcctctgctggacctggggtaggctgcaggggtgggcagaagcccctcttaaattgtggttgccatggtaccgagggactcattcctggggctcgctgggacctccctaaacccttcctggaagaaaactggaaccaactctgccctacctccctgcactaaccagctttgaggatggcactgaagaacccttggagcaaacatacctcccttgtgactcccacatcaaccattaaagttatttaacagca

SEQ ID NO: 176122 - DNA, 2142 bp, Homo sapiens
  Payload ID: 14576
  Gene Symbol: RTKN
  Gene Name: rhotekin
  Uniprot ID: Q9BST9
  ENST ID: ENST00000272430
  CDS Start-End: 84-1775
cgagagacagaagccgaggagaggaggctaagccgggcggcgcggggagcgcactgagcaggcaaagtcgcagggccgccagcatgttctcccgaaaccaccggagccgggtcaccgtggccaggggctccgccctggagatggagttcaaacgcggccgcttccgactcagcctcttcagcgacctgcccgaggacacggagttgcagaggaagctagaccatgagatccggatgagggaaggggcctgtaagctgctggcagcctgctcccagcgagagcaggctctggaggccaccaagagcctgctagtgtgcaacagccgcatcctcagctacatgggcgagctgcagcggcgcaaggaggcgcaggtgctggggaagacaagccggcggccttctgacagtggcccgcccgctgagcgctccccctgccgcggccgggtctgcatctctgacctccggattccactcatgtggaaggacacagaatatttcaagaacaaaggtgacttgcaccgctgggctgtgttcctgctgctgcagctgggggaacacatccaggacacagagatgatcctagtggacaggaccctcacagacatctcctttcagagcaatgtgctcttcgctgaggcggggccagactttgaactgcggttagagctgtatggggcctgtgtggaagaagagggggccctgactggcggccccaagaggcttgccaccaaactcagcagctccctgggccgctcctcagggaggcgtgtccgggcatcgctggacagtgctgggggttcagggagcagtcccatcttgctccccaccccagttgttggtggtcctcgttaccacctcttggctcacaccacactcaccctggcagcagtgcaagatggattccgcacacatgacctcacccttgccagtcatgaggagaaccctgcctggctgcccctttatggtagcgtgtgttgccgtctggcagctcagcctctctgcatgactcagcccactgcaagtggtaccctcagggtgcagcaagctggggagatgcagaactgggcacaagtgcatggagttctgaaaggcacaaacctcttctgttaccggcaacctgaggatgcagacactggggaagagccgctgcttactattgctgtcaacaaggagactcgagtccgggcaggggagctggaccaggctctaggacggcccttcaccctaagcatcagtaaccagtatggggatgatgaggtgacacacacccttcagacagaaagtcgggaagcactgcagagctggatggaggctctgtggcagcttttctttgacatgagccaatggaagcagtgctgtgatgaaatcatgaaaattgaaactcctgctccccggaaaccaccccaagcactggcaaagcaggggtccttgtaccatgagatggctattgagccgctggatgacatcgcagcggtgacagacatcctgacccagcgggagggcgcaaggctggagacacccccaccctggctggcaatgtttacagaccagcctgccctgcctaacccctgctcgcctgcctcagtggccccagccccagactggacccaccccctgccctgggggagaccccgaaccttttccctggatgctgtccccccagaccactcccctagggctcgctcggttgcccccctcccacctcagcgatccccacggaccagaggcctctgcagcaaaggccaacctcgcacttggctccagtcaccagtgtgagagagaaaggtgctggcataggatctgcccagaagagaaaatgacccatgcgcagttgggctctggatacggcgctgtctatagcaagttggccagtctggcctcctgttcctctgctggacctggggtaggctgcaggggtgggcagaagcccctcttaaattgtggttgccatggtaccgagggactcattcctggggctcgctgggacctccctaaacccttcctggaagaaaactggaaccaactctgccctacctccctgcactaaccagctttgaggatggcactgaagaacccttggagcaaacatacctcccttgtgactcccacatcaaccattaaagttatttaacagcagccttca

SEQ ID NO: 176123 - DNA, 2646 bp, Homo sapiens
  Payload ID: 14576
  Gene Symbol: RTKN
  Gene Name: rhotekin
  Uniprot ID: Q9BST9
  ENST ID: ENST00000305557
  CDS Start-End: 587-2239
gggacagctcggaggagctggggcggagccgcagggcctggcggccgccgagtgaagtgtgactccgtgggcctggcgtggaggcgggggcgctaggctgcagctggctcggaatcggggctggtttcctgtctggaagggaaggggcctgcagaagggagcggggacagcagcagacaggcacacccctgccttcctctctccctctcctcccttctctggaaaagcgagctgggagaacagctgccaccaaagcgagactggacactctgtgcctagagccccctctgcagctggcctttcctcctgggaccccacttatcctcacttcgctttctttttcttccctgcctggctcccggcagggccccggagcagcagtgggcgaggaaaatttgtcacagcagccagaggggtttaacaggagtgcagagggataagggcagcttctgccctctgcccaagagctggccacctctttaaagactgagggaacagtgggaggaggaactgtgggacagtgtggtacctatctgtcccccctctggaggggttgacaagggaaagggcaccggggggcacagagatgcaggacagattgcacatcctggaggacctgaatatgctctacattcggcagatggcactcagcctggaggacacggagttgcagaggaagctagaccatgagatccggatgagggaaggggcctgtaagctgctggcagcctgctcccagcgagagcaggctctggaggccaccaagagcctgctagtgtgcaacagccgcatcctcagctacatgggcgagctgcagcggcgcaaggaggcgcaggtgctggggaagacaagccggcggccttctgacagtggcccgcccgctgagcgctccccctgccgcggccgggtctgcatctctgacctccggattccactcatgtggaaggacacagaatatttcaagaacaaaggtgacttgcaccgctgggctgtgttcctgctgctgcagctgggggaacacatccaggacacagagatgatcctagtggacaggaccctcacagacatctcctttcagagcaatgtgctcttcgctgaggcggggccagactttgaactgcggttagagctgtatggggcctgtgtggaagaagagggggccctgactggcggccccaagaggcttgccaccaaactcagcagctccctgggccgctcctcagggaggcgtgtccgggcatcgctggacagtgctgggggttcagggagcagtcccatcttgctccccaccccagttgttggtggtcctcgttaccacctcttggctcacaccacactcaccctggcagcagtgcaagatggattccgcacacatgacctcacccttgccagtcatgaggagaaccctgcctggctgcccctttatggtagcgtgtgttgccgtctggcagctcagcctctctgcatgactcagcccactgcaagtggtaccctcagggtgcagcaagctggggagatgcagaactgggcacaagtgcatggagttctgaaaggcacaaacctcttctgttaccggcaacctgaggatgcagacactggggaagagccgctgcttactattgctgtcaacaaggagactcgagtccgggcaggggagctggaccaggctctaggacggcccttcaccctaagcatcagtaaccagtatggggatgatgaggtgacacacacccttcagacagaaagtcgggaagcactgcagagctggatggaggctctgtggcagcttttctttgacatgagccaatggaagcagtgctgtgatgaaatcatgaaaattgaaactcctgctccccggaaaccaccccaagcactggcaaagcaggggtccttgtaccatgagatggctattgagccgctggatgacatcgcagcggtgacagacatcctgacccagcgggagggcgcaaggctggagacacccccaccctggctggcaatgtttacagaccagcctgccctgcctaacccctgctcgcctgcctcagtggccccagccccagactggacccaccccctgccctgggggagaccccgaaccttttccctggatgctgtccccccagaccactcccctagggctcgctcggttgcccccctcccacctcagcgatccccacggaccagaggcctctgcagcaaaggccaacctcgcacttggctccagtcaccagtgtgagagagaaaggtgctggcataggatctgcccagaagagaaaatgacccatgcgcagttgggctctggatacggcgctgtctatagcaagttggccagtctggcctcctgttcctctgctggacctggggtaggctgcaggggtgggcagaagcccctcttaaattgtggttgccatggtaccgagggactcattcctggggctcgctgggacctccctaaacccttcctggaagaaaactggaaccaactctgccctacctccctgcactaaccagctttgaggatggcactgaagaacccttggagcaaacatacctcccttgtgactcccacatcaaccattaaagttatttaacagcagccttcacctggctcctgaggacagggtgcctctctctgcctggtct

SEQ ID NO: 176124 - DNA, 2383 bp, Homo sapiens
  Payload ID: 14577
  Gene Symbol: RTKN2
  Gene Name: rhotekin 2
  ENST ID: ENST00000315289
  CDS Start-End: 170-1096
taatgaagcagggccagactttcagataaaggtggaagtgtatagttgctgtacagaagaatcttctataaccaacacaccaaaaaagctagctaagaaactcaagacatctataagtaaagctacaggaaagaaaataagttcagtgcttcaagaagaggatgatgaaatgtgcttgctcctcagctctgctgtttttggtgtaaagtataatttgctagctcacactaccctaaccttggaaagtgctgaggatagtttcaagacccataatctgtctattaatggaaatgaggagtcttcattttggcttcccctgtatggcaacatgtgctgccgactagttgcccagccagcttgtatggctgaggatgcatttgcaggatttcttaatcagcagcaaatggtagaaggtctgattagttggagaaggttgtattgtgttttgcgaggaggtaaactctattgtttttacagtccagaggaaattgaagctaaagtggaaccagctttggtagtacccattaacaagtcattagttttatttgaagacagtctcgaaggaattcaactcgccatatctcagtcctttaaggaaaccagaatccgggcaatggataaggatgccaagaaaagaatccataatttctctgtcatcaatcctgttcctggacaagctataactcagatttttgcagttgacaatagagaagatcttcagaagtggatggaagccttctggcagcatttctttgatcttagccaatggaagcactgttgtgaagaacttatgaaaattgagattatgtcaccacggaaaccacctttgttcttgacaaaagaggcaacctcagtctaccatgatatgagcattgattcacctatgaaacttgaaagtttaacggatataatacaaaaaaaaattgaagagacaaatgggcagttccttattggtcagcatgaagaatccttaccacctccttgggccacactctttgatggtaaccatcaaatggtcatccagaaaaagaataatagtaatcaactacataatctccagaaactgccagcaacttccaaattcctcttcacatagcttctcaaatacttcattagaaccagtgtgaaaaatttaaaatacaatgtgacatttctctagtagaatgtaagcttcatgagggaaaagacaacgcgtctccttcctgtattcctagcacccagtacggcacctgacacataatagtgaccttagaagaatatttaagagtcattgagtaaacattttgtagagctgtccatgtttattttccattcagtgtttaccaggtgtctgctatttggacagtcacttcattgttcattagtacatgactttggtaaatatatctcctgtgaagagaaatattataactactatggcattcaacactggtatttcagttactcaactaatccacccactgatggagtgaaccttgaattaaatgctttgaagaataaagtgaatcttgataaaaatcaaaggctgaagaaatcttgtttgacagaaggcatgaacaaaaatgctaaaattaatactgtttgtggagaaacactcattccaccgcagactaaatggagttcatgagtatcaaaatgcctatgtgatcaaaaggcagaaacagcttctttttactaggtctgttaatattccaggactcataatattgtgcctacatgagcacctgtgtttgtggtaactcaaagtatttgaacaccttatctcatccaacctcaaatttcctgtgaggtatttaagcaccgagagctcttggtactgttttcaagatgaagcagatgaattagagaggctgttcacacaccaaatttcacagaagcctatggaggaaatgacggggagacttaccagttaacacccagttgcagaaatcaatgtcagagcttgaaaggaccttataaacccctgatccaatgtggactttcctagtaagacttctgtttgcagtgacttggttcatttcaccaaccacaagaattttaagtaatttttaatcataaaagtaacatagaacatagtaatacatatatacgtacatacatgatacagaaaggtatcaaaaaacaaaaacatatattacttcctcctctaacattccagtgccagtttccaaagattcctattacccagaggtaaccactgttaataatttttaatgtatatttccaaaaattttttatgcatttagaaatgtgtgcatgtgggtgatgggtgcaccaaaatctcagaaatcaccactaaagaacttactcatgtaaccaaacaccatgtggtcccccaaaaacctattgaaataaataaataataacataataaagacttaat

SEQ ID NO: 176125 - DNA, 6641 bp, Homo sapiens
  Payload ID: 14577
  Gene Symbol: RTKN2
  Gene Name: rhotekin 2
  Uniprot ID: Q8IZC4
  ENST ID: ENST00000373789
  CDS Start-End: 98-1927
ccgggcggttggcgtcctctgcggctcctgccaggggcgggcttttcaaatcttccctttgaaggagtggcgacggcccggacagttcgcgttggagatggaggggccgagcctgaggggtcctgcgctccgcctggcggggcttcccacccagcaggactgcaacattcaagaaaaaatagacttagaaattcgaatgcgagaaggaatatggaaactcctttctctgagcactcagaaagatcaagttttacatgcagttaagaatctcatggtgtgcaatgctcgactaatggcctatacatcggagctacagaaattagaagaacagattgcaaatcagactggaagatgtgatgtgaaatttgaaagtaaagaacgaacagcatgtaaaggaaagattgccatatcagatattcgaataccactaatgtggaaagactctgatcacttcagcaataaagaacgatcacgacgctatgccattttttgtttattcaaaatgggagctaatgtgtttgatactgatgtggtgaatgtggataaaacaatcacagatatatgttttgaaaatgtaaccatatttaatgaagcagggccagactttcagataaaggtggaagtgtatagttgctgtacagaagaatcttctataaccaacacaccaaaaaagctagctaagaaactcaagacatctataagtaaagctacaggaaagaaaataagttcagtgcttcaagaagaggatgatgaaatgtgcttgctcctcagctctgctgtttttggtgtaaagtataatttgctagctcacactaccctaaccttggaaagtgctgaggatagtttcaagacccataatctgtctattaatggaaatgaggagtcttcattttggcttcccctgtatggcaacatgtgctgccgactagttgcccagccagcttgtatggctgaggatgcatttgcaggatttcttaatcagcagcaaatggtagaaggtctgattagttggagaaggttgtattgtgttttgcgaggaggtaaactctattgtttttacagtccagaggaaattgaagctaaagtggaaccagctttggtagtacccattaacaaggaaaccagaatccgggcaatggataaggatgccaagaaaagaatccataatttctctgtcatcaatcctgttcctggacaagctataactcagatttttgcagttgacaatagagaagatcttcagaagtggatggaagccttctggcagcatttctttgatcttagccaatggaagcactgttgtgaagaacttatgaaaattgagattatgtcaccacggaaaccacctttgttcttgacaaaagaggcaacctcagtctaccatgatatgagcattgattcacctatgaaacttgaaagtttaacggatataatacaaaaaaaaattgaagagacaaatgggcagttccttattggtcagcatgaagaatccttaccacctccttgggccacactctttgatggtaaccatcaaatggtcatccagaaaaaggtactgtatcctgcaagtgagccattacatgatgaaaaagggaaaaagagacaagctccccttcctccttctgataaacttccattcagcttaaaatcacagagtaacacagatcaattggttaaggacaactggggaaaaacaagtgtatctcagacatcgtctttggataccaaactatcaactctaatgcatcacttacagaaaccaatggctgctcctcgaaaacttctgcctgccaggagaaatagattaagtgatggtgagcacacagacactaaaaccaattttgaagccaagccagtgccagctccaaggcagaaatccatcaaagacattctggaccctagatcatggctgcaggcacaagtatagaaaactcttaatgataaaacatttaacaaaatctataactgtgaagcttaattcagaggcattatagaataatgtgtaattatataggtaaatatagtgatttataccaataattaataagctattaggtatagaaaaacattttataatgaagaagtggatttctcttttactcctgatttgcagaatgtaagtgatttctccagcagtgtgcaagaggcagtttctagacaatatcctaattgttggaagggttaatttattcctgaattagtaccaggcagtgaataagccctaggcagaataaagcattaaaatttcttttggggagagactgtctagtaatttaaaatgtgttaaatatgaaccatattctcattgtgagaattttaatactaatggaatgtttcaaaggttttattcaaaccacaaattatagaatccacccaagaaaattttcttagcattctggaattctcatctaatggttcactggctctcatctattgtttaactcactagtttataggcctgaccttttaaattcctgggataaattttagaatattaaattcttcatctttaaagggaatttgtaatgtgctattcaaacttgtttccttgatgagccctgaaatactgttgacattaactttcataaatgaagcataacacttactagtttagagaaatggtagatgaaatgctctttacattcaattttctgtgtgtggtgctaatttccattgtgactttggaatttagggaagtgagtagctgatcaacaccttaaaattcatttaatacttatttaaaaagaagatgagagattcaaaaatatcagaaaagttggccatggtaaataattttcagaattcttttttaaaattttaattagatttccttttcctagtaagagttgatgtctgctagtggtatttttcattaaatgtcatattcttacaacagtgacattggaatcatttccataggaggtaatttccatagcaactaatcatagtgacccaaacaggattataaagtcaagtgaggaataaatagcagaaaaataccttaaaggaacaaaaaatccattttttataataatgctttttgtaaacaagagcagaacagttttaaaaatctaattagaatttccaaataaaacagtttccataaggtgtcagcaacagcactaaaaatctcaaatcacactgaaccctaaatgtcattgcaagaaataaaaatttaagaattaaattgctgccctgtgtataatctcttgagatctttttaaagctagcaagaactctatttggatcagaactacattattacaaaacaaaatgaacacttgaccaaaaaaccacattaatttaaatggagcctttcattattttcagatagcggggtcttttccatttatagagaatgatgtaactgccaggacacttttgtgtttgcccaggactcctagtaagaattgaatcttgagggagtaatgataacaaaaggtttcttgtgactggtaacatcaggacagacagagtttttggtgagaagaaagtactatatgcctgcttgatagcatgtagagatcatcacatgtatggaaaccttaaaaagtaaacttattttttctaactagaaggctctcataagtttctgttatgattgccatttcaataaatgacattaaaaatctaaaggatattattgtttgaatttttgggttattttttaaaacttcattgctgtttttgacagcatttgtgactgtcattgccactaaattattgagctagaagatgctgcagggaaaattgttttgaagctggcatctaagcattcttttttttttcctagttgatgccttcctttattacaaatcagtattaaaacttccagattatattcttgtcatttttcctcatgcagataacagcaggaaggacttaaggtgtataagaaaaagaaagtattcatacagaaattacctagcagttgtgccctcagagtagaactttgaaacaggactgaagccctttttacctagaaccatttaaaagcctgagcaaggaccaccaccccctccccaccaaattattcggtctctttctggggggcccagcttactgtatgttacaagtctttgaaatgggtctggtgtcttcagctcctgaaatgctaatttaccccttacctaaggagtgtagttataatacagagttggtttccttccttccttccttccttccttccttccttccttccttccttccttccttccttccttccttcattccctctgtccgtctctccttccctccttccctccttccttcctttttgtctttgtttctttctctggccccctgtcctctctctctgtctcatccccttttcccactttccttctgtctctccttcctcccttcctttacagtttaaaaaaaaaatctaaaaatagttaagcactgtgtcaaagagtgtttcaaaagaattgtttgttttctcatttcttaaaccagaagtttatgacaaataaatatgccatgtaatatgaaagctgcttcagctttttatgagctttcacattccttgtttgtccttttaatttgtttcttgatatatgaagactataaacttgaaacaaagagttagctgtcagctcttgataatataattggggaaacagaatagatattttatgatatgataattctgatgatctaaagataatgtcttagacaattacctttacatttcaagctctgggatataaattacgtagtcagcattaagatagtattatttttaattgctactaagtggtaacttttgtattttaatatcttgcaagggcaaagaaggcatttttaaaattctaaatgcacacctcctaaggtaaatagtctttcaaaaatatcaggcgtgccaactcttgctgagttttgttaaatcctccttaactgtctgcagtgccccctgacttcttttaaatggatgtgaatatatgtggaaaactaaatccatttattataaatgccttatctttaccctttgggatcttactaaatgcattttacctgctactatttattaaaaatggaagctgtcttgaattagagatacctcacgtaaggtaggttaagcagtcaagtatttctttaggcttatgttcagcacctcagccccctactgagaagttaattaattcagtccaaaatgaaattatagggcagtttggtgcaatttatgttaaatgccatttgaatgtaatcacctgtgttaccacgaatgaggcacaactatactacatggacagagtactgcattgcaccatgagcaagaactgctctgcaagaaaaatatctgtccctgtggtctgaatttatcaaaactcattttcttgttaaagagtgaattattgaatagtaattaaactttaactgatgaccatttatattctagtagccatcttcactgttagtcttaaattataatgtaaagttgacattttccccttacatttcaaaggcatcactatttttaaatgtttacatatgtttacatgtttgtgtgcaactgcttcattgctattaatagttaaatgaaatctgcatattctggatcatagatgttcttagttaactctgggaaagatgttacctttgggtttttaaaagacaagtcatcatttgaaaatatattagggtgtgttgattttctgacatgcttgtgtaattggctttgtttataatttttattttttaatatgggtcagacttttggattaaaaagtattatatcatggacatacattttttaaagtaccaaaggtatttggtaagcgagcccaagtcatgtaattgaaacttctgtacattaaaagaactgattcatgaagacgttttctaactttttctctttaagtgctcctctagactagactgattgaagtagacagtgtggtggaatcagtttaatcagaaaaagacataccaagtagctggtgctaattattataagactaacattctgataagccatggtataattaacattattaaaatgtttacatataatccttcttaaagtatactcttttaaaaatccattgacataaccttacttttagtttagtgatccagaatttccccagagcttaagccactgcagtaaattaggtacgtaggatattcagtcgctactagccacaaggagtctccttattttaatgtacctccctcagtactttattcctgcagagcgcctcagagtgggggagagaaatgagcaatcctggctcagttggattatttcagcattttatttctaaatctgtagtgtgatcagaaatatttaaaattaaaaaaatactttacagagagaggcctactaatcaatgtgcttagagaaacaaactacctttacattcaattaacaacaaaaaaagttacagaaattttaacaaacatttttctttatctgagtatgggagaaaatactaatgctgacacgtttaataattagaaaagatcattccagatcttatggaaaattgtgttttaaattccagcagtttgctcttgagacatggtaatctcttaatgtaactactaaaggagaggtagattgaaaagatcttgtatatacataattatgtcagatggttcaagatatcaaaataaattgttttgttgaaaatgaa

SEQ ID NO: 176126 - DNA, 2076 bp, Homo sapiens
  Payload ID: 14577
  Gene Symbol: RTKN2
  Gene Name: rhotekin 2
  Uniprot ID: Q8IZC4
  ENST ID: ENST00000395260
  CDS Start-End: 98-589
ccgggcggttggcgtcctctgcggctcctgccaggggcgggcttttcaaatcttccctttgaaggagtggcgacggcccggacagttcgcgttggagatggaggggccgagcctgaggggtcctgcgctccgcctggcggggcttcccacccagcaggactgcaacattcaagaaaaaatagacttagaaattcgaatgcgagaaggaatatggaaactcctttctctgagcactcagaaagatcaagttttacatgcagttaagaatctcatggtgtgcaatgctcgactaatggcctatacatcggagctacagaaattagaagaacagattgcaaatcagactggaagatgtgatgtgaaatttgaaagtaaagaacgaacagcatgtaaaggaaagattgccatatcagatattcgaataccactaatgtggaaagactctgatcacttcagcaataaagaacgatcacgacgctatgccattttttgtttattcaaaatgggagctaatgtgtttgatactgatgtggtgaatgtggataaaacaatcacagatatatgttttgaaaatgtaaccatattgtaagtattttttaatcttcagagaataaaaataatttaaaattcttcttttttaaaagaaagttcttattattggttctttggattcattttatgtttaaatgtttaagtgatctttaaatgtttaatatgattttaaaaatcattttgttcagaagaagtccatttctctatctgcagttttctgatgtgaaataaaaatggaaatcttgtaattactattagcagtaaatatttgacttattagatatgacccatttttaaattgttaataaatatagttcagttattaacaaagctatgcatacaacagaatatcctgtaatgttatttgatatagagagaatttaagcataaaacaggatttttatctcatgtaggatatttggttgcagaaatactaaaatagtatagcaactttatttacaagatagtcctgaagtacatgctatataggaagagcactttgaaattttggggtgttctttttcttatggtgcacttctttcatgtacttcaaagcaataaaaaaaaatgggtgatctcagggctgtttttattgtccctgctcttttacaggctcattttattgtggtcataatacagaacaagaaggaactccttgggtagccatagaaatcatttttaactaacatagtttttcctgccctccttcaaaggttctatgtgcctaaatcagtgtgggatttgtattttagacttttaaagacacgatctttagatctaaatgttaatagctactaactattaatataaaaatccatgtgcatggtttttgccattttcagctatggagctagacaggtgagattttagaggcctagttttgccactcacataacattaaaaaaacctatagtaaaccatattttgtagcttctggtccagtgtctcatagtaatagtatagcctggaaaaataaaatgcattgttctgagttataagtagtaattcaggccttcttacaagctgtattgaaccaaaggaatttatttaggatccaaaacatatccccaaatgcttatataattgaggctaaaaaaattacttttttcttggttatctgaatacatttatttccattatcaactattgctagtgaacttttttttctgccaaaattaccagttgatgggcccttttcttcacatcattttgctattgtttgttttgatcatggagacaaaaatcagacttttttttccagggaaagaacaatagaagttactgaggaagacaacacatgatttataattttttgagaattctgtaaatattttaaattgtactaaaaataactgctgacaaatgttctacatgttgaaaaatgtgctttttgttatgatgattgtttttaataagtattcaatatttatgaatctctggtttttctctaaatattgacatttgttagtcattaccaggaatactgcatgtttaaaagttgccaaataataaactataaaaata

SEQ ID NO: 176127 - DNA, 769 bp, Homo sapiens
  Payload ID: 14578
  Gene Symbol: RHOXF1
  Gene Name: Rhox homeobox family, member 1
  Uniprot ID: Q8NHV9
  ENST ID: ENST00000217999
  CDS Start-End: 76-630
aactagctccaccctctaacccccactccagctgcagacgccacggagtttgtgcaggggcgcagcgctccagccatggcgcgttcgctcgtccacgacaccgtgttctactgcctgagtgtataccaggtaaaaataagccccacacctcagctgggggcagcatcaagcgcagaaggccatgttggccaaggagctccaggcctcatgggtaatatgaaccctgagggcggtgtgaaccacgagaacggcatgaaccgcgatggcggcatgatccccgagggcggcggtggaaaccaggagcctcggcagcagccgcagcccccgccggaggagccggcccaggcggccatggagggtccgcagcccgagaacatgcagccacgaactcggcgcacgaagttcacgctgttgcaggtggaggagctggaaagtgttttccgacacactcaataccctgatgtgcccacaagaagggaacttgccgaaaacttaggtgtgactgaagacaaagtgcgggtttggtttaagaataaaagggccagatgtaggcgacatcagagagaattaatgctcgccaatgaactacgtgctgacccagacgactgtgtctacatcgtcgtggactagccctagaatgccatccttcttcaggagctagtttggagatgggtttttctggtgccactgacacctgggctgcccatgccgctcaggctacccttatctcctctgcacttatgttatcaataaagaggcaaattctcaa

SEQ ID NO: 176128 - DNA, 2900 bp, Homo sapiens
  Payload ID: 14579
  Gene Symbol: RHOXF2
  Gene Name: Rhox homeobox family, member 2
  Uniprot ID: Q9BQY4
  ENST ID: ENST00000371388
  CDS Start-End: 191-1057
aacccacagcaaatagcgggaagcagaaaagcaagagaggaggtctctaagtggatacactgttgctgagtctagacaccagaagaacgttgcaggcggcgactcacagttctagcactgcctaggagagcgtggtggccccagctcagaatctgcagaagtgcacagctccatccacaccactcagggtatggagcctccggaccagtgtagccagtatatgaccagcttgctcagccctgcagtcgacgacgagaaagaactacaggatatgaatgctatggtgctgtcgcttactgaagaggtcaaagaggaggaagaggatgcacagcctgagcctgagcaaggcacagcagcaggagaaaagttaaagtcggcaggagcccaaggcggagaagaaaaagatggcggcggagaagaaaaagatggcggcggcgccggagttcctggccacctatgggaaggagacctcgagggcaccagcggcagcgatggcaacgttgaggacagcgaccagagcgagaaggaacctgggcagcagtattcgcgcccacagggcgccgtcggggggctggagcctggcaacgcgcagcagcccaacgtccacgccttcaccccattgcagctgcaggagctggagcgcattttccaacgcgagcagttccccagtgagttcctgcgaaggaggctggcaagaagcatgaatgtgactgaactcgcagtgcagatttggtttgagaatagaagagccaaatggaggagacatcagagggcattaatggcaagaaacatgctgcccttcatggcagtgggccagcctgtcatggtaaccgcagctgaggccataacggcacccttgttcatcagcgggatgagagatgattacttctgggaccacagccattccagcagcctgtgtttccccatgccaccctttcctcctccgtccttgccccttccactcatgcttcttccacctatgccacccgctggccaggctgaatttggcccattcccttttgttatcgtgccttctttcacattccccaatgtctaagggatagcctctgtgccactttttgccagagtgtctttgagccagattcatattttgcatagcaccccatcaaaagtagttcatcaaatgtctattaaacgttttaaagaaaagtacatcattgacccatttttagggcacttgtaaaaatgtttctataaatatgtgaagggtatgtacatttgttttgtgtgtcacatggggtcagtaagttctcaataaaaattgttaagaaatgccattcaaaccgaatgtcacggactctcgtctcatgcagtaatcttgagtcaccatctgggggctgtgcatgtcacagaattttcccatgtgcccatggcaggcttacaccgacccagacattctcttccacccccacccccaacaccccatactcatctcctctctgcccccattgataccaggtacatgtgcaggatggggtggtgtgagtccctaatgagagaatagtgtgtttcaagttactgccagggtggaaaacagcaaaaccaaaatggtatcgggaaggaagccatgcccactcttaaaaattcattaagttttttcttgctatggaagacttctttaaagtaattttcttgtaaaagtgtaagtgtaaataatgccatgaaattatacacttatttaatggctaaaatggcaaatttttatatggtttaccacaacaaaagaaaagaaaaaatataccaaaaagtttttaaaaagtgatcatgaacattgtggtcatcctgtgaagtgattgcaatgcctgcagataaggagtgatggttacaacagtattttctctgaaaattatttgatggccagtttcataatgattatgttttcagcctgaaggaaaattccattttcttgggtgagcatgaactttctgtcaggctgtctgctgcttttcattccccacttctctcttcacaattgtgggtgtcaagcttcagccacgcaattgcatttggtgtgagggttttgcaaggagaaggaggtttattcatacccctgaagccacaagccttggtgggaataaggaaagtccatgaattcactatgcattaatgcatgcctcttggccaagtggattcttttttcttctccgattgagattttccttttttttttttttttttttttttgctcttgttctcattgtattgtgctttgtataattatttacagtaagtcgcgcatgtcagtgtacattccgtctggaaattgtttccatttggtacattttgtgccagtcggtctattcctgctcattattttgttttttctacattcagactgaaacatttggtagcctagagatactcagaaataggcaaagaaaggtaaaaggggaggaggggagattgaaatcatacttccattatccctccccgtggttatcagattcataaaatttttacaccatcaaaagacatttttagccatatatgtttcctttatgtagaaaatgagatctcctatactcagttggcatttgttttcatgtatctgataagtacctgttagaattataggtcaagatgttgtctagctctggtaacctagatcctgaacttcaaagcagagttcttggaccttaagaaattcaaattcgtagaattatagttaggatgtcatttactgaccttgaacaacacattgtttaggtagcatacaatgggactagttcaaggggctgggtggagaacaagttacaattttttctgatggagaacattactggagacagtaccctttaaaactttcattccctttttattagcagctaacgtcttgtatgcctttactatgtgacaagcaataaaataatgtccttgga

SEQ ID NO: 176129 - DNA, 2864 bp, Homo sapiens
  Payload ID: 14580
  Gene Symbol: RHOXF2B
  Gene Name: Rhox homeobox family, member 2B
  Uniprot ID: P0C7M4
  ENST ID: ENST00000371402
  CDS Start-End: 154-1020
aggaggtctctaagtggatacactgttgctgagtctagacaccagaagaacgttgcaggcggcgactcacagttctagcactgcctaggagagcgtggtggccccagctcagaatctgcagaagtgcacagctccatccacaccactcagggtatggagcctccggaccagtgtagccagtatatgaccagcttgctcagccctgcagtcgacgacgagaaagaactacaggatatgaatgctatggtgctgtcgcttactgaagaggtcaaagaggaggaagaggatgcacagcctgagcctgagcaaggcacagcagcaggagaaaagttaaagtcggcaggagcccaaggcggagaagaaaaagatggcggcggagaagaaaaagatggcggcggcgccggagttcctggccacctatgggaaggaaacctcgagggcaccagcggcagcgatggcaacgttgaggacagcgaccagagcgagaaggaacctgggcagcagtattcgcgcccacagggcgccgtcggggggctggagcctggcaacgcgcagcagcccaacgtccacgccttcaccccattgcagctgcaggagctggagtgcattttccaacgcgagcagttccccagtgagttcctgcgaaggaggctggcaagaagcatgaatgtgactgaactcgcagtgcagatttggtttgagaatagaagagccaaatggaggagacatcagagggcattaatggcaagaaacatgctgcccttcatggcagtgggccagcctgtcatggtaaccgcagctgaggccataacggcacccttgttcatcagcgggatgagagatgattacttctgggaccacagccattccagcagcctgtgtttccccatgccaccctttcctcctccgtccttgccccttccactcatgcttcttccacctatgccacccgctggccaggctgaatttggcccattcccttttgttatcgtgccttctttcacattccccaatgtctaagggatagcctctgtgccactttttgccagagtgtctttgagccagattcatattttgcatagcaccccatcaaaagtagttcatcaaatgtctattaaacgttttaaagaaaagtacatcattgacccatttttagggcacttgtaaaaatgtttctataaatatgtgaagggtatgtacatttgttttgtgtgtcacatggggtcagtaagttctcaataaaaattgttaagaaatgccattcaaaccgaatgtcacggactctcgtctcatgcagtaatcttgagtcaccatctgggggctgtgcatgtcacagaattttcccatgtgcccatggcaggcttacaccgacccagacattctcttccacccccacccccaacaccccatactcatctcctctctgcccccattgataccaggtacatgtgcaggatggggtggtgtgagtccctaatgagagaatagtgtgtttcaagttactgccagggtggaaaacagcaaaaccaaaatggtatcgggaaggaagccatgcccactcttaaaaattcattaagttttttcttgctatggaagacttctttaaagtaattttcttgtaaaagtgtaagtgtaaataatgccatgaaattatacacttatttaatggctaaaatggcaaatttttatatggtttaccacaacaaaagaaaagaaaaaatataccaaaaagtttttaaaaagtgatcatgaacattgtggtcatcctgtgaagtgattgcaatgcctgcagataaggagtgatggttacaacagtattttctctgaaaattatttgatggccagtttcataatgattatgttttcagcctgaaggaaaattccattttcttgggtgagcatgaactttctgtcaggctgtctgctgcttttcattccccacttctctcttcacaattgtgggtgtcaagcttcagccacgcaattgcatttggtgtgagggttttgcaaggagaaggaggtttattcatacccctgaagccacaagccttggtgggaataaggaaagtccatgaattcactatgcattaatgcatgcctcttggccaagtggattcttttttcttctccgattgagattttcctttttttttttttttttttttttttgctcttgttctcattgtattgtgctttgtataattatttacagtaagtcgcgcatgtcagtgtacattccgtctggaaattgtttccatttggtacattttgtgccagtcggtctattcctgctcattattttgttttttctacattcagactgaaacatttggtagcctacagatactcagaaataggcaaagaaaggtaaaaggggaggaggggagattgaagtcatacttccattatccctccccgtggttatcagattcataaaatttttacaccatcaaaagacatttttagccatatatgtttcctttatgtagaaaatgagatctcctatactcagttggcatttgttttcatgtatctgataagtacctgttagaattataggtcaagatgttgtctagctctggtaacctagatcctgaacttcaaagcagagttcttggaccttaagaaattcaaatttgtagaattatagttaggatgtcatttactgaccttgaacaacacattgtttaggtagcatacaatgggactagttcaaggggctgggtggagaacaagttacaattttttctgatggagaacattactggagacagtaccctttaaaactttcattccctttttattagcagctaacgtcttgtatgcctttactatgtgacaagcaataaaataatgtccttgga

SEQ ID NO: 176130 - DNA, 864 bp, Homo sapiens
  Payload ID: 14581
  Gene Symbol: RIBC1
  Gene Name: RIB43A domain with coiled-coils 1
  ENST ID: ENST00000329209
  CDS Start-End: 321-864
cgggcgaccggcaaatgtcgcgagaatacgtccaggcctaacgggattttcgccttccggcaggagtgggaccaggggcggggactgatgttgcgtatacgaggagcgagctgacgactggcgtggtgcctccgcccccctttcttgttgcatggcaacaacaaacacttgctcctgcggaccagatccccggaggagttgttgctgggcggagtcagagcagttcttgagagttcagaaactgccgccgtaacccaagaacaaagttgcatgcagagccaacctaagagcttcaaaatcgggattccttactgagaaagatgtataacataaaacagtcaacagataccaaggaagcagcagccatcgaggctagaagaaatcgagaaaaagagcgacaaaaccgattcttcaatgtgcggaaccgagtcatgggggtggatgtccaggccctgaacaaccaggtgggagaccgaaagcgtcgggaagcagcagaaagaagcaaggaggcagcttatggtaccagccaggtgcagtatgatgtggtagtccagatgttagagaaggaagaggcagatcgaacacgtcagctggccaagaaagtccaggagtttcgggagcagaagcagcagctcaagaacgggcgtgaatttagtctttgggatccaggccaagtctggaaggggcttccaacctatcttagttacagtaatacctatcctggtccagccagcctgcagtacttctctggggaagacctagacagggacacacggctgagaatgcagcaggggcagttcaggtacaacttggaaaggcaacagcaggagcaacagcaagccaaggttgatgagaattatacag

SEQ ID NO: 176131 - DNA, 1420 bp, Homo sapiens
  Payload ID: 14581
  Gene Symbol: RIBC1
  Gene Name: RIB43A domain with coiled-coils 1
  Uniprot ID: Q8N443
  ENST ID: ENST00000375327
  CDS Start-End: 154-1293
cctgagctcacgcttgctgagacagaagtcacagcaggattatgcccctcagggcaagaggaagagttcagaaactgccgccgtaacccaagaacaaagttgcatgcagagccaacctaagagcttcaaaatcgggattccttactgagaaagatgtataacataaaacagtcaacagataccaaggaagcagcagccatcgaggctagaagaaatcgagaaaaagagcgacaaaaccgattcttcaatgtgcggaaccgagtcatgggggtggatgtccaggccctgaacaaccaggtgggagaccgaaagcgtcgggaagcagcagaaagaagcaaggaggcagcttatggtaccagccaggtgcagtatgatgtggtagtccagatgttagagaaggaagaggcagatcgaacacgtcagctggccaagaaagtccaggagtttcgggagcagaagcagcagctcaagaacgggcgtgaatttagtctttgggatccaggccaagtctggaaggggcttccaacctatcttagttacagtaatacctatcctggtccagccagcctgcagtacttctctggggaagacctagacagggacacacggctgagaatgcagcaggggcagttcaggtacaacttggaaaggcaacagcaggagcaacagcaagccaaggttgatgagaattatacagatgcgctcagtaaccagctgcgcctcgccatggatgcacaggccacccatctggccaggctggaggagtcctgtcgtgcggccatgatgtgtgccatggccaacgccaacaaagcgcaggcagctgtgcaggctgggcgtcagcgctgtgagcgtcagcgtgaacagaaggccaaccttgcggagatccagcaccagagcacgagtgacctactgactgaaaacccccaggtcgcccaacaccctatggctccctaccgggtcctgccctattgctggaagggcatgactccagagcagcaagctgccatcaggaaagagcaggaagtacaacgctctaagaagcaagcacaccgtcaggctgagaaaacactggatactgaatggaaaagccagaccatgagctcagcccaggcagtgctggagctagaagagcaggagagggaattgtgtgctgtatttcaaaggggtctaggatccttcaaccagcagctggctaatgagcaaaaagcccagcaggattacctgaattcagtaatctacaccaatcaacctacagcccagtatcaccagcagtttaacaccagcagccgctaagttcaggatgtctatctctctctcccttctcctccatcaagctcacaggtggttaggagtcaaagagaaaaatgctgcatactcccaccttctaacctaggtaataaagttctgcactcaaaatcaa

SEQ ID NO: 176132 - DNA, 1281 bp, Homo sapiens
  Payload ID: 14581
  Gene Symbol: RIBC1
  Gene Name: RIB43A domain with coiled-coils 1
  Uniprot ID: Q8N443
  ENST ID: ENST00000414955
  CDS Start-End: 239-955
acttgctcctgcggaccagatccccggaggagttgttgctgggcggagtcagagcagttcttgaggttcaaggaggcgggggagacctgagctcacgcttgctgagacagaagtcacagcaggattatgcccctcagggcaagaggaagagttcagaaactgccgccgtaacccaagaacaaagttgcatgcagagccaacctaagagcttcaaaatcgggattccttactgagaaagatgtataacataaaacagtcaacagataccaaggaagcagcagccatcgaggctagaagaaatcgagaaaaagagcgacaaaaccgattcttcaatgtgcggaaccgagtcatgggggtggatgtccaggccctgaacaaccaggtgggagaccgaaagcgtcgggaagcagcagaaagaagcaaggaggcagcttatgatgcgctcagtaaccagctgcgcctcgccatggatgcacaggccacccatctggccaggctggaggagtcctgtcgtgcggccatgatgtgtgccatggccaacgccaacaaagcgcaggcagctgtgcaggctgggcgtcagcgctgtgagcgtcagcgtgaacagaaggccaaccttgcggagatccagcaccagagcacgagtgacctactgactgaaaacccccaggtcgcccaacaccctatggctccctaccgggtcctgccctattgctggaagggcatgactccagagcagcaagctgccatcaggaaagagcaggaagtacaacgctctaagaagcaagcacaccgtcaggctgagaaaacactggatactgaatggaaaagccagaccatgagctcagcccaggcagtgctggagctagaagagcaggagagggaattgtgtgctgtatttcaaaggggtctaggatccttcaaccagcagctggctaatgagcaaaaagcccagtgagttctaggtggtagtggtggagataaatgccaagggagggagaggagggatggtgaggaaccatggagagagggaaagcatgtcagctgagacctctggacttctttcacaggcaggattacctgaattcagtaatctacaccaatcaacctacagcccagtatcaccagcagtttaacaccagcagccgctaagttcaggatgtctatctctctctcccttctcctccatcaagctcacaggtggttaggagtcaaagagaaaaatgctgcatactcccaccttctaacctaggtaataaagttctgcactcaaaatcaagtcca

SEQ ID NO: 176133 - DNA, 1949 bp, Homo sapiens
  Payload ID: 14581
  Gene Symbol: RIBC1
  Gene Name: RIB43A domain with coiled-coils 1
  Uniprot ID: Q8N443
  ENST ID: ENST00000457095
  CDS Start-End: 205-783
gttgctgggcggagtcagagcagttcttgaggttcaaggaggcgggggagacctgagctcacgcttgctgagacagaagtcacagcaggattatgcccctcagggcaagaggaagagttcagaaactgccgccgtaacccaagaacaaagttgcatgcagagccaacctaagagcttcaaaatcgggattccttactgagaaagatgtataacataaaacagtcaacagataccaaggaagcagcagccatcgaggctagaagaaatcgagaaaaagagcgacaaaaccgattcttcaatgtgcggaaccgagtcatgggggtggatgtccaggccctgaacaaccaggtgggagaccgaaagcgtcgggaagcagcagaaagaagcaaggaggcagcttatggtaccagccaggtgcagtatgatgtggtagtccagatgttagagaaggaagaggcagatcgaacacgtcagctggccaagaaagtccaggagtttcgggagcagaagcagcagctcaagaacgggcgtgaatttagtctttgggatccaggccaagtctggaaggggcttccaacctatcttagttacagtaatacctatcctggtccagccagcctgcagtacttctctggggaagacctagacagggacacacggctgagaatgcagcaggggcagttcaggtacaacttggaaaggcaacagcaggagcaacagcaagccaaggttgatgagaattatacaggtaagcagcccggccctccagactcagagacctgaggcctagtggggatctgtcctaagctgagtacagcagccaggggaccagaactgtgtggggaggtccacttatccatagggttggtgctgaaatgttaggttgtgcagaccccaacctccctgacttccttcagtaactgacagtgtagcattgttcttgattagtttggcactccattacgtggaggcagcacagtgcagacagacctaatggctctgccacttactagctggtttgggcaaatgaattttcccttctgtgcttcagtttcttcatctttaaaatgagaataataatttataccacatagagtagctactattatgatattgtctgtggccacatccttctcttccattagaagaagcccttcaagggcaaggaccatgtcttatctacttgcactgttcacccttcacatcaaccctgttacagcactctgttctgctggaccacttattgtagttgtagctaattgtgaaagtatttgtttaatatctgtcttctccctaaaatgtcagcctactgaagatgaaccatctctttcatgtctacccatctcccagttgcatagtacagtgtctgacaggtcttaggaacagcaaggagctcagtgtggctggagcagaaaaaaattgtcagtacctttgctcatgccatgccctcagcctggaatgccctttgctcttttagcctgtatacaaaatgtatttcaaggatcacctcttcctggaagccttcctcttttccaccatccaaaaccctcttaataccctgtgtacatccctgccattgctcttgccagattgtggtctatgtttgatctgtgtccccaactagacagggagttctctgaggacaggatttaattcgatggtatcattagaacccagcacatggcccttagactgagattcagagatatgaaatgatttacccaaaatcacacagctcagaagcagcagaactgacattgggacccaggtccattggaggcatcttttagttatgcgcttgagaaatcgttgttgctgcacctagttccttccacatccctacaactcggacactaaccccctcctaaacattcgtacacacacaaacacaaaacttgctgaacaaatggctggatgagtgaaacaggaatggagcaagccagtacagt

SEQ ID NO: 176134 - DNA, 1479 bp, Homo sapiens
  Payload ID: 14582
  Gene Symbol: RIBC2
  Gene Name: RIB43A domain with coiled-coils 2
  ENST ID: ENST00000614167
  CDS Start-End: 197-1345
gagttgttgacatttccgagagagcgggagcgtctgtacctctgcggcgtcactgggagcccgacggaaaactgcgctaaaggcttgtctttcccctgcccgaccgaaggagccgaccttgcctgcgctacagcttccttattttcgtcgcctgttctcctgatcctgcgtgttctaaaaaccccttaggctttccatgggttcccagaccatggcggtggcgctgcccagggacttgcggcaggacgccaacctggcaaagaggaggcacgcggagctgtgcaggcagaagcgggtcttcaacgccagaaacaggataattgggggagacactgaagcctgggatgttcaagttcatgaccagaagataaaagaagctactgaaaaagctagacatgaaacctttgctgctgaaatgaggcaaaatgacaaaatcatgtgcatattggaaaaccggaaaaagagggataggaaaaatctctgtagggctatcaatgacttccaacagagctttcagaagccagaaactcgccgtgaatttgatctgtccgaccccctagcccttaagaaagatcttccagcccggcagtcagataatgatgttcggaatacgatatcaggaatgcagaaattcatgggagaggatttaaacttccatgagaggaagaaattccaagaggaacaaaacagagaatggtctttgcagcagcaaagggaatggaagaacgcccgtgctgaacaaaaatgcgcagaggccctctacacagagacaaggctgcagtttgacgagacagccaagcacctccagaagctggaaagcaccaccagaaaggcagtttgtgcatctgtgaaagacttcaacaagagccaggccatcgagtcagtggaaaggaaaaagcaagagaaaaagcaagaacaagaggacaacttggccgagatcaccaacctcctgcgtggggacctgctctccgagaacccgcagcaggcagccagctccttcgggccccaccgcgtggtccctgaccgctggaagggcatgacccaggagcagctggagcagatccgcctagtccagaagcagcaaatccaggagaagctgaggctccaggaagaaaagcgccagcgagacctggactgggaccggcggaggattcagggggctcgcgccaccctgctgtttgagcggcagcagtggcggcggcagcgcgacctgcgcagagctctggacagcagcaacctcagcctggccaaggagcagcatttgcagaaaaaatatatgaatgaagtctatacaaatcaacccacgggagactatttcacacaatttaatacaggaagtcgataatgaggaacacacccttgttcccgtcattcacgtataaagagtggctaccttaaagagtcacgtttcttttttaaagatacactccttgggccacaagtacccttcagctgtaatcgtccactgtggacaaaaca

SEQ ID NO: 176135 - DNA, 2684 bp, Homo sapiens
  Payload ID: 14583
  Gene Symbol: RFK
  Gene Name: riboflavin kinase
  Uniprot ID: Q969G6
  ENST ID: ENST00000376736
  CDS Start-End: 335-802
aagggagcgcacgccggcggcgcggaggccggctctgcgcttcgggccgccccctccccccaccccgctcacacccggcacttacttcggctgtctccgctgccctccagcggagacgcagctcctcaggcgcccggcggtatttgttgggtcggcggcgtcagggattcgcagtggcctgtggtcggcgtcgtccggccactggtgcgcccccgcggcaggcagagctcacgctcctgtcccccggctggtccggggtctgggcgccgcgtcgacggcggctccgcaggacgcgcagaccgggccgcagcccattccccgagcggactgcattatgaggcacctgccttacttctgccggggtcaagtggtgcggggcttcggccgcggctccaagcagctgggcatccccacagctaattttcctgagcaagtggtagataatcttccagctgatatatccactggtatttactatggttgggccagtgttggaagtggagatgtccataagatggtggtgagcataggatggaacccatattacaagaatacgaagaagtctatggaaacacatatcatgcataccttcaaagaggacttctatggggaaatcctcaatgtggccattgttggctacctgagaccagaaaagaactttgattctttagagtcacttatttcagcaattcaaggtgatattgaagaagctaagaaacgactagagttaccagaacatttgaaaatcaaagaagacaatttcttccaggtttctaaaagcaaaataatgaatggccactgatgaaaaattgtattatttattcattcactgttttctagtgtttctgtgtttattactgttcagcatcatcttggttatatactgaaaatcaaacactttactacagttgtgaattagtttaaaccgtacaatgttgttatcatatcatgcttcaactattaaattaagcccatcatatcatagcactaaaaagattgagttaaaaataagatttaaaaaatatatattgattaaaatgtaccactagaaaggtattacatgtgtataagtatgggtaaaaaggcaagtcactagtttgagatgaaaactaaaattttcatggtaaaatgccagcatgtatgtacttgtgtagtgtgtacttctaaacagagaaggcttataaaagtaaatgcattaaggccaagtgcagtggctcacaccggtaatcccagcactttgggaggccgaggtgggaggattgcttgagctcatgagttcaagaccagcctgggcaacatagcgagactccatctctataaataaaaaaaaaggaaatgcattaaatagaaggttgatagtttatcataaacctgcggggaagaaactcagactttctatttttgatattttgtgcattaatacattacaaacatgaagatgtttgtaaagttttgttttagtcattttctttgcagtcacatcattgtaccaccttcattattgtatagagctgcttcaattctgagtcctctggacttcccctgcctatctgtttgttgttgttgttgaagacagtaaaataagtgttttcaaatctatatgtctcctttttgttggataatgtttcttctttttaatggtaaatattcttgttcttcaacatttttctttggttcttttttccttttttaggaaaaacaaaacaacagacttcatccttaggttttctcaagatttaagtgaacacatttacacatatcaatttcttaaagaacacaaaatgtttcctccctagcaaaactatttaagagccaattaaactatgaaatagttataaaattatttttaatatttaaggccttgaaattatattccaaggcaaatctaaatgggtgtagttgtatatgcacgatgtaatttaatgctaaagagtacttacagcttgagggaaaagcataaagttttagttaaatagccttcatactgtggatttttcctcctactaactaatatgtgggaaattaagattacagatgctttgggccccctcaaacagtacattgctacagttcactgtagcaacagatttggtggtgatggggggatagaggtagaagcagatagaaggtaattttaaagttaatttattatgaatcattttcccctaatctgcataaatgaattagaactgattttaataaaaatattctgtgtaaaaagtactcagaaaaacatctaaagctgttggagaagagggactcatataaatagttggattgcgttttgctttttatttctttataaaaatatgtcaaaaacagtttttaattttagaaatcttatacttgaaagaaacctcaattatcagtggctttatgaagtaaagttaaaaacaaacataggaaatgtgaaaatatttgtgtttgttttgtctgactaacttgctgctaaatgctatctttaggtgtgtgaaagttctttgatatgttattgtccttttacatcttgttaaatagccattgcttttgagaatcagatagtgtgttgtttaggggttaattgtgtctatatctttcaaaaacttttatattatgtattataagaagttacagtagtaccattttgattagtctgaatgttttcaggccttgaaataaattttgactaagtgatattttttctt

SEQ ID NO: 176136 - DNA, 2386 bp, Homo sapiens
  Payload ID: 14583
  Gene Symbol: RFK
  Gene Name: riboflavin kinase
  ENST ID: ENST00000490113
  CDS Start-End: 1-363
cggggcttcggccgcggctccaagcagctgggcatccccacagctaattttcctgagcaagtggtagataatcttccagctgatatatccactggtatttactatggttgggccagtgttggaagtggagatgtccataagatggtggtgagcataggatggaacccatattacaagaatacgaagaagtctatggaaacacatatcatgcataccttcaaagaggacttctatggggaaatcctcaatgtggccattgttggctacctgagaccagaaaagaactttgattctttagcaggctggctgcttctctccagcggtatgaagttaatgaaatctttcaaaatgtgtgaagtttgagatatagtaaatcagagaacatttgaaacatgttaccagagtcacttatttcagcaattcaaggtgatattgaagaagctaagaaacgactagagttaccagaacatttgaaaatcaaagaagacaatttcttccaggtttctaaaagcaaaataatgaatggccactgatgaaaaattgtattatttattcattcactgttttctagtgtttctgtgtttattactgttcagcatcatcttggttatatactgaaaatcaaacactttactacagttgtgaattagtttaaaccgtacaatgttgttatcatatcatgcttcaactattaaattaagcccatcatatcatagcactaaaaagattgagttaaaaataagatttaaaaaatatatattgattaaaatgtaccactagaaaggtattacatgtgtataagtatgggtaaaaaggcaagtcactagtttgagatgaaaactaaaattttcatggtaaaatgccagcatgtatgtacttgtgtagtgtgtacttctaaacagagaaggcttataaaagtaaatgcattaaggccaagtgcagtggctcacaccggtaatcccagcactttgggaggccgaggtgggaggattgcttgagctcatgagttcaagaccagcctgggcaacatagcgagactccatctctataaataaaaaaaaaggaaatgcattaaatagaaggttgatagtttatcataaacctgcggggaagaaactcagactttctatttttgatattttgtgcattaatacattacaaacatgaagatgtttgtaaagttttgttttagtcattttctttgcagtcacatcattgtaccaccttcattattgtatagagctgcttcaattctgagtcctctggacttcccctgcctatctgtttgttgttgttgttgaagacagtaaaataagtgttttcaaatctatatgtctcctttttgttggataatgtttcttctttttaatggtaaatattcttgttcttcaacatttttctttggttcttttttccttttttaggaaaaacaaaacaacagacttcatccttaggttttctcaagatttaagtgaacacatttacacatatcaatttcttaaagaacacaaaatgtttcctccctagcaaaactatttaagagccaattaaactatgaaatagttataaaattatttttaatatttaaggccttgaaattatattccaaggcaaatctaaatgggtgtagttgtatatgcacgatgtaatttaatgctaaagagtacttacagcttgagggaaaagcataaagttttagttaaatagccttcatactgtggatttttcctcctactaactaatatgtgggaaattaagattacagatgctttgggccccctcaaacagtacattgctacagttcactgtagcaacagatttggtggtgatggggggatagaggtagaagcagatagaaggtaattttaaagttaatttattatgaatcattttcccctaatctgcataaatgaattagaactgattttaataaaaatattctgtgtaaaaagtactcagaaaaacatctaaagctgttggagaagagggactcatataaatagttggattgcgttttgctttttatttctttataaaaatatgtcaaaaacagtttttaattttagaaatcttatacttgaaagaaacctcaattatcagtggctttatgaagtaaagttaaaaacaaacataggaaatgtgaaaatatttgtgtttgttttgtctgactaacttgctgctaaatgctatctttaggtgtgtgaaagttctttgatatgttattgtccttttacatcttgttaaatagccattgcttttgagaatcagatagtgtgttgtttaggggttaattgtgtctatatctttcaaaaacttttatattatgtattataagaagttacagtagtaccattttgattagtctgaatgttttcaggccttgaaa

SEQ ID NO: 176137 - DNA, 1973 bp, Homo sapiens
  Payload ID: 14584
  Gene Symbol: RBKS
  Gene Name: ribokinase
  Uniprot ID: Q9H477
  ENST ID: ENST00000302188
  CDS Start-End: 754-1722
caggcaacaaggaactaatactcggggtttacaggaaccaggggatgggccagatatggagaaagagacgcctctggccttgggggctcgttcttgagggaatcagcgtgatggggatgagaagggcatctttggaacgggggccttctccataggaagaggaggcgagtcccctggccatatttaaaccacagttctccacgccacctgtgcgactcgggatccaacctccccgcaccagccccagtccaggtacctggaacttagtccgatcggtaaccggcgactacgtggggtacaggtacccgagcgcgcccccgacagacgcaccgacctgcgcgcgcgccgcgggcaggatgcgtgcgcactccccggacgtcccgccccgccccctctgcggccccgaagctgggcggcgtgcgcgcccccgcgccgcgccgagccgggcgctcggaaaggcgtccccgcggtgcctgacagttccttcctcagcgcctgccccgtgagtgacgaggagcgcggagtctcgccatatcaggagggccctgttacgtgaggctgtgcaccgagactattccaggaagaagaggggacacttggtgggcggggtgatttcgggcagtcaggtgggcgacccgcgtaggcgtctgaaaggcccgcgtcgttagggagggcaggagtggcgtctctggttacggggtcgggcaaagggcagaggtcaccgtccaggttggacagcagcacctttgagcgatggcggcgtctggggaaccccagaggcagtggcaagaggaggtggcggcggtggtagtggtgggctcctgcatgaccgacctggtcagtcttacttctcgtttgccaaaaactggagaaaccatccatggacataagttttttattggctttggagggaaaggtgccaaccagtgtgtccaagctgctcggcttggagcaatgacgtccatggtgtgtaaggttggcaaagattcttttggcaatgattatatagaaaacttaaaacagaatgatatttctacagaatttacatatcagactaaagatgctgctacaggaactgcttctataattgtcaataatgaaggccagaatatcattgtcatagtggctggagcaaatttacttttgaatacggaggatctgagggcagcagccaatgtcattagcagagccaaagtcatggtctgccagctcgaaataactccagcaacttctttggaagccctaacaatggcccgcaggagtggagtgaaaaccttgttcaatccagcccctgccattgctgacctggatccccagttctacaccctctcagatgtgttctgctgcaatgaaagtgaggctgagattttaactggcctcacggtgggcagcgctgcagatgctggggaggctgcattagtgctcttgaaaaggggctgccaggtggtaatcattaccttaggggctgaaggatgtgtggtgctgtcacagacagaacctgagccaaagcacattcccacagagaaagtcaaggctgtggataccacgggtgctggtgacagctttgtgggagctctggccttctacctggcttactatccaaatctgtccttggaagacatgctcaacagatccaatttcattgcagcagtcagtgtccaggctgcaggaacacagtcatcttacccttacaaaaaagaccttccgcttactctgttttgattgctattagtcccaaaataaatatacctgggaataaaatgtacttgggggtggctgctcctggctaatgcttattagaaaatgtcctcgtcccctttctttgcaaatattagttcttttacgaagtcatcctcaagcttcaatttatttataacgatgattcttttgctttccatgcatttgcacaaaacaaccagaattaaagattccacaaccaagatctgtacaaacataaagacaagtaacctcaa

SEQ ID NO: 176138 - DNA, 735 bp, Homo sapiens
  Payload ID: 14584
  Gene Symbol: RBKS
  Gene Name: ribokinase
  ENST ID: ENST00000458185
  CDS Start-End: 1-442
caatgtcattagcagagccaaagtcatggtctgccagctcgaaataactccagcaacttctttggaagccctaacaatggcccgcaggagtggagtgaaaaccttgttcaatccagcccctgccattgctgacctggatccccagttctacaccctctcagatgtgttctgctgcaatgaaagtgaggctgagattttaactggcctcacggtgggcagcgctgcagatgctggggaggctgcattagtgctcttgaaaaggggctgccaggtggtaatcattaccttaggggctgaaggatgtgtggtgctgtcacagacagaacctgagccaaagcacattcccacagagaaagtcaaggctgtggataccacgtgtagacctggctcaagacccaagagtgaagcagcaagtgtgaagaagcagaaacattataaataacccagagaatccttttataacagcaactgcctactgattttgtggcctaacagctcgagcaaaaatgaatataaatacaacattgtgcaatgactaattactcaaaattttgtgcatcagcagaagtggaacctgtggttggtgctaatattatgaaatgcctttgctgtttaataatctggtagctctgtattatttagcatgcatttttcttggagaacaatgattttatttcaagtacctctcactgaaataaaaaagcagctgttagaagatgaacatttagcagaaaa

SEQ ID NO: 176139 - DNA, 2151 bp, Homo sapiens
  Payload ID: 14584
  Gene Symbol: RBKS
  Gene Name: ribokinase
  ENST ID: ENST00000449378
  CDS Start-End: 22-213
ggacagcagcacctttgagcgatggcggcgtctggggaaccccagaggcagtggcaagaggaggtggcggcggtggtagtggtgggctcctgcatgaccgacctggtcaggaggatgtgcatgaggatatgttatgtgcacttttgttgccagcccacaccacagctgcagaactgttcaagtctttgcgtgattacatgtcaggaaaactgaactggtcattttgtgtgagtatatgcatggacagagtggctgccatggctggacagcttctggtttcactactcacatcaaagaggttgcttctgaatgtgagtctacacaccatgtcatccatagagaaatgctggctagccaaaaaatgtcacctgaacttaacagcattttgcaggatgtgattaaaattatcaaccacgttaaagtacatgcccttaactcacgtctcttcgcacagctctgtgaggaggtgggtgcagtgcacacatgtcttctctcacacacacaagtgagatggctttctaaaggtagatcactgatcagagtttttgagttacaagagccactccggagatttcttttagaaaaacagtcaccactggcagcacatttcagtgacacagaatgggttgcaaacctggcttccttgtgtgacatattcaacctgctcaacgaactcgatctgtcacttcaggggagaatgacaactgtgttcaaattgtcagataaaggggctgcattcaaagccaaactggaattatgggggtgacaagtgaacatggggatttctgacatgtttcaaacattagcagatattttgaaagagactgaaccagggccttctttcccccagctggtgcatgatcacctatctcagcttttaaaggagtttgagcattacttcccaaccacaaaagaccccccagactgggaaggaatggatctgcaacccatttgtggataagccaaggtgaatcgactttgtccgtgctggaaaaggaccaactgcttgagatcgcaaatgacggtggccttaaaagtatgttgaaacagcttcaaatcttcacacagtccggattgaagtcaaggcataatatccagagactgccccaaaagcactgaaaagcttgcttccatttccaacaccctatctttgtgaagcagagttttctgcagtaacagcaaccaaaacgagattatggagtagactggacataaacaacacacttcagtcttacttctcgtttgccaaaaactggagaaaccatccatggacataagttttttattggctttggagggaaaggtgccaaccagtgtgtccaagctgctcggcttggagcaatgacgtccatggtgtgtaaggttggcaaagattcttttggcaatgattatatagaaaacttaaaacagaatgatatttctacagaatttacatatcagactaaagatgctgctacaggaactgcttctataattgtcaataatgaaggccagaatatcattgtcatagtggctggagcaaatttacttttgaatacggaggatctgagggcagcagccaatgtcattagcagagccaaagtcatggtctgccagctcgaaataactccagcaacttctttggaagccctaacaatggcccgcaggagtggagtgaaaaccttgttcaatccagcccctgccattgctgacctggatccccagttctacaccctctcagatgtgttctgctgcaatgaaagtgaggctgagattttaactggcctcacggtgggcagcgctgcagatgctggggaggctgcattagtgctcttgaaaaggggctgccaggtggtaatcattaccttaggggctgaaggatgtgtggtgctgtcacagacagaacctgagccaaagcacattcccacagagaaagtcaaggctgtggataccacgggtgctggtgacagctttgtgggagctctggccttctacctggcttactatccaaatctgtccttggaagacatgctcaacagatccaatttcattgcagcagtcagtgtccaggctgcaggaacacagtcatcttacccttacaaaaaagaccttccgcttactctgttttgattgctattagtcccaaaataaatatacctgggaataaaatgt

SEQ ID NO: 176140 - DNA, 630 bp, Homo sapiens
  Payload ID: 14584
  Gene Symbol: RBKS
  Gene Name: ribokinase
  ENST ID: ENST00000453412
  CDS Start-End: 337-447
gtgcgcgcccccgcgccgcgccgagccgggcgctcggaaaggcgtccccgcggtgcctgacagttccttcctcagcgcctgccccgtgagtgacgaggagcgcggagtctcgccatatcaggagggccctgttacgtgaggctgtgcaccgagactattccaggaagaagaggggacacttggtgggcggggtgatttcgggcagtcaggtgggcgacccgcgtaggcgtctgaaaggcccgcgtcgttagggagggcaggagtggcgtctctggttacggggtcgggcaaagggcagaggtcaccgtccaggttggacagcagcacctttgagcgatggcggcgtctggggaaccccagaggcagtggcaagaggaggtggcggcggtggtagtggtgggctcctgcatgaccgacctggtcaggagatacatcaggacacagtgatgaacatttgttgaattagtgcatgaatgaaggaatatatgacttctagttacagttcttgcttgtggaagaggaatgctgctgatactgggagtgcagtgggcaagatctgtcttacttctcgtttgccaaaaactggagaaaccatccatggacataagttttttattggctttggaggga

SEQ ID NO: 176141 - DNA, 54 bp, Homo sapiens
  Payload ID: 14584
  Gene Symbol: RBKS
  Gene Name: ribokinase
  ENST ID: ENST00000612015
  CDS Start-End: 1-54
gtattatccttgtaccttttctgtaaatctaaaactaaaaaaaatgtcctcgtc

SEQ ID NO: 176142 - DNA, 1887 bp, Homo sapiens
  Payload ID: 14585
  Gene Symbol: RNASEH1
  Gene Name: ribonuclease H1
  Uniprot ID: O60930
  ENST ID: ENST00000315212
  CDS Start-End: 357-1217
ggggagagaaggggcccaacatggtccatctcgaccttcctctgccgggcccagggcttcagccccgctcccataggccccgccccatcccagacctcgcccgccttcgggatctcagccctggctccgcttcttcaagtaccgacaggaagttgacgagttcgggctcgtcaggggccgagctccgggctccgccctacgacaccgcccctccctaggccccggccctcatcaggactccgcccagacgtgcgtcatcttcccgcgccggtgacggaagtgcggtgttgagcgccggcggctcgcgcccacgctgggccgggagtcgaaatgcttcccggtgccgggagtgagcgatgagctggcttctgttcctggcccacagagtcgccttggccgccttgccctgccgccgcggctctcgcgggttcgggatgttctatgccgtgaggaggggccgcaagaccggggtctttctgacctggaatgagtgcagagcacaggtggaccggtttcctgctgccagatttaagaagtttgccacagaggatgaggcctgggcctttgtcaggaaatctgcaagcccggaagtttcagaagggcatgaaaatcaacatggacaagaatcggaggcgaaagccagcaagcgactccgtgagccactggatggagatggacatgaaagcgcagagccgtatgcaaagcacatgaagccgagcgtggagccggcgcctccagttagcagagacacgttttcctacatgggagacttcgtcgtcgtctacactgatggctgctgctccagtaatgggcgtagaaggccgcgagcaggaatcggcgtttactgggggccaggccatcctttaaatgtaggcattagacttcctgggcggcagacaaaccaaagagcggaaattcatgcagcctgcaaagccattgaacaagcaaagactcaaaacatcaataaactggttctgtatacagacagtatgtttacgataaatggtataactaactgggttcaaggttggaagaaaaatgggtggaagacaagtgcagggaaagaggtgatcaacaaagaggactttgtggcactggagaggcttacccaggggatggacattcagtggatgcatgttcctggtcattcgggatttataggcaatgaagaagctgacagattagccagagaaggagctaaacaatcggaagactgagccatgtgactttagtccttgggagaacttgagccagcggctgtcttgctgcctgtacttactggtgtggaaaatagcctgcaggtaggaccattgcagtgatgggcagatgcgtctttcacacggaatcaggcacagtggccttctgtgacatgtgtttataaaaaatggttaagtatataataaattgaacatctttgagattggagaattatgtgagatttccacattatgtttactgggttcaatactgtccttgcttgttttattgcaggcaagcaaggcaaatggcctaaaatgctgtggcttatattttgataagaaatcaaaaaaccattggttaaaagatgcaactcagaagtctggaagtattctgaaagcatccatttaccgtccagttgacaggtttgagtctcctgcttgtataggtgacttgtgcccatgggtacattaaaggaacatgctgcccagggcctgggcggacagctcagtgggcaggatgtgtgctgggtctcagccccatgtgcctgcttgctgggcagttagtatagggcaaagcctgcctgcggcgaccctggctgctaggccattctctaggaacagctgcgactcataaagaccaagaagcataaataaactttcaaaaatttatttggctctttcgttaaaa

SEQ ID NO: 176143 - DNA, 2120 bp, Homo sapiens
  Payload ID: 14585
  Gene Symbol: RNASEH1
  Gene Name: ribonuclease H1
  ENST ID: ENST00000436842
  CDS Start-End: 30-161
gaaatgcttcccggtgccgggagtgagcgatgagctggcttctgttcctggcccacagagtcgccttggccgccttgccctgccgccgcggctctcgcgggttcgggatgttctatgccgtgaggaggggccgcaagaccggggtctttctgacctggtgagtggcccgcccgccgaggcgcctccctgccggcatcggggtcgagggaggccggagcccggctaaccccggcggcgggagcctggcggtccgagtctgtgccgcgcgctgtggctgtgggtggtcgggggaccgcctcgttttcctgctcggccggcggggttccaggaggctcatggcctgggactggaacgcaccgaagacttgtttgaaatatcagaaacgtcgcgtaaaggaatgagtgcagagcacaggtggaccggtttcctgctgccagatttaagaagtttgccacagaggatgaggcctgggcctttgtcaggaaatctgcaagcccggaagtttcagaagggcatgaaaatcaacatggacaagaatcggaggcgaaagccagcaagcgactccgtgagccactggatggagatggacatgaaagcgcagagccgtatgcaaagcacatgaagccgagcgtggagccggcgcctccagttagcagagacacgttttcctacatgggagacttcgtcgtcgtctacactgatggctgctgctccagtaatgggcgtagaaggccgcgagcaggaatcggcgtttactgggggccaggccatcctttaaatgtaggcattagacttcctgggcggcagacaaaccaaagagcggaaattcatgcagcctgcaaagccattgaacaagcaaagactcaaaacatcaataaactggttctgtatacagacagtatgtttacgataaatggtataactaactgggttcaaggttggaagaaaaatgggtggaagacaagtgcagggaaagaggtgatcaacaaagaggactttgtggcactggagaggcttacccaggggatggacattcagtggatgcatgttcctggtcattcgggatttataggcaatgaagaagctgacagattagccagagaaggagctaaacaatcggaagactgagccatgtgactttagtccttgggagaacttgagccagcggctgtcttgctgcctgtacttactggtgtggaaaatagcctgcaggtaggaccattgcagtgatgggcagatgcgtctttcacacggaatcaggcacagtggccttctgtgacatgtgtttataaaaaatggttaagtatataataaattgaacatctttgagattggagaattatgtgagatttccacattatgtttactgggttcaatactgtccttgcttgttttattgcaggcaagcaaggcaaatggcctaaaatgctgtggcttatattttgataagaaatcaaaaaaccattggttaaaagatgcaactcagaagtctggaagtattctgaaagcatccatttaccgtccagttgacaggtttgagtctcctgcttgtataggtgacttgtgcccatgggtacattaaaggaacatgctgcccagggcctgggcggacagctcagtgggcaggatgtgtgctgggtctcagccccatgtgcctgcttgctgggcagttagtatagggcaaagcctgcctgcggcgaccctggctgctaggccattctctaggaacagctgcgactcataaagaccaagaagcataaataaactttcaaaaatttatttggctctttcgttaaaaactgtgcaaattaaaaaaaaaaaaaaaaaagtaagacaccggctgggcacagtggctcacttctgtaatcctagcactttgggaggccaaggcgggcagatcacttgaggtcaggagtttgagaccagcttggccaacatgacgaaaccctgtctctactaaaattacaaaaattatccaggtgtggtggcacgggcttgtagtcccagctacttgggaggctgaggcacaagaatcacttgaacccaggcggcagaggttgcagtgagccaagattgcaccactgcactccatcctgggcaacagagtgagactctgtctc

SEQ ID NO: 176144 - DNA, 749 bp, Homo sapiens
  Payload ID: 14585
  Gene Symbol: RNASEH1
  Gene Name: ribonuclease H1
  ENST ID: ENST00000454734
  CDS Start-End: 73-204
gtgttgagcgccggcggctcgcgcccacgctgggccgggagtcgaaatgcttcccggtgccgggagtgagcgatgagctggcttctgttcctggcccacagagtcgccttggccgccttgccctgccgccgcggctctcgcgggttcgggatgttctatgccgtgaggaggggccgcaagaccggggtctttctgacctgttaaagtgcaacaaaaagtgacacgtaatcagaacgaacccccgttaccagaagactttccgtaccagctaaattgggattggaactcagtacctaatcttcccttttaaaaaaggcaaattctaataagccagtatttgcagttggatccttgtaacaacccttggaggaatgagtgcagagcacaggtggaccggtttcctgctgccagatttaagaagtttgccacagaggatgaggcctgggcctttgtcaggaaatctgcaagcccggaagtttcagaagggcatgaaaatcaacatggacaagaatcggaggcgaaagccagcaagcgactccgtgagccactggatggagatggacatgaaagcgcagagccgtatgcaaagcacatgaagccgagcgtggagccggcgcctccagttagcagagacacgttttcctacatgggagacttcgtcgtcgtctacactgatggctgctgctccagtaatgggcgtagaaggccgcgagcaggaatcggcgtttactgggggccaggccatcctt

SEQ ID NO: 176145 - DNA, 1165 bp, Homo sapiens
  Payload ID: 14586
  Gene Symbol: RNASEH2A
  Gene Name: ribonuclease H2, subunit A
  Uniprot ID: O75792
  ENST ID: ENST00000221486
  CDS Start-End: 95-994
aagcaggcgccgcttcgaggcccgcggaaaacgcgcgccgagacccgctcctgcagtattagttcttgcagctggtggtggcggctgaggcggcatggatctcagcgagctggagagagacaatacaggccgctgtcgcctgagttcgcctgtgcccgcggtgtgccgcaaggagccttgcgtcctgggcgtcgatgaggcgggcaggggccccgtgctgggccccatggtctacgccatctgttattgtcccctgcctcgcctggcagatctggaggcgctgaaagtggcagactcaaagaccctattggagagcgagcgggaaaggctgtttgcgaaaatggaggacacggactttgtcggctgggcgctggatgtgctgtctccaaacctcatctctaccagcatgcttgggcgggtcaaatacaacctgaactccctgtcacatgatacagccactgggcttatacagtatgcattggaccagggcgtgaacgtcacccaggtattcgtggacaccgtagggatgccagagacataccaggcgcggctgcagcaaagttttcccgggattgaggtgacggtcaaggccaaagcagatgccctctacccggtggttagtgctgccagcatctgtgccaaggtggcccgggaccaggccgtgaagaaatggcagttcgtggagaaactgcaggacttggatactgattatggctcaggctaccccaatgatcccaagacaaaagcgtggttgaaggagcacgtggagcctgtgttcggcttcccccagtttgtccggttcagctggcgcacggcccagaccatcctggagaaagaggcggaagatgttatatgggaggactcagcatccgagaatcaggagggactcaggaagatcacatcctacttcctcaatgaagggtcccaagcccgtccccgttcttcccaccgatatttcctggaacgcggcctggagtcagcaaccagcctctagcagctgcctctacgcgctctacctgcttccccaacccagacattaaaattgtttaaggagaaccacacgtaggggatgtacttttgggacagaagcaaggtgggagtgtgctctgcagccgggtccagctacttccttttggaaccttaaatagaatgggtgttggttgat

SEQ ID NO: 176146 - DNA, 1629 bp, Homo sapiens
  Payload ID: 14587
  Gene Symbol: RNASEH2B
  Gene Name: ribonuclease H2, subunit B
  Uniprot ID: Q5TBB1
  ENST ID: ENST00000336617
  CDS Start-End: 400-1338
ccgctggctagaccatggagggccgctgggtgcagccacagagcgcggggccccggcgaccccgccccgctccgcgtcactcggcgccctgcggcgcgcgatgagcacctaccactagcggagccgcgagggagaggccgcggccccttcccgttgcctgcggccaccggccggcattcagagcccctcgcctggcgctaaatttaaaaacgtaacacgagcagcaggctggtctcggaaacgaaacgaaattcggtccctgggcctcctcccgggcgctgccggtccctcagcgcgccgcgccacccggaacagacccttctcccgccattttcggcggggctgggagactgaggcccgcggcgctgagcctgcggcgccccggaagaggcgggcggcatggccgctggcgtggactgcggggacggggttggcgcccggcagcacgtgttcctggtttcagaatatttaaaagatgcttcaaagaagatgaaaaatgggctaatgtttgtaaaactggttaacccctgttcaggagaaggagccatttacttgttcaatatgtgtctacagcagctgtttgaagtaaaagttttcaaggaaaaacaccattcttggtttataaatcaatcagttcaatcaggaggtcttctccattttgccacacctgtggatcctctatttctgcttctccactacctcataaaggctgataaggaggggaagtttcagccccttgatcaagttgtggtggataacgtgtttccaaattgcatcttgttgctgaaacttcctggacttgagaagttacttcatcatgtgacagaggaaaaaggtaatccagaaatagacaacaagaaatattacaagtacagcaaagagaagacattaaagtggctggaaaaaaaggttaatcaaactgtggcagcattaaaaaccaataatgtgaatgtcagttcccgggtacagtcaactgcatttttctctggtgaccaagcttccactgacaaggaagaggattatattcgttatgcccatggtctgatatctgactacatccctaaagaattaagtgatgacttatctaaatacttaaagcttccagaaccttcagcctcattgccaaatcctccatcaaagaaaataaagttatcagatgagcctgtagaagcaaaagaagattacactaagtttaatactaaagatttgaagactgaaaagaaaaatagcaaaatgactgcagctcagaaggctttggctaaagttgacaagagtggaatgaaaagtattgataccttttttggggtaaaaaataaaaaaaaaattggaaaggtttgaaactttgaaaataaaatctagcaaaaatatttgctttttacatgtttcagtttgtccttcctgactgttaatgactacctttggttgggggaaggaagaggccaatttcatgttctcttaaacatttctttgcatttggtttttgtgttcctgaacaaaatatgggaaagtgtctaacttcatggctatggccttttggagtctcatctgacataatgaaaagtaatcacttgaagagaattaacatatagcatcatgattttctcaataaactgatgtgtgacaatgtta

SEQ ID NO: 176147 - DNA, 4830 bp, Homo sapiens
  Payload ID: 14587
  Gene Symbol: RNASEH2B
  Gene Name: ribonuclease H2, subunit B
  Uniprot ID: Q5TBB1
  ENST ID: ENST00000422660
  CDS Start-End: 276-1049
cgcgagggagaggccgcggccccttcccgttgcctgcggccaccggccggcattcagagcccctcgcctggcgctaaatttaaaaacgtaacacgagcagcaggctggtctcggaaacgaaacgaaattcggtccctgggcctcctcccgggcgctgccggtccctcagcgcgccgcgccacccggaacagacccttctcccgccattttcggcggggctgggagactgaggcccgcggcgctgagcctgcggcgccccggaagaggcgggcggcatggccgctggcgtggactgcggggacggggttggcgcccggcagcacgtgttcctggtttcagaatatttaaaagatgcttcaaagaagatgaaaaatgggctaatgtttgtaaaactggttaacccctgttcaggagaaggagccatttacttgttcaatatgtgtctacagcagctgtttgaagtaaaagttttcaaggaaaaacaccattcttggtttataaatcaatcagttcaatcaggaggtcttctccattttgccacacctgtggatcctctatttctgcttctccactacctcataaaggctgataaggaggggaagtttcagccccttgatcaagttgtggtggataacgtgtttccaaattgcatcttgttgctgaaacttcctggacttgagaagttacttcatcatgtgacagaggaaaaaggtaatccagaaatagacaacaagaaatattacaagtacagcaaagagaagacattaaagtggctggaaaaaaaggttaatcaaactgtggcagcattaaaaaccaataatgtgaatgtcagttcccgggtacagtcaactgcatttttctctggtgaccaagcttccactgacaaggaagaggattatattcgttatgcccatggtctgatatctgactacatccctaaagaattaagtgatgacttatctaaatacttaaagcttccagaaccttcagcctcattgccaaatcctccatcaaagatggcagcacaaagacagaaaaggggcaagtgatggtggtggctccacgcaaggcttggcggttttccctgcaacttcagacactcccagaggactcggactttttcttctgcacttttttggaaaatcgccaggtgccaaaaggtgcattttaaagcgctgactgtaaatgctttatttctttgattagtaccactagtctatgtgggcagcggcattcctccctggagcactcagctaggcggttccgtccaggagcttgaaagcatcccagcggtgcacctgttcagtctgaggacctcaagcttgggtcaggccagcatgttttaggtatggatgtggtgacttaaagtacttgattgtcttgatttcaccctgaaagctttggcaaaccaagtttcaacccttactttaaaaatctgacactgctttactccatatcaatttggaagcttctaattcataaatatacctaaacgttggcattttatctctccaggagttattaaacatttcttcctttttagaagatttgtccagtatgtgtattattttatttttcagagtaaggacataggagatgacggaaggttggaagtagatgccaaaaagtgatttggtggggaatctggtgcgtagtgcatatgttttagcaggtagtgggaggttttgtgcaaaaatgtctgtggatttgagctggcttgtccacttgacatgcaagaggaatgtgtgggtgctgctcagctgatcttcccgcattcacacaggaccccaatctgcttcttcaggaaataattttgtttctgaatctctgactacaaggagtattaataattagatcctagttctgggaagtagtctgccacttttccacacctcccttcacatgtagaaatttttgttaacctcaaaggactttaaaaattcctgcccttctgtagtggaaaagtgaatcttccctctgcaaaaaccaaagccactagatattgataatgtccaagtttgtcactagaaaccctgctgtcttacctgtgccccaagtttctgttccaacactttaaattcaaacacctaacattacaagatttcattgggttgttttttttcttttcacaagtaattcatgatacattctcacaaaaagagaaggcagaagtgatccccacctcccactgccagcactactcaggctcccctgggtgactgcatccttgaccctgaatcaagcatgtttcttagttatccagtttcccacttccagtttctatcttttgccttgcagcccgagcagccctacagtcactgttcatgcaatccatttcatcgtttcatctaagaatccaatcctattgagctctccttcagaaatacctcatgggaaaattaaaattaagacaaatcaagaaatagaaaactccagcacttgaataagcccttttctctcttttttttttttttttttggagacagagtcttgctctgttgcccagattggagtacggtggtgcaatcttggctcactgcagcctctgcctccaggttcaagcgattcttctgcctcagcctcccaagtagctgggattacaggcacgcaccaccacgcctggctaatttttttaaaaattatttttagtagagacggggtttcaccatgttagccaggctggtctcgaactcctgaccgcaagtgatctacccacttcagtctcccaaagtgctgggattacaggcgtgagccaccgtgcccggctagccctttcttcttcatgcccactgccaccaagcataaggctgttctcttgagggcagagaccatatgggccatgtatcaaatagagacaaacccgcggtgctaagaacaccaagatagcactgagcatgccgcatgtatcccccactcagcgcatgagtcactgacacacaaggtgacatactccttccctatcaagttgtcaaggacttttagaaaacagccatgctcagagctagagaggaggtgggaagtgggccttgctggtaagaatagaaaatggtacaacttttggagaccaacttggaaataaatatgaaaagcctgaatttgttgcattttctttgtttcagcaatatccattgttagaaatacagccttaggaaataatcatgaatatgtgcaaagatttagctacaagaatattcactgtggttctgtttaaatagtaagtaattggaaaaaaactaaattagaaggctgaaattattttttaaacttttttactgggctgtgtgtggtggctcttgcctgtaattccagcactttgggaggccaaggtgagaggatcacatgtgcctaggagtttgagaccagcctgggcaacatagtgagacccccatctctagaaaaaataaaaattaaaagaaaaattagctggtcatggtggcatgtgcttatagtctcaggtacttgggaggttgaggtggaagaatggtttgagtctgggaggtcgaggctgcgatgagctattgatcacaccactgcactccagcctaggtaacagagcgagactctgcctcaaaaaaaaaaaaaaaaaaaaaaaaaaaaacaacaacaaaaaacaaatttgtactgcaagtataagtaatatctctttttctctctctttccccacttccttctttccttcttttctctcctttttttcctttctccttgtctcccttttttagaaatttttctagataaacatgttactattatgctaatacaaaaataaaactactcagttggttattttataccattagtccctcataattttcctctccagattataatctcttttaaaatttttgtgtctcatttagtaagtttcttggaggaagaaccatactatatatgtttcgcagttttttgcttagcattcaagtagatcttagcaaatcctaccagtatcaaataattgcccttcttctatccccacacctttagagtttcaggtctctactatccgattccttgacttcccaacccagtcaaagatacatgatttgcttggaattgtgtgtttggggcatgtacacacatgctgaaattaattaattttgctttgaagatttcctaagagccctagaaataattgcaaatgctctgcagtatatcacaaccaggactgataattactgtttctgtctacaaaactaaggggagagagaaaaacatactactgaatgagcagaacacagaagccagtgaatgtttcacacttggtgacgtgcagtttttgctgtttttttgccctagcagattgtaaccaaattgctcaacttcacagaaataactgtagagactcaatttctgaatgctcgtaattggcttttcaaaagaactttatagggataaattaattgctactatacttttaatggttttaaagttacttaggccacttctagaaatatgtaaaattgtatgatcctaacttaatgtttcatttctccctcagtttttatgtgatttgataatataatgaagggaactataaaaatttgatattgttggggcctttttagaaaattgagatacatttttctttgtatcattgttgctaaaagaggttaaatattgctacttattacctaggagaaagaacagcattttgtggcaaaataagtaggttataccgaatttgacagacttctctcctgaccgattttggagcacatatcttcatgtgccttgtaaaactagagatgcattcagttttcaatgttcccagatatattttaccactctatttttcccatatagcatctcaataaactgctgtttcataaa

SEQ ID NO: 176148 - DNA, 1495 bp, Homo sapiens
  Payload ID: 14587
  Gene Symbol: RNASEH2B
  Gene Name: ribonuclease H2, subunit B
  ENST ID: ENST00000611510
  CDS Start-End: 271-1269
gggagaggccgcggccccttcccgttgcctgcggccaccggccggcattcagagcccctcgcctggcgctaaatttaaaaacgtaacacgagcagcaggctggtctcggaaacgaaacgaaattcggtccctgggcctcctcccgggcgctgccggtccctcagcgcgccgcgccacccggaacagacccttctcccgccattttcggcggggctgggagactgaggcccgcggcgctgagcctgcggcgccccggaagaggcgggcggcatggccgctggcgtggactgcggggacggggttggcgcccggcagcacgtgttcctggtttcagaatatttaaaagatgcttcaaagaagatgaaaaatgggctaatgtttgtaaaactggttaacccctgttcaggagaaggagccatttacttgttcaatatgtgtctacagcagctgtttgaagtaaaagttttcaaggaaaaacaccattcttggtttataaatcaatcagttcaatcaggaggtcttctccattttgccacacctgtggatcctctatttctgcttctccactacctcataaaggctgataaggaggggaagtttcagccccttgatcaagttgtggtggataacgtgtttccaaattgcatcttgttgctgaaacttcctggacttgagaagttacttcatcatgtgacagaggaaaaaggtaatccagaaatagacaacaagaaatattacaagtacagcaaagagaagacattaaagtggctggaaaaaaaggttaatcaaactgtggcagcattaaaaaccaataatgtgaatgtcagttcccgggtacagtcaactgcatttttctctggtgaccaagcttccactgacaaggaagaggattatattcgttatgcccatggtctgatatctgactacatccctaaagaattaagtgatgacttatctaaatacttaaagcttccagaaccttcagcctcattgccaaatcctccatcaaagaaaataaagttatcagatgagcctgtagaagcaaaagaagattacactaagtttaatactaaagatttgaagactgaaaagaaaaatagcaaaatgactgcagctcagaaggctttggctaaagttgacaagagtggaatgaaaagtattgataccttttttggggtaaaaaataaaaaattggaaaggtttgaaactttgaaaataaaatctagcaaaaatatttgctttttacatgtttcagtttgtccttcctgactgttaatgactacctttggttgggggaaggaagaggccaatttcatgttctcttaaacatttctttgcatttggtttttgtgttcctgaacaaaatatgggaaagtgtctaacttcatggctatggccttttggagtctcatctgacataatgaaaagtaatcacttgaagagaattaacatatagcatcatgattttctcaataaactgatgtgtgacaatgtt

SEQ ID NO: 176149 - DNA, 346 bp, Homo sapiens
  Payload ID: 14587
  Gene Symbol: RNASEH2B
  Gene Name: ribonuclease H2, subunit B
  ENST ID: ENST00000616907
  CDS Start-End: 1-253
ggattatattcgttatgcccatggtctgatatctgactacatccctaaagaattaagtgatgacttatctaaatacttaaagcttccagaaccttcagcctcattgccaaatcctccatcaaagaaaataaagttatcagatgagcctgtagaagcaaaagaagattacactaagtttaatactaaagatttgaagactgaaaaggtatgtgggttcaggtgtagtggtgtttcgttcatactcagtgcgtgatgtgcatgaatacatgaggaacagttgcacgcttgattgtgattacagttttgaccaggaagaattattaacttgcatttctgtgacttaata

SEQ ID NO: 176150 - DNA, 2794 bp, Homo sapiens
  Payload ID: 14588
  Gene Symbol: RNASEH2C
  Gene Name: ribonuclease H2, subunit C
  Uniprot ID: Q8TDP1
  ENST ID: ENST00000308418
  CDS Start-End: 190-684
aaaacacaactggaaaaccctaggacttgaacccagggaaagcgttagggggtaaggggactacacttcccgtgaagctccgcggcggcttcccgtgaggccccgcggaggcttcctgagaggtcctgcgcgctttccgcgccagcttcagtgtcagctcgcgagccctggcgtcgcgtaggagggaggatggagagcggcgacgaagcggccatcgagaggcaccgcgtccacttgcgctccgccacattgcgcgacgccgtacccgccacactgcatctgctgccctgcgaggttgcggtggacgggcccgccccggtggggcgcttcttcacgcccgccatccgccagggccccgagggactcgaagtgtcgtttcggggccgctgtctacggggagaggaggtggcggtgccgcctggcctcgtgggatacgtgatggtgacagaagagaagaaggtgtcgatggggaagccagaccccttgcgggattccgggactgacgaccaagaggaggagccgctggagcgggacttcgaccgcttcattggagccactgccaacttcagccgcttcaccctgtggggtctggagaccatccctggcccggatgccaaagtgcgtggggccttaacttggcccagccttgcggcagcgattcacgcacaggtgcccgaggactgagaaccagagcttgaaattcaaagctgcgatcccttcacagcagtaaaccagctctttggaaccgattccatcaccccaataaaggagctcttcacagcacctgtgagtctgggcgccttagagcccctaagccagcatgggccctttccccctccccaccaagaactttgcatggctctggcatatagaaacaatttattgccgggggcaataggggtaagagaagccagaaatttttgcagccagcacccaccccacccccaacttctactttacaaaagaaatttttacaatcaccagccctctgtacagagctcccccatccggatcccttctcactgtacacagctgcctggctccctctggtccctgcttcagaggaggcctgggcctgtggccagctgaccttggagttggtctgagcccggagctcgccttggtgctgggcaccagtgggcccctgccaggcctgtcctctcctttttgagctgtcctcagccccatctcccttagagtgctttgtgggagctgcagtgggggcggggtgggctatcagccccagtcctgctgccgtcttggcactgcagtgggcagtgtctggtcaccacttccccctcttgctccagtccttgggagtgaagtgcagacacttggagtcgatccgcaggagccgcttgagcatggcccgctcatggccatccacgatgtcctctgacagtgtgaggatgtactggccctgggcagaggagatgggttcagcaggtggtcagcccacagaggactgcactctgcatcccacacacctgtctcccctgcctgcctccctaccttgtagtagttgatgagattgaggtactgcagagtggagatgacatcctccttcttgatgctggtgatttcactaatctcactgtgggagagcacaggtcaggttccctgaggacctttatctgtccccaggagccctgagagagaaagcccaggaacagacaagccatgccatgtacccccaggtagacagcgccaggctcacttgatggtgatctgtggcctctccccgctctccgacttcagccccatcaggatctccaggatggtctgggaccagtagcttcgataggataggaggccaaggtctgagaggggcttctcaggggtccctgttttcccttccactttggagagttcatagcctaaagcaatggagcaggagagggtgagtaagaggtcacagatgaacataagcaacatttaaaaacacaggttgccaaggcaggctgcctagttcctatcatggccctgccacttggcagttctatgccctccacttctctgtgcctcagttccctcaggaagaactgagtattcactctttccgtgcgctgagcacagtggagggcatgagggcactgagaggagcagctgcagtcaaccatgagggtgatcagaggccagtgaaggcttatgggcaggggatgcagagaaaatggctcatgggaagaaggggcctccaattttcctttgccatcccgggctctgtgtctagccatgtaaggaagtggagacagattcctgtctctaatccagacctgagaatgcttgaattctcaaagtcctcctagctgggaccttgggagtgtcacctgctgtaagacttgagtggcctgactgggtggttgtgaggatgcaaggagaaaaggtgcaccaaggtgcttcctaagtcggggagaccattcctgggagccacgtgactgacccccaccatggctctttccctccaactcgtgctgatagctggccgctgggaggccgtccccagtgagatcctcagaccctgcacagccctgagtggcttcacatctcttggtcagtgtcttcattctccccagtcagggacctgggatgtttgttacttctagaagcccttcctcaccctcataatggaccttagccccttgctggtcccactcacatcccgtctccattgctgtctgagttccaagactgagtttcttcaagcatccacttgtgctaccaggctgagaagttctgaggatgtgaccccatctgggcatcatttaaccaataaaatttctcgaatggaccataa

SEQ ID NO: 176151 - DNA, 1337 bp, Homo sapiens
  Payload ID: 14588
  Gene Symbol: RNASEH2C
  Gene Name: ribonuclease H2, subunit C
  ENST ID: ENST00000528220
  CDS Start-End: 479-724
gcgctttccgcgccagcttcagtgtcagctcgcgagccctggcgtcgcgtaggagggaggatggagagcggcgacgaagcggccatcgagaggcaccgcgtccacttgcgctccgccacattgcgcgacgccgtacccgccacactgcatctgctgccctgcgaggttgcggtggacgggcccgccccggtggggcgcttcttcacgcccgccatccgccagggccccgagggtgagccctgcggccggactacggctcccggcagcccccgcgccggcctgcgcgcttctcatcgcctgggctcctggggatcgtggtccgtccggaggtggcgggagggcagctccgggctcgacccagcgtgggtcctgcctgaggccctttgcgcctcccgctccaggactcgaagtgtcgtttcggggccgctgtctacggggagaggaggtggcggtgccgcctggcctcgtgggatacgtgatggtgacagaagagaagaaggtgtcgatggggaagccagaccccttgcgggattccgggactgacgaccaagaggaggagccgctggagcgggacttcgaccgcttcattggagccactgccaacttcagccgcttcaccctgtggggtctggagaccatccctggcccggatgccaaagtgcgtggggccttaacttggcccagccttgcggcagcgattcacgcacaggtgcccgaggactgagaaccagagcttgaaattcaaagctgcgatcccttcacagcagtaaaccagctctttggaaccgattccatcaccccaataaaggagctcttcacagcacctgtgagtctgggcgccttagagcccctaagccagcatgggccctttccccctccccaccaagaactttgcatggctctggcatatagaaacaatttattgccgggggcaataggggtaagagaagccagaaatttttgcagccagcacccaccccacccccaacttctactttacaaaagaaatttttacaatcaccagccctctgtacagagctcccccatccggatcccttctcactgtacacagctgcctggctccctctggtccctgcttcagaggaggcctgggcctgtggccagctgaccttggagttggtctgagcccggagctcgccttggtgctgggcaccagtgggcccctgccaggcctgtcctctcctttttgagctgtcctcagccccatctcccttagagtgctttgtgggagctgcagtgggggcggggtgggctatcagccccagtcctgctgccgtcttggcactgcagtgggcagtgtctggtcaccacttccc

SEQ ID NO: 176152 - DNA, 913 bp, Homo sapiens
  Payload ID: 14588
  Gene Symbol: RNASEH2C
  Gene Name: ribonuclease H2, subunit C
  ENST ID: ENST00000534482
  CDS Start-End: 1-389
ggagggcagctccgggctcgacccagcgtgggtcctgcctgaggccctttgcgcctcccgctccaggactcgaagtgtcgtttcggggccgctgtctacggggagaggaggtggcggtgccgcctggcctcgtgggatacgtgatggtgacagaagagaagaaggtgtcgatggggaagccagaccccttgcgggattccgggactgacgaccaagaggaggagccgctggagcgggacttcgaccgcttcattggagccactgccaacttcagccgcttcaccctgtggggtctggagaccatccctggcccggatgccaaagtgcgtggggccttaacttggcccagccttgcggcagcgattcacgcacaggtgcccgaggactgagaaccagagcttgaaattcaaagctgcgatcccttcacagcagtaaaccagctctttggaaccgattccatcaccccaataaaggagctcttcacagcacctaatgatctctgcctttcacaaagaccacctttgtgcatccatgcctactcttcagaacaccactgcaagaaatcccctcagccactttgtcatccaccaaggctgaaaggtaaccctctatgaagctctgctgaccacctcctttgggtcctgctaacctaccctctgtttcatgacacttaggacactgggagctagaggtcattggtatgactgtctctcccatggactaagctgtcagagaacagagactgtctcattcctggctaccagcacctgccagacagcaggaactcaataaaaatgggctggactgatctgctggcttgactggtcagtgtttacctgagcaagaagaagctgtcatttgattcaccccagcgcctcactgcctctcaagcactaaccttgttcttacgtcc

SEQ ID NO: 176153 - DNA, 835 bp, Homo sapiens
  Payload ID: 14588
  Gene Symbol: RNASEH2C
  Gene Name: ribonuclease H2, subunit C
  ENST ID: ENST00000527610
  CDS Start-End: 44-787
ttcagtgtcagctcgcgagccctggcgtcgcgtaggagggaggatggagagcggcgacgaagcggccatcgagaggcaccgcgtccacttgcgctccgccacattgcgcgacgccgtacccgccacactgcatctgctgccctgcgaggttgcggtggacgggcccgccccggtggggcgcttcttcacgcccgccatccgccagggccccgagggactcgaagtgtcgtttcggggccgctgtctacggggagaggaggtggcggtgccgcctggcctcgtgggatacgtgatggtgacagaagagaagaaggtgtcgatggggaagccagaccccttgcgggattccgggactgacgaccaagaggaggagccgctggagcgggacttcgaccgcttcattggagccactgccaacttcagccgcttcaccctgtggggtctggagaccatccctggcccggatgccaaagtgcgtggggccttaacttggcccagccttgcggcagcggtgagtagacgaggagttccgtcttgcccccgggtggatgggctggggagcacaattgcgcagacggagcctggaggattctactgggtagtgtgtgggaagcgtagctccctgaccactcttcctagcatgtctagaagcggttattctgaacagctgggtccttcctcgggtatgggggccagcttgccgccctgtcttacaagtccaacagtagaggcgactcctgttgcagattcacgcacaggtgcccgaggactgagaaccagagcttgaaattcaaagctgcgatcccttcacagcagtaaaccagctctttggaac

SEQ ID NO: 176154 - DNA, 710 bp, Homo sapiens
  Payload ID: 14588
  Gene Symbol: RNASEH2C
  Gene Name: ribonuclease H2, subunit C
  ENST ID: ENST00000533698
  CDS Start-End: 1-374
gctcgacccagcgtgggtcctgcctgaggccctttgcgcctcccgctccaggactcgaagtgtcgtttcggggccgctgtctacggggagaggaggtggcggtgccgcctggcctcgtgggatacgtgatggtgacagaagagaagaaggtgtcgatggggaagccagaccccttgcgggattccgggactgacgaccaagaggaggagccgctggagcgggacttcgaccgcttcattggagccactgccaacttcagccgcttcaccctgtggggtctggagaccatccctggcccggatgccaaagtgcgtggggccttaacttggcccagccttgcggcagcgattcacgcacaggtgcccgaggactgagaaccagagcttgaaattcaaagctgcgatcccttcacagcagtaaaccagctctttggaaccgattccatcaccccaataaaggagctcttcacagcacctgtagacagcgccaggctcacttgatggtgatctgtggcctctccccgctctccgacttcagccccatcaggatctccaggatggtctgggaccagtagcttcgataggataggaggccaaggtctgagaggggcttctcaggggtccctgttttcccttccactttggagagttcatagcctaaagcaatggagcaggagagggtgagtaagaggtcacagatgaacataagca

SEQ ID NO: 176155 - DNA, 968 bp, Homo sapiens
  Payload ID: 14588
  Gene Symbol: RNASEH2C
  Gene Name: ribonuclease H2, subunit C
  ENST ID: ENST00000531596
  CDS Start-End: 1-476
cggccatcgagaggcaccgcgtccacttgcgctccgccacattgcgcgacgccgtacccgccacactgcatctgctgccctgcgaggttgcggtggacgggcccgccccggtggggcgcttcttcacgcccgccatccgccagggccccgagggactcgaagtgtcgtttcggggccgctgtctacggggagaggaggtggcggtgccgcctggcctcgtgggatacgtgatggtgacagaagagaagaaggtgtcgatggggaagccagaccccttgcgggattccgggactgacgaccaagaggaggagccgctggagcgggacttcgaccgcttcattggagccactgccaacttcagccgcttcaccctgtggggtctggagaccatccctggcccggatgccaaagtgcgtggggccttaacttggcccagccttgcggcagcgattcacgcacaggtgcccgaggactgagaaccagagcttgaaattcaaagctgcgatcccttcacagcagtaaaccagctctttggaaccgattccatcaccccaataaaggagctcttcacagcaccttccttgggagtgaagtgcagacacttggagtcgatccgcaggagccgcttgagcatggcccgctcatggccatccacgatgtcctctgacagtgtgaggatgtactggccctgggcagaggagatgggttcagcaggtggtcagcccacagaggactgcactctgcatcccacacacctgtctcccctgcctgcctccctaccttgtagtagttgatgagattgaggtactgcagagtggagatgacatcctccttcttgatgctggtgatttcactaatctcactgtgggagagcacaggtcaggttccctgaggacctttatctgtccccaggagccctgagagagaaagcccaggaacagacaagccatgccatgtacccccaggta

SEQ ID NO: 176156 - DNA, 4238 bp, Homo sapiens
  Payload ID: 14589
  Gene Symbol: RNASEL
  Gene Name: ribonuclease L (2',5'-oligoisoadenylate synthetase-dependent)
  Uniprot ID: Q05823
  ENST ID: ENST00000367559
  CDS Start-End: 255-2480
gacgcagcaggaggaaactgctcgggctgcaagcagtcttccaggctttgcggctgccaaaggaataattgagacgtctgagttgagcaggtggaatgtcagaagactgagaacattgttccttcttcatactgctgctctgttgccagagaatcccaatttacactcaaagcttctttgattaagtgctaggagataaatttgcattttctcaaggaaaaggctaaaagtggtagcaggtggcatttaccgtcatggagagcagggatcataacaacccccaggagggacccacgtcctccagcggtagaagggctgcagtggaagacaatcacttgctgattaaagctgttcaaaacgaagatgttgacctggtccagcaattgctggaaggtggagccaatgttaatttccaggaagaggaagggggctggacacctctgcataacgcagtacaaatgagcagggaggacattgtggaacttctgcttcgtcatggtgctgaccctgttctgaggaagaagaatggggccacgccttttatcctcgcagcgattgcggggagcgtgaagctgctgaaacttttcctttctaaaggagcagatgtcaatgagtgtgatttttatggcttcacagccttcatggaagccgctgtgtatggtaaggtcaaagccctaaaattcctttataagagaggagcaaatgtgaatttgaggcgaaagacaaaggaggatcaagagcggctgaggaaaggaggggccacagctctcatggacgctgctgaaaaaggacacgtagaggtcttgaagattctccttgatgagatgggggcagatgtaaacgcctgtgacaatatgggcagaaatgccttgatccatgctctcctgagctctgacgatagtgatgtggaggctattacgcatctgctgctggaccatggggctgatgtcaatgtgaggggagaaagagggaagactcccctgatcctggcagtggagaagaagcacttgggtttggtgcagaggcttctggagcaagagcacatagagattaatgacacagacagtgatggcaaaacagcactgctgcttgctgttgaactcaaactgaagaaaatcgccgagttgctgtgcaaacgtggagccagtacagattgtggggatcttgttatgacagcgaggcggaattatgaccattcccttgtgaaggttcttctctctcatggagccaaagaagattttcaccctcctgctgaagactggaagcctcagagctcacactggggggcagccctgaaggatctccacagaatataccgccctatgattggcaaactcaagttctttattgatgaaaaatacaaaattgctgatacttcagaaggaggcatctacctggggttctatgagaagcaagaagtagctgtgaagacgttctgtgagggcagcccacgtgcacagcgggaagtctcttgtctgcaaagcagccgagagaacagtcacttggtgacattctatgggagtgagagccacaggggccacttgtttgtgtgtgtcaccctctgtgagcagactctggaagcgtgtttggatgtgcacagaggggaagatgtggaaaatgaggaagatgaatttgcccgaaatgtcctgtcatctatatttaaggctgttcaagaactacacttgtcctgtggatacacccaccaggatctgcaaccacaaaacatcttaatagattctaagaaagctgctcacctggcagattttgataagagcatcaagtgggctggagatccacaggaagtcaagagagatctagaggaccttggacggctggtcctctatgtggtaaagaagggaagcatctcatttgaggatctgaaagctcaaagtaatgaagaggtggttcaactttctccagatgaggaaactaaggacctcattcatcgtctcttccatcctggggaacatgtgagggactgtctgagtgacctgctgggtcatcccttcttttggacttgggagagccgctataggacgcttcggaatgtgggaaatgaatccgacatcaaaacacgaaaatctgaaagtgagatcctcagactactgcaacctgggccttctgaacattccaaaagttttgacaagtggacgactaagattaatgaatgtgttatgaaaaaaatgaataagttttatgaaaaaagaggcaatttctaccagaacactgtgggtgatctgctaaagttcatccggaatttgggagaacacattgatgaagaaaagcataaaaagatgaaattaaaaattggagacccttccctgtattttcagaagacatttccagatctggtgatctatgtctacacaaaactacagaacacagaatatagaaagcatttcccccaaacccacagtccaaacaagcctcagtgtgatggagctggtggggccagtgggttggccagccctgggtgctgatggactgatttgctggagttcagggaactacttattagctgtagagtccttggcaaatcacaacattctgggccttttaactcaccaggttgcttgtgagggatgagttgcatagctgatatgtcagtccctggcatcgtgtattccatatgtctataacaaaagcaatatatacccagactacactagtccataagctttacccactaactgggaggacattctgctaagattccttttgtcaattgcaccaaaagaatgagtgccttgacccctaatgctgcatatgttacaattctctcacttaattttcccaatgatcttgcaaaacagggattatcatccccatttaagaactgaggaacctgagactcagagagtgtgagctactggcccaagattattcaatttatacctagcactttataaatttatgtggtgttattggtacctctcatttgggcaccttaaaacttaactatccttccagggctcttccagatgaggcccaaaacatatataggggttccaggaatctcattcattcattcagtatttattgagcatctagtataagtctgggcactggatgcatgaattccactccttccagaaccaactgcattggttttccatgaccttaaggcagtagttctcaactggggggcaattttgcactgaagagagcatttggcagagtctgaagaagtttttggtgtcacagctttgtggggagcatgctatggcatttagtgggtaaagaccagggatgctgccaaacctgccttgcacaggacagcccctgcaacaaagaattatccagacaaaaatatcaatggtgctgaggttgagaaaacctgacttaaggggctgggatgcttttgaactagcttaaggcccaggactgtggagtgtgtggaccaccccacagaggagggactcagatttatttactcttgctggatctgtagtgatggagttccttctggtgtcagccccacaggaggctcccaggcctccctcacttcccatacccagtctaggagctccttctggctcccaagcacccagagctttcctccgccttttagttttggttcctccactggaatgtaggctcctcacgggcgatggctgtcttttcttgactttgtatcttcactgccaagcaaaaagtctgccaagtgggaatgtttaataaatattcattgaataatgaatgaaccatcttcgtacatgaataataatactgtcttacgtttttctggtgctttataatgtatacattacatctgagtattttattttatttaattttcaaaacaatcctttaaggtcaacattgttatccctattttgctgatgaggaaactaaggttagaaacattttgatttcctctaggacgtatagctaggaagtgttactatcttgatttgaacaaattttctggtgctaagtctgatgttctttccatgaatcattgtggtggttgagatggagctttgtaatgggaataaaacagtaccttaggttctttctgaaaaggaggtatctagcaatggataaatagataccactgaatgaaattaaatgttgattaggaacaaatttaaggcttaaaaaatactttatgagcagcaagattgctttaacttttaaaatgaagctttggttctctgatttgtaatgagcacctggacatgtcaattaaaatgcccatttgtgaagcttactcaataaaactttaaattgtctta

SEQ ID NO: 176157 - DNA, 4046 bp, Homo sapiens
  Payload ID: 14589
  Gene Symbol: RNASEL
  Gene Name: ribonuclease L (2',5'-oligoisoadenylate synthetase-dependent)
  Uniprot ID: Q05823
  ENST ID: ENST00000539397
  CDS Start-End: 255-2213
gacgcagcaggaggaaactgctcgggctgcaagcagtcttccaggctttgcggctgccaaaggaataattgagacgtctgagttgagcaggtggaatgtcagaagactgagaacattgttccttcttcatactgctgctctgttgccagagaatcccaatttacactcaaagcttctttgattaagtgctaggagataaatttgcattttctcaaggaaaaggctaaaagtggtagcaggtggcatttaccgtcatggagagcagggatcataacaacccccaggagggacccacgtcctccagcggtagaagggctgcagtggaagacaatcacttgctgattaaagctgttcaaaacgaagatgttgacctggtccagcaattgctggaaggtggagccaatgttaatttccaggaagaggaagggggctggacacctctgcataacgcagtacaaatgagcagggaggacattgtggaacttctgcttcgtcatggtgctgaccctgttctgaggaagaagaatggggccacgccttttatcctcgcagcgattgcggggagcgtgaagctgctgaaacttttcctttctaaaggagcagatgtcaatgagtgtgatttttatggcttcacagccttcatggaagccgctgtgtatggtaaggtcaaagccctaaaattcctttataagagaggagcaaatgtgaatttgaggcgaaagacaaaggaggatcaagagcggctgaggaaaggaggggccacagctctcatggacgctgctgaaaaaggacacgtagaggtcttgaagattctccttgatgagatgggggcagatgtaaacgcctgtgacaatatgggcagaaatgccttgatccatgctctcctgagctctgacgatagtgatgtggaggctattacgcatctgctgctggaccatggggctgatgtcaatgtgaggggagaaagagggaagactcccctgatcctggcagtggagaagaagcacttgggtttggtgcagaggcttctggagcaagagcacatagagattaatgacacagacagtgatggcaaaacagcactgctgcttgctgttgaactcaaactgaagaaaatcgccgagttgctgtgcaaacgtggagccagtacagattgtggggatcttgttatgacagcgaggcggaattatgaccattcccttgtgaaggttcttctctctcatggagccaaagaagattttcaccctcctgctgaagactggaagcctcagagctcacactggggggcagccctgaaggatctccacagaatataccgccctatgattggcaaactcaagttctttattgatgaaaaatacaaaattgctgatacttcagaaggaggcatctacctggggttctatgagaagcaagaagtagctgtgaagacgttctgtgagggcagcccacgtgcacagcgggaagtctcttgtctgcaaagcagccgagagaacagtcacttggtgacattctatgggagtgagagccacaggggccacttgtttgtgtgtgtcaccctctgtgagcagactctggaagcgtgtttggatgtgcacagaggggaagatgtggaaaatgaggaagatgaatttgcccgaaatgtcctgtcatctatatttaaggctgttcaagaactacacttgtcctgtggatacacccaccaggatctgcaaccacaaaacatcttaatagattctaagaaagctgctcacctggcagattttgataagagcatcaagtgggctggagatccacaggaagtcaagagagatctagaggaccttggacggctggtcctctatgtggtaaagaagggaagcatctcatttgaggatctgaaagctcaaagtaatgaagaggtggttcaactttctccagatgaggaaactaaggacctcattcatcgtctcttccatcctggggaacatgtgagggactgtctgagtgacctgctgggtcatcccttcttttggacttgggagagccgctataggacgcttcggaatgtgggaaatgaatccgacatcaaaacacgaaaatctgaaagtgagatcctcagactactgcaacctgggccttctgaacattccaaaagttttgacaagtggacgactaagatgagcaagctgaggcacagacaaataatttttccaactacacagaaccagtaaggggtgcaccaggatttgaagctgggaaggatggctgcagaggccatgtgcttaagccacaccactacatgaagctgtgatggcatcaagtctaccaactcatttactcactgaggaaattgaggctcagagaccacactcaaattactcatgctggacagtcagagattggcagacctggaaagaggaacttgttcttttatttcccaatttattggttcttttccctaaattccatgggcttatattgaattttgatagtcttcaggttttaacttcaagttttaccttttaattcccattttacactttgtttttctgttgacttgcccattttcatggtcacacaattaattttgtcagcataggtctggagcccaagttttccagcttgtatgactgtattggttcttgacttgccccatcctgccacacatacgtgcttggcgtttctcacgggtgttctgcacagagtgcacctggccagtctcagcagcatcctcactagcattgctctttcatcagttactcttcctaagtgacccactggattcttgactgttgcatcttgatctcgtagcccaaactctttctaaatatgagagccatctatggctctgtatctatgagggtgacaagcacagacaaagaggatgacattactgtgatatgaaaggagttgccctgggacacctgcaggcaaggagaagcaagtaaccttgtttaaaatataaattttagagggtactagtatagttttgttacatggatatattgtgtagtggtaaagttgggcttttagtgtaaccattacctgaataacgcacattgtacccattaagtaatttctcatccctctccctccaaccctcccacctttccaagtctccaattatattattccactctgtacatccatgtgtacacattattgagctcccacttataagagagaacatgtgatatttgactttctgtttgtaagtcatttcacttaaaataatggcctccagttccgtccatgtggccacaaaagacatgatttcattcttcttttttatggctgaaatggcccagacacattttctttatccaatcatctgttgatggacacttaggtggattccatatctttgctattgtgaatagtgctgtagtaaacatatgagtgccggtatctttttgatataagatttcttgggctgagtgcagtggctcacacctgtaatcccagcactttgggaggccgagatgggtggatcatttgaggtcaggagtttaagaccagcctggccaacatggcaaaaccctgtctctactaaaaatacaaaacttagccaagcattgtggcacacgtctgtaatcccagctacttgggcggctgaggcatgagaattgcttcagcctgtgaagcagaggttacagctttattttggcagatactcagtacattcttttctctgcatcctcatcaacatctgttactttttgactttttaatagtagcccctagtataagatgatatctcattggttttaatttgcatttctctgatgattagtgatgttaagcattttttcatatgctttttggcaatttgtacgtcttcttttgagaaatgtctattcttgtcatttgcccactttttaatggtgttattattttttattgttaagttgtttgagttccttgtaaattctggatatcaatcctctgttggatgcatagtttgcaaatattttttttcccatgctgcaggttgtttgttcactctgtttatttcttttgctgcgcagaagtttttagtttaattaaaccccatctgtttcttt

SEQ ID NO: 176158 - DNA, 3121 bp, Homo sapiens
  Payload ID: 14590
  Gene Symbol: RPP14
  Gene Name: ribonuclease P/MRP 14kDa subunit
  Uniprot ID: O95059
  ENST ID: ENST00000295959
  CDS Start-End: 165-539
cgggacgaggagaagccaaacgtaaagacaccaggagtttctcgggcccagctgtggctgctgccggggagccccaagccttggcgggtccttgcggcgaataggagtctggtcaggcgtcaggctagtccgacgaagagtgggtgtgatcagcactggaaaagatgcctgcccctgctgccacatatgaaagagtagtttacaaaaacccttccgagtaccactacatgaaagtctgcctagaatttcaagattgtggagttggactgaatgctgcacagttcaaacagctgcttatttcggctgtgaaggacctgtttggggaggttgatgccgccttacctttggacatcctaacctatgaagagaagaccttgtcagccatcttgagaatatgtagcagtggtcttgtcaaattgtggagctctttgaccctgttaggatcctataaaggcaaaaaatgtgctttccgggtgattcaggtttctccatttcttcttgcattatctggtaatagtagggaactagtattggattgaatgaatagtcttccattttggaaacgttcatccactctcatatttattttttggtgcctgcatgtttgaagactgaagcaggctaaaagctcttgatgaaatttgagggtgctgaagatgttcccactaatttccagccatcacctttggtggggtgggcttcggaggacagtctgtctgaacctgccagtgctgaccctgcagcactttcagcatatgcacatcaaagttggagaccgcgctgaacttaggagggccttcacacagactgatgtggctaccttctcagaattaacaggggatgtcaatcctttgcatttgaatgaagactttgcaaaacacaccaagtttggaaatacaattgtacatggagttttgatcaacggacttatctcagctctcctaggaactaaaatgccagggccaggctgtgtatttctttcccaggaaattagctttccagcccctttatatattggagaagttgttttagcttctgcagaagtgaaaaagctgaagcggttcattgctattattgcagtgtcatgttctgtaatagaaagtaaaaagactgttatggaaggctgggttaaagttatggttccagaagcttccaaatcctgaaatagatgttttaaagatgcaacctcaaacaccaatgctgttgttaaagagcctatggggaattgctgctctttaccaaagaatggttgataggcccagaagcccatcttagttaggggaagggagcaggaagagggttgttcaaatgcccactttccagtttggccttatgcttcatgcagacttgagtgtatgcaggatttcattatctgcctgggttttttgtttgttttttgttttttaattcaagaagtaggctgggcccggtggctcatgcctgtaatcctggcactttgggaggctgcggcaggcggatcacttgaggtcaggagtccaagaccagcctggccaacatggtgaaaccccatctctaccaaaaaaaaaaaaaaaaaaaaagtgcaactagctgtgcttggtgacttggccctgtagtcccagttgcttgggaggctgaggtgggagaattgcttgggcctgagagctggaggttatggtgagaaactgagattgcaccactgcactgtagcctgagtgacagagcgagaccctgtctcaagaaagaagtattgggaaggttatttaaagactctacttttaaatcaggcgtggcagctcacgcctgtaatcccagcattttgggaggctgaggcaggcgaatcacttgaggtcaggagttcaagaccagcctggccaacatgtgaaaccccatctctactaaaaatacaaaaactaaccgggcatggtggcgggcacctgtaatcccagctacttgggaggctgaggcaggagaatctcttgaacctgggaggttgcagtgagctgaaatcacaccactgcacttcagcctgggtgacagagcaaaactccacctcaaaaaaaaaaaaaagattctacttttagaaattcagacctagatagatttgcatttggataacaaatccctacctatagccatgtggaagcagcttgtcactgtattttaactgtgtaacaattattgaaggcgaaaatagaagttgggtcatctttgaacacctaccttttatcaatgaatatttttagactgttcttcagtatctgagtcagagtttattgtaatttgttatttacaccaaggtggcatcttagtctaccttcagtgagacttgcgtttcaggggaggggcgtatgtgcatcctcggtctcagttatgtaaacggtctgatctgtaaaatagtggtagcacatgccatgtgggatagttggtggagatgatagatggagttaagcacagggcccagcctgtcagcagtagctactattattgttgcccatttcccctgcaactgaggtgagaggttttcctgagtttgaagctgactggcccacagttaaacgtaacagaccagtttttcagggtgtcagccaacctctattagtgttcttaagtacagtttctgttataaaagttcagattattccttgaaaatttggatctacctcccattattatgagtaatacatgcttatagtaaaaaaaaaaaaattgtaagaaataaatattaagaagattatggaggccaaattcttaagactttgggggctggggtcagggaggttatattgaaggggagatgtgcctaacatgttactactaaatggccatcccaacacagccaacacttttgtttcccatttttttttgtttcccgttttttaataaaattgagatataattcacataccataaaattcaccttttaaaagtgtacagtttagtggttttcagaatatccacaaagttgtacaaccatcaccaaatcaattttttatagcatttttcatcacccccaaaagaacctcccattagcagtcaatccatttctctcctccagtctttgggaatcaccagtctactttctgtctctatgggtttccctgttctggacatttcataaaagttcatacaatgtatgatc

SEQ ID NO: 176159 - DNA, 7985 bp, Homo sapiens
  Payload ID: 14590
  Gene Symbol: RPP14
  Gene Name: ribonuclease P/MRP 14kDa subunit
  Uniprot ID: O95059
  ENST ID: ENST00000445193
  CDS Start-End: 412-786
acgcttcgtggggcgggacgaggagaagccaaacgtaaagacaccaggagtttctcgggcccagctgtggctgctgccggggagccccaagccttggcgggtccttgcggcgaataggagtctggtcaggcgtcaggctagtccgacgaagagtgggtaggtggaagccttccaaagagcggcggttgtctgggagccgtctcagttggccgcgacccgggcgcatgcgcggggcgggcggtgcgccttgggtagcttgtcctctccgaccccgggcgctgagggcctctgtacggcgccgcgtagggtctcggccgcagaacgtggccgagaggcccgggcgagacttcgggaccgtgtcctgagcgctctccatgcgcccggcgcgaggtgtgatcagcactggaaaagatgcctgcccctgctgccacatatgaaagagtagtttacaaaaacccttccgagtaccactacatgaaagtctgcctagaatttcaagattgtggagttggactgaatgctgcacagttcaaacagctgcttatttcggctgtgaaggacctgtttggggaggttgatgccgccttacctttggacatcctaacctatgaagagaagaccttgtcagccatcttgagaatatgtagcagtggtcttgtcaaattgtggagctctttgaccctgttaggatcctataaaggcaaaaaatgtgctttccgggtgattcaggtttctccatttcttcttgcattatctggtaatagtagggaactagtattggattgaatgaatagtcttccattttggaaacgttcatccactctcatatttattttttggtgcctgcatgtttgaagactgaagcaggctaaaagctcttgatgaaatttgagggtgctgaagatgttcccactaatttccagccatcacctttggtggggtgggcttcggaggacagtctgtctgaacctgccagtgctgaccctgcagcactttcagcatatgcacatcaaagttggagaccgcgctgaacttaggagggccttcacacagactgatgtggctaccttctcagaattaacaggggatgtcaatcctttgcatttgaatgaagactttgcaaaacacaccaagtttggaaatacaattgtacatggagttttgatcaacggacttatctcagctctcctaggaactaaaatgccagggccaggctgtgtatttctttcccaggaaattagctttccagcccctttatatattggagaagttgttttagcttctgcagaagtgaaaaagctgaagcggttcattgctattattgcagtgtcatgttctgtaatagaaagtaaaaagactgttatggaaggctgggttaaagttatggttccagaagcttccaaatcctgaaatagatgttttaaagatgcaacctcaaacaccaatgctgttgttaaagagcctatggggaattgctgctctttaccaaagaatggttgataggcccagaagcccatcttagttaggggaagggagcaggaagagggttgttcaaatgcccactttccagtttggccttatgcttcatgcagacttgagtgtatgcaggatttcattatctgcctgggttttttgtttgttttttgttttttaattcaagaagtaggctgggcccggtggctcatgcctgtaatcctggcactttgggaggctgcggcaggcggatcacttgaggtcaggagtccaagaccagcctggccaacatggtgaaaccccatctctaccaaaaaaaaaaaaaaaaaaaaagtgcaactagctgtgcttggtgacttggccctgtagtcccagttgcttgggaggctgaggtgggagaattgcttgggcctgagagctggaggttatggtgagaaactgagattgcaccactgcactgtagcctgagtgacagagcgagaccctgtctcaagaaagaagtattgggaaggttatttaaagactctacttttaaatcaggcgtggcagctcacgcctgtaatcccagcattttgggaggctgaggcaggcgaatcacttgaggtcaggagttcaagaccagcctggccaacatgtgaaaccccatctctactaaaaatacaaaaactaaccgggcatggtggcgggcacctgtaatcccagctacttgggaggctgaggcaggagaatctcttgaacctgggaggttgcagtgagctgaaatcacaccactgcacttcagcctgggtgacagagcaaaactccacctcaaaaaaaaaaaaaagattctacttttagaaattcagacctagatagatttgcatttggataacaaatccctacctatagccatgtggaagcagcttgtcactgtattttaactgtgtaacaattattgaaggcgaaaatagaagttgggtcatctttgaacacctaccttttatcaatgaatatttttagactgttcttcagtatctgagtcagagtttattgtaatttgttatttacaccaaggtggcatcttagtctaccttcagtgagacttgcgtttcaggggaggggcgtatgtgcatcctcggtctcagttatgtaaacggtctgatctgtaaaatagtggtagcacatgccatgtgggatagttggtggagatgatagatggagttaagcacagggcccagcctgtcagcagtagctactattattgttgcccatttcccctgcaactgaggtgagaggttttcctgagtttgaagctgactggcccacagttaaacgtaacagaccagtttttcagggtgtcagccaacctctattagtgttcttaagtacagtttctgttataaaagttcagattattccttgaaaatttggatctacctcccattattatgagtaatacatgcttatagtaaaaaaaaaaaaattgtaagaaataaatattaagaagattatggaggccaaattcttaagactttgggggctggggtcagggaggttatattgaaggggagatgtgcctaacatgttactactaaatggccatcccaacacagccaacacttttgtttcccatttttttttgtttcccgttttttaataaaattgagatataattcacataccataaaattcaccttttaaaagtgtacagtttagtggttttcagaatatccacaaagttgtacaaccatcaccaaatcaattttttatagcatttttcatcacccccaaaagaacctcccattagcagtcaatccatttctctcctccagtctttgggaatcaccagtctactttctgtctctatgggtttccctgttctggacatttcataaaagttcatacaatgtatgatcctttggaactggcttctttgatatagcatgttttcagggttcatccatgttacagcatgtatcagtacatcattttattttatggctgaataatattccattgtatttacccatacatcagttgatatttggattattttcgcttttgggctgttaaaaataatgttatgaacattatagaagaggtttttatgtgcacaggttttaaatatatatatatatatatattttctttttttcttttttgagatggagtcttgctctgtcgcccaggctggagtgcagtggtgcgatcccagctcactgcaagctcctcctcctgggttcaggccattctcctgcctcagcctcccaagtagctgggactacaggcgcctgcaaccacgcccggctaattttttgtatttttaatagagacggggtttcaccgtgttaaccgggatggtctcgatctcctgacctcgtgatctgcctgcctcggcctcccaaagtgctgggattacaggcgttagccattgcgcctggccgacaggttttaaattctaggagtggaattgctggatcatgtaactttaatattataaagaattgtcaaattgttgttcaaattactattgggcatgaggtggtatctcattgtagttatgatttccatttctctaatgtcagccaacacattcaagacaatctatgacagaatttttaatttttacccagagagcagctgaacagacaactagaaagaattattctaggccaggcgtggtggctcatgcctgtaattctcagcactttgggaggccaaggcaggcggatcacgaggtcgaggtcaagagattgagaccatcctggccatcatgatgaaaccccatctctactaagaatacaaaaaaattaactgggtgtggtggtgcgtgcctgtaatcccagctactcggaggctgaggcaggaagattgcttgaactgggaggtggaggttgcattgagctgagatcgtgcccctgcactctagcctgggcaacagagcgagactccgtctcaaaaaaaaaaaaaattattctagtcgctagagggcagtgttgtgtataaagttagtactttaaaactttaatactgtattataccatatactagttttctaaggtggaagacaagaccaaaatcaatgtggggagcaaggatactgttcttgtgagtttcagaatgtgcagcatgtgcaggctgagatccacttgaagaagacatttataggtgaatcactagacatgctgaaaatgtgttcaaatggcaaaacaaaatggggaacatgcacaaatatacggacttgaggccaggactgcttgctcctgcagaactcattccctgggatttagcagcagtcttaaagttaggtccataactggattgggatgtgatcattgatactgatagccaccattttttcaatgcctgatgagttgattttctacattaatgctaatccttgaaacaactgtgtgaagttaacattatcctgtttttaagtaggataactgacttgcccaaggttgttcagcgaataagcagtacagctgggattcaaacttgggcctgcctggctccaaagcctttcctttttccatcactctgtgggtcttaggttcctgtaggaaccaaggggaaacttcccctttgccctctgaaggttcactgaaaaatcaactgagaaaaggcaaattaattggagaaaaggcataccaatatattagcttgcatgaaggggagagctacagagtgattaccccccaaacccccacccaatagggtttagaagcttaaataccacctaaaggttacaaaaagagtgtgggctcggatcagtggcataacatgttcggggagctggagaaggggaagcctggctagcaaaggtggtcttgttatgtaaatgaagccccacaggtggcagccctcaaaagaatagatggtaaatgttttagaccttttttgttgtatgagacagagtctcgctcttattgcccaggctggattgcaatggcacgatcttggttcactgtggcctccgcctcccgggttcaagcgattctcttggcctcagcctcccaagtagctgggattacaggcatgtgccaccatgcccagctaaattttgtatttttagtggagatggggtttcaccatgttggccaggctggtttcgaactcctgacctcaggtgatctggcctcctcggcctcccaaagtgctgggattacagatgtgagccaccatgtccagcatgtttcagacctttaaagtgtcagactaagttaatcttcccgagatccagacaagggaaggcctggctgcatcaagcagattctctgcaaatgcaagttttctccaaaaaagacagctttgcagggctgcttcttttggctctctgaacagccatctgaaaatatgacaaatatattttggggtgaaatatttttatttccctcattcgtgttgctggaactggagcactgtcagtttctataatggcatcttacatggcattaaaataattggaatcattctatagcaatctttttgctttcggaatgttctagatcttattccccgctagagttgtagcgttttcctaatactattagttgaaagtcttccacccatgcatatcacctacacattttctaagccgacattcagtgattatttgtcttcaccgaagaatggcttaaagggttaaagatgaaaaatatagggtacggaagggatgtcagatctgaatgatagttgatttatactgtgtaactttcaaaagtagctactcaatgtgagcatttccactgtttttttttttgtttgttttctgagacagagtctcactctgtctcccaggctggagttgcagtggtgcaatgactgcagcacctcctgggcttacacaatcctgcctcagcctcctatatagcagagaacagaggtgcacaccaccatatctggcttattttttgattttttgcagagatgaggtctcactttgttgcccaggctagtctcaaactcctgggctcaagcaatcctcccaccttggcttcccaaagtgctgggattacaggcatgagccactgtgctcagccttcatgttcacttttttaaaatgtatgtattttttatagagatgtgggtctcactgtgtcgcccaggttgtctcgaactcctggtctcaagcgatactcctgctttggcctcccaaaatgctggaatgagcctctgcatacagagttccacatttttatgctccctgagtcatggtctttgaaatctataaatcaataaaggttggaaacagagaagtagacaagaagttatcagtacttctctttagtaacttgtcatttttatccagagtcaagattctcaaaccacacgtgctttgttaaagctggctataaggaaaactggttgcttggctttttcattgagtctatacaaactgctcaaaagaatgactcttaatgaaagcctgagtgaccctcaaattaggaaattctctcccagataattgagaagtggccttgactgtaccaggtcacacatggaaataagtacaaaagtaatgactaaaataggccaagttgaccgagcactttgtacataggggtattatacgactgcaaattgtgtgatgtttaattgtcacagaaagagatactcgttttaagcacttttagcctaatgtactggaaaattgcttaatggatttttatactctattggaaacatttccatattggtgaaatgccactcattcctttttctgaggagcaaatcttgagtagcaatgggaagaaagcctggcaacagccaccatttgtcttgtggacctgacatgcttattcacctagaaaaagaagaaattgctaaatgcacactgatacctcttaggtaaccacaggttttcattttgtgctgaattattagtcatttttcctttatgtttttagagtatgattcagagaccaatttattcccaaagaaaattgccattacatctactaagttttcatattaaaacattttctaccaagggatgactgtcactctgagcaactgtgccactgtgaatgcctcatgtgtcagcatagcttattatctagctctgagcagaatgggagtgctgctgaattagtcttggtccacaggtatctccagtgtcccagatgtttcacctcctttgttcttatctttgcttttattttgggttacaaacacagcagataaattaattctcagcatcttcagagaaactgtgggttagagcagaatcaccaactagaagaaaccatttaaattcaaaaatcataaggaacccagaaccaatgttaacactgcataaatacaacaagattaataggaggccccacagttaattcctaaggtggttcttagctgtaaagcaattcaaatgaccttcttataaaccctgggcaaaagtcccctgtgatgtggtggaaaatatcaacacgtaaaggaaataagaatgactgtgagttgagttttgttgttttagatccagatcatgaatatttaaagaaataaaagcattttgagttgggaggccatgc

SEQ ID NO: 176160 - DNA, 805 bp, Homo sapiens
  Payload ID: 14590
  Gene Symbol: RPP14
  Gene Name: ribonuclease P/MRP 14kDa subunit
  Uniprot ID: O95059
  ENST ID: ENST00000466547
  CDS Start-End: 149-523
agtttctcgggcccagctgtggctgctgccggggagccccaagccttggcgggtccttgcggcgaataggagtctggtcaggcgtcaggctagtccgacgaagagtggccctcttgacttactgtaggtgtgatcagcactggaaaagatgcctgcccctgctgccacatatgaaagagtagtttacaaaaacccttccgagtaccactacatgaaagtctgcctagaatttcaagattgtggagttggactgaatgctgcacagttcaaacagctgcttatttcggctgtgaaggacctgtttggggaggttgatgccgccttacctttggacatcctaacctatgaagagaagaccttgtcagccatcttgagaatatgtagcagtggtcttgtcaaattgtggagctctttgaccctgttaggatcctataaaggcaaaaaatgtgctttccgggtgattcaggtttctccatttcttcttgcattatctggtaatagtagggaactagtattggattgaatgaatagtcttccattttggaaacgttcatccactctcatatttattttttggtgcctgcatgtttgaagactgaagcaggctaaaagctcttgatgaaatttgagggtgctgaagatgttcccactaatttccagccatcacctttggtggggtgggcttcggaggacagtctgtctgaacctgccagtgctgaccctgcagcactttcagcatatgcacatcaaagttggagaccgcgctgaacttaggagggccttcacacagactgatgtggctacc

SEQ ID NO: 176161 - DNA, 525 bp, Homo sapiens
  Payload ID: 14591
  Gene Symbol: RPP21
  Gene Name: ribonuclease P/MRP 21kDa subunit
  Uniprot ID: Q9H633
  ENST ID: ENST00000376642
  CDS Start-End: 14-478
gagcgcggcggtgatggcggggccggtgaaggaccgcgaggccttccagaggctcaacttcctgtaccaggccgcccattgtgtccttgcccaggaccccgagaaccaggcgctggcgaggttttactgctacactgagaggaccattgcgaagcggctcgtcttgcggcgagatccctcggtgaagaggactctctgtcgaggctgctcttccctcctcgtcccgggcctcacctgcacccagcgccagagacgctgcaggggacagcgctggaccgtacagacctgcctaacatgccagcgcagccaacgcttcctcaatgatcccgggcatttactctggggagacaggcctgaggcccagctcgggagccaagcagattccaaaccactacaacccttgccaaacacagcccactccatttcagaccgccttcctgaggagaaaatgcagactcagggttccagtaaccagtgatggattcaccccatctcccaaataaagtttacttgttttacattcca

SEQ ID NO: 176162 - DNA, 594 bp, Homo sapiens
  Payload ID: 14591
  Gene Symbol: RPP21
  Gene Name: ribonuclease P/MRP 21kDa subunit
  ENST ID: ENST00000452262
  CDS Start-End: 14-547
gagcgcggcggtgatggcggggccggtgaaggaccgcgaggccttccagaggctcaacttcctgtaccaggtgagtctgcgacaagggccccacggggacggtgctcggcgtcccagagtgactgctcccctcccgcaggccgcccattgtgtccttgcccaggaccccgagaaccaggcgctggcgaggttttactgctacactgagaggaccattgcgaagcggctcgtcttgcggcgggatccctcggtgaagaggactctctgtcgaggctgctcttccctcctcgtcccgggcctcacctgcacccaccgccagagacgctgcaggggacagcgctggaccgtacagacctgcctaacatgccagcgcagccaacgcttcctcaatgatcccgggcatttactctggggagacaggcctgaggcccagctcgggagccaagcagattccaaaccactacaacccttgccaaacacagcccactccatttcagaccgccttcctgaggagaaaatgcagactcagggttccagtaaccagtgatggattcaccccatctcccaaataaagtttacttgttttacattcca

SEQ ID NO: 176163 - DNA, 594 bp, Homo sapiens; identical to SEQ ID NO: 176162
  Payload ID: 14591
  Gene Symbol: RPP21
  Gene Name: ribonuclease P/MRP 21kDa subunit
  ENST ID: ENST00000439624
  CDS Start-End: 14-547

SEQ ID NO: 176164 - DNA, 594 bp, Homo sapiens; identical to SEQ ID NO: 176162
  Payload ID: 14591
  Gene Symbol: RPP21
  Gene Name: ribonuclease P/MRP 21kDa subunit
  ENST ID: ENST00000422320
  CDS Start-End: 14-547

SEQ ID NO: 176165 - DNA, 594 bp, Homo sapiens
  Payload ID: 14591
  Gene Symbol: RPP21
  Gene Name: ribonuclease P/MRP 21kDa subunit
  Uniprot ID: Q9H633
  ENST ID: ENST00000428040
  CDS Start-End: 14-547
gagcgcggcggtgatggcggggccggtgaaggaccgcgaggccttccagaggctcaacttcctgtaccaggtgagtctgcgacaagggccccacggggacggtgctcggcgtcccagagtgactgctcccctcccgcaggccgcccattgtgtccttgcccaggaccccgagaaccaggcgctggcgaggttttactgctacactgagaggaccattgcgaagcggctcgtcttgcggcgggatccctcggtgaagaggactctctgtcgaggctgctcttccctcctcgtcccgggcctcacctgcacccagcgccagagacgctgcaggggacagcgctggaccgtacagacctgcctaacatgccagcgcagccaacgcttcctcaatgatcccgggcatttactctggggagacaggcctgaggcccagctcgggagccaagcagattccaaaccactacaacccttgccaaacacagcccactccatttcagaccgccttcctgaggagaaaatgcagactcagggttccagtaaccagtgatggattcaccccatctcccaaataaagtttacttgttttacattcca

SEQ ID NO: 176166 - DNA, 522 bp, Homo sapiens
  Payload ID: 14591
  Gene Symbol: RPP21
  Gene Name: ribonuclease P/MRP 21kDa subunit
  Uniprot ID: Q9H633
  ENST ID: ENST00000436442
  CDS Start-End: 4-438
gtgatggcggggccggtgaaggaccgcgaggccttccagaggctcaacttcctgtaccaggccgcccattgtgtccttgcccaggaccccgagaaccaggcgctggcgaggttttactgctacactgagaggaccattgcgaagcggctcgtcttgcggcgggatccctcggtgaagaggactctctgtcgaggctgctcttccctcctcgtcccgggcctcacctgcacccagcgccagagacgctgcaggggacagcgctggaccgtacagacctgcctaacatgccagcgcagccaacgcttcctcaatgatcccgggcatttactctggggagacaggcctgaggcccagctcgggagccaagcaggtgagagattccaaaccactacaacccttgccaaacacagcccactccatttcagaccgccttcctgaggagaaaatgcagactcagggttccagtaaccagtgatggattcaccccatctcccaaataaagtttacttgttttacattcca

SEQ ID NO: 176167 - DNA, 525 bp, Homo sapiens
  Payload ID: 14591
  Gene Symbol: RPP21
  Gene Name: ribonuclease P/MRP 21kDa subunit
  Uniprot ID: Q9H633
  ENST ID: ENST00000414187
  CDS Start-End: 14-478
gagcgcggcggtgatggcggggccggtgaaggaccgcgaggccttccagaggctcaacttcctgtaccaggccgcccattgtgtccttgcccaggaccccgagaaccaggcgctggcgaggttttactgctacactgagaggaccattgcgaagcggctcgtcttgcggcgggatccctcggtgaagaggactctctgtcgaggctgctcttccctcctcgtcccgggcctcacctgcacccaccgccagagacgctgcaggggacagcgctggaccgtacagacctgcctaacatgccagcgcagccaacgcttcctcaatgatcccgggcatttactctggggagacaggcctgaggcccagctcgggagccaagcagattccaaaccactacaacccttgccaaacacagcccactccatttcagaccgccttcctgaggagaaaatgcagactcagggttccagtaaccagtgatggattcaccccatctcccaaataaagtttacttgttttacattcca

SEQ ID NO: 176168 - DNA, 525 bp, Homo sapiens
  Payload ID: 14591
  Gene Symbol: RPP21
  Gene Name: ribonuclease P/MRP 21kDa subunit
  Uniprot ID: Q9H633
  ENST ID: ENST00000424616
  CDS Start-End: 14-478
gagcgcggcggtgatggcggggccggtgaaggaccgcgaggccttccagaggctcaacttcctgtaccaggccgcccattgtgtccttgcccaggaccccgagaaccaggcgctggcgaggttttactgctacactgagaggaccattgcgaagcggctcgtcttgcggcgggatccctcggtgaagaggactctctgtcgaggctgctcttccctcctcgtcccgggcctcacctgcacccagcgccagagacgctgcaggggacagcgctggaccgtacagacctgcctaacatgccagcgcagccaacgcttcctcaatgatcccgggcatttactctggggagacaggcctgaggcccagctcgggagccaagcagattccaaaccactacaacccttgccaaacacagcccactccatttcagaccgccttcctgaggagaaaatgcagactcagggttccagtaaccagtgatggattcaccccatctcccaaataaagtttacttgttttacattcca

SEQ ID NO: 176169 - DNA, 577 bp, Homo sapiens
  Payload ID: 14591
  Gene Symbol: RPP21
  Gene Name: ribonuclease P/MRP 21kDa subunit
  ENST ID: ENST00000456870
  CDS Start-End: 42-530
gcgaggggtggggctgcgggaggccctggagcgcggcggtgatggcggggccggtgaaggaccgcgaggccttccagaggctcaacttcctgtaccaggccgcccattgtgtccttgcccaggaccccgagaaccaggcgctggcgaggttttactgctacactgagaggaccattgcgaagcggctcgtcttgcggcgaccactatcctcctccgcccccagggatccctcggtgaagaggactctctgtcgaggctgctcttccctcctcgtcccgggcctcacctgcacccaccgccagagacgctgcaggggacagcgctggaccgtacagacctgcctaacatgccagcgcagccaacgcttcctcaatgatcccgggcatttactctggggagacaggcctgaggcccagctcgggagccaagcagattccaaaccactacaacccttgccaaacacagcccactccatttcagaccgccttcctgaggagaaaatgcagactcagggttccagtaaccagtgatggattcaccccatctcccaaataaagtttacttgttttacattcca

SEQ ID NO: 176170 - DNA, 522 bp, Homo sapiens
  Payload ID: 14591
  Gene Symbol: RPP21
  Gene Name: ribonuclease P/MRP 21kDa subunit
  Uniprot ID: Q9H633
  ENST ID: ENST00000415583
  CDS Start-End: 4-438
gtgatggcggggccggtgaaggaccgcgaggccttccagaggctcaacttcctgtaccaggccgcccattgtgtccttgcccaggaccccgagaaccaggcgctggcgaggttttactgctacactgagaggaccattgcgaagcggctcgtcttgcggcgagatccctcggtgaagaggactctctgtcgaggctgctcttccctcctcgtcccgggcctcacctgcacccagcgccagagacgctgcaggggacagcgctggaccgtacagacctgcctaacatgccagcgcagccaacgcttcctcaatgatcccgggcatttactctggggagacaggcctgaggcccagctcgggagccaagcaggtgagagattccaaaccactacaacccttgccaaacacagcccactccatttcagaccgccttcctgaggagaaaatgcagactcagggttccagtaaccagtgatggattcaccccatctcccaaataaagtttacttgttttacattcca

SEQ ID NO: 176171 - DNA, 525 bp, Homo sapiens; identical to SEQ ID NO: 176168
  Payload ID: 14591
  Gene Symbol: RPP21
  Gene Name: ribonuclease P/MRP 21kDa subunit
  Uniprot ID: Q9H633
  ENST ID: ENST00000442966
  CDS Start-End: 14-478

SEQ ID NO: 176172 - DNA, 525 bp, Homo sapiens
  Payload ID: 14591
  Gene Symbol: RPP21
  Gene Name: ribonuclease P/MRP 21kDa subunit
  ENST ID: ENST00000418043
  CDS Start-End: 14-478
gagcgcggcggtgatggcggggccggtgaaggaccgcgaggccttccagaggctcaacttcctgtaccaggccgcccattgtgtccttgcccaggaccccgagaaccaggcgctggcgaggttttactgctacactgagaggaccattgcgaagcggctcgtcttgcggcgggatccctcggtgaagaggactctctgtcgaggctgctcttccctcctcgtcccgggcctcacctgcacccagcgccagagacgctgcaggggacagcgctggaccgtacagacctgcctaacatgccagcgcagccaacgcttcctcaatgatcccgggcatttactctggggagacaggcctgaggcccagctcgggagccaagcagattccaaaccactacaacccttgccaaacacagcccactccatttcagaccgccttcctgaggagaaaatgcagacgaagggttccagtaaccagtgatggattcacctcatctcccaaataaagtttacttgttttacattcca

SEQ ID NO: 176173 - DNA, 525 bp, Homo sapiens; identical to SEQ ID NO: 176167
  Payload ID: 14591
  Gene Symbol: RPP21
  Gene Name: ribonuclease P/MRP 21kDa subunit
  Uniprot ID: Q9H633
  ENST ID: ENST00000416977
  CDS Start-End: 14-478

SEQ ID NO: 176174 - DNA, 594 bp, Homo sapiens
  Payload ID: 14591
  Gene Symbol: RPP21
  Gene Name: ribonuclease P/MRP 21kDa subunit
  ENST ID: ENST00000413228
  CDS Start-End: 14-547
gagcgcggcggtgatggcggggccggtgaaggaccgcgaggccttccagaggctcaacttcctgtaccaggtgagtctgcgacaagggccccacggggacggtgctcggcgtcccagagtgactgctcccctcccgcaggccgcccattgtgtccttgcccaggaccccgagaaccaggcgctggcgaggttttactgctacactgagaggaccattgcgaagcggctcgtcttgcggcgggatccctcggtgaagaggactctctgtcgaggctgctcttccctcctcgtcccgggcctcacctgcacccagcgccagagacgctgcaggggacagcgctggaccgtacagacctgcctaacatgccagcgcagccaacgcttcctcaatgatcccgggcatttactctggggagacaggcctgaggcccagctcgggagccaagcagattccaaaccactacaacccttgccaaacacagcccactccatttcagaccgccttcctgaggagaaaatgcagacgaagggttccagtaaccagtgatggattcacctcatctcccaaataaagtttacttgttttacattcca

SEQ ID NO: 176175 - DNA, 522 bp, Homo sapiens
  Payload ID: 14591
  Gene Symbol: RPP21
  Gene Name: ribonuclease P/MRP 21kDa subunit
  ENST ID: ENST00000439797
  CDS Start-End: 4-438
gtgatggcggggccggtgaaggaccgcgaggccttccagaggctcaacttcctgtaccaggccgcccattgtgtccttgcccaggaccccgagaaccaggcgctggcgaggttttactgctacactgagaggaccattgcgaagcggctcgtcttgcggcgggatccctcggtgaagaggactctctgtcgaggctgctcttccctcctcgtcccgggcctcacctgcacccaccgccagagacgctgcaggggacagcgctggaccgtacagacctgcctaacatgccagcgcagccaacgcttcctcaatgatcccgggcatttactctggggagacaggcctgaggcccagctcgggagccaagcaggtgagagattccaaaccactacaacccttgccaaacacagcccactccatttcagaccgccttcctgaggagaaaatgcagactcagggttccagtaaccagtgatggattcaccccatctcccaaataaagtttacttgttttacattcca

SEQ ID NO: 176176 - DNA, 577 bp, Homo sapiens
  Payload ID: 14591
  Gene Symbol: RPP21
  Gene Name: ribonuclease P/MRP 21kDa subunit
  Uniprot ID: Q9H633
  ENST ID: ENST00000425575
  CDS Start-End: 42-530
gcgaggggtggggctgcgggaggccctggagcgcggcggtgatggcggggccggtgaaggaccgcgaggccttccagaggctcaacttcctgtaccaggccgcccattgtgtccttgcccaggaccccgagaaccaggcgctggcgaggttttactgctacactgagaggaccattgcgaagcggctcgtcttgcggcgaccactatcctcctccgcccccagagatccctcggtgaagaggactctctgtcgaggctgctcttccctcctcgtcccgggcctcacctgcacccagcgccagagacgctgcaggggacagcgctggaccgtacagacctgcctaacatgccagcgcagccaacgcttcctcaatgatcccgggcatttactctggggagacaggcctgaggcccagctcgggagccaagcagattccaaaccactacaacccttgccaaacacagcccactccatttcagaccgccttcctgaggagaaaatgcagactcagggttccagtaaccagtgatggattcaccccatctcccaaataaagtttacttgttttacattcca

SEQ ID NO: 176177 - DNA, 577 bp, Homo sapiens; identical to SEQ ID NO: 176169
  Payload ID: 14591
  Gene Symbol: RPP21
  Gene Name: ribonuclease P/MRP 21kDa subunit
  ENST ID: ENST00000412659
  CDS Start-End: 42-530

SEQ ID NO: 176178 - DNA, 522 bp, Homo sapiens; identical to SEQ ID NO: 176166
  Payload ID: 14591
  Gene Symbol: RPP21
  Gene Name: ribonuclease P/MRP 21kDa subunit
  Uniprot ID: Q9H633
  ENST ID: ENST00000437470
  CDS Start-End: 4-438

SEQ ID NO: 176179 - DNA, 577 bp, Homo sapiens
  Payload ID: 14591
  Gene Symbol: RPP21
  Gene Name: ribonuclease P/MRP 21kDa subunit
  Uniprot ID: Q9H633
  ENST ID: ENST00000455025
  CDS Start-End: 42-530
gcgaggggtggggctgcgggaggccctggagcgcggcggtgatggcggggccggtgaaggaccgcgaggccttccagaggctcaacttcctgtaccaggccgcccattgtgtccttgcccaggaccccgagaaccaggcgctggcgaggttttactgctacactgagaggaccattgcgaagcggctcgtcttgcggcgaccactatcctcctccgcccccagggatccctcggtgaagaggactctctgtcgaggctgctcttccctcctcgtcccgggcctcacctgcacccagcgccagagacgctgcaggggacagcgctggaccgtacagacctgcctaacatgccagcgcagccaacgcttcctcaatgatcccgggcatttactctggggagacaggcctgaggcccagctcgggagccaagcagattccaaaccactacaacccttgccaaacacagcccactccatttcagaccgccttcctgaggagaaaatgcagactcagggttccagtaaccagtgatggattcaccccatctcccaaataaagtttacttgttttacattcca

SEQ ID NO: 176180 - DNA, 577 bp, Homo sapiens; identical to SEQ ID NO: 176179
  Payload ID: 14591
  Gene Symbol: RPP21
  Gene Name: ribonuclease P/MRP 21kDa subunit
  Uniprot ID: Q9H633
  ENST ID: ENST00000433076
  CDS Start-End: 42-530

SEQ ID NO: 176181 - DNA, 522 bp, Homo sapiens; identical to SEQ ID NO: 176175
  Payload ID: 14591
  Gene Symbol: RPP21
  Gene Name: ribonuclease P/MRP 21kDa subunit
  ENST ID: ENST00000427637
  CDS Start-End: 4-438

SEQ ID NO: 176182 - DNA, 522 bp, Homo sapiens
  Payload ID: 14591
  Gene Symbol: RPP21
  Gene Name: ribonuclease P/MRP 21kDa subunit
  Uniprot ID: Q9H633
  ENST ID: ENST00000435318
  CDS Start-End: 4-438
gtgatggcggggccggtgaaggaccgcgaggccttccagaggctcaacttcctgtaccaggccgcccattgtgtccttgcccaggaccccgagaaccaggcgctggcgaggttttactgctacactgagaggaccattgcgaagcggctcgtcttgcggcgggatccctcggtgaagaggactctctgtcgaggctgctcttccctcctcgtcccgggcctcacctgcacccagcgccagagacgctgcaggggacagcgctggaccgtacagacctgcctaacatgccagcgcagccaacgcttcctcaatgatcccgggcatttactctggggagacaggcctgaggcccagctcgggagccaagcaggtgagagattccaaaccactacaacccttgccaaacacagcccactccatttcagaccgccttcctgaggagaaaatgcagacgaagggttccagtaaccagtgatggattcacctcatctcccaaataaagtttacttgttttacattcca

SEQ ID NO: 176183 - DNA, 579 bp, Homo sapiens
  Payload ID: 14591
  Gene Symbol: RPP21
  Gene Name: ribonuclease P/MRP 21kDa subunit
  ENST ID: ENST00000411515
  CDS Start-End: 44-532
gcgaggggtggggcgctgcgggaggccctggagcgcggcggtgatggcggggccggtgaaggaccgcgaggccttccagaggctcaacttcctgtaccaggccgcccattgtgtccttgcccaggaccccgagaaccaggcgctggcgaggttttactgctacactgagaggaccattgcgaagcggctcgtcttgcggcgaccactatcctcctccgcccccagggatccctcggtgaagaggactctctgtcgaggctgctcttccctcctcgtcccgggcctcacctgcacccagcgccagagacgctgcaggggacagcgctggaccgtacagacctgcctaacatgccagcgcagccaacgcttcctcaatgatcccgggcatttactctggggagacaggcctgaggcccagctcgggagccaagcagattccaaaccactacaacccttgccaaacacagcccactccatttcagaccgccttcctgaggagaaaatgcagacgaagggttccagtaaccagtgatggattcacctcatctcccaaataaagtttacttgttttacattcca

SEQ ID NO: 176184 - DNA, 522 bp, Homo sapiens; identical to SEQ ID NO: 176175
  Payload ID: 14591
  Gene Symbol: RPP21
  Gene Name: ribonuclease P/MRP 21kDa subunit
  ENST ID: ENST00000422720
  CDS Start-End: 4-438

SEQ ID NO: 176185 - DNA, 594 bp, Homo sapiens; identical to SEQ ID NO: 176165
  Payload ID: 14591
  Gene Symbol: RPP21
  Gene Name: ribonuclease P/MRP 21kDa subunit
  Uniprot ID: Q9H633
  ENST ID: ENST00000411784
  CDS Start-End: 14-547

SEQ ID NO: 176186 - DNA, 525 bp, Homo sapiens; identical to SEQ ID NO: 176167
  Payload ID: 14591
  Gene Symbol: RPP21
  Gene Name: ribonuclease P/MRP 21kDa subunit
  Uniprot ID: Q9H633
  ENST ID: ENST00000434282
  CDS Start-End: 14-478

SEQ ID NO: 176187 - DNA, 594 bp, Homo sapiens
  Payload ID: 14591
  Gene Symbol: RPP21
  Gene Name: ribonuclease P/MRP 21kDa subunit
  Uniprot ID: Q9H633
  ENST ID: ENST00000430900
  CDS Start-End: 14-547
gagcgcggcggtgatggcggggccggtgaaggaccgcgaggccttccagaggctcaacttcctgtaccaggtgagtctgcgacaagggccccacggggacggtgctcggcgtcccagagtgactgctcccctcccgcaggccgcccattgtgtccttgcccaggaccccgagaaccaggcgctggcgaggttttactgctacactgagaggaccattgcgaagcggctcgtcttgcggcgagatccctcggtgaagaggactctctgtcgaggctgctcttccctcctcgtcccgggcctcacctgcacccagcgccagagacgctgcaggggacagcgctggaccgtacagacctgcctaacatgccagcgcagccaacgcttcctcaatgatcccgggcatttactctggggagacaggcctgaggcccagctcgggagccaagcagattccaaaccactacaacccttgccaaacacagcccactccatttcagaccgccttcctgaggagaaaatgcagactcagggttccagtaaccagtgatggattcaccccatctcccaaataaagtttacttgttttacattcca

SEQ ID NO: 176188 - DNA, 577 bp, Homo sapiens; identical to SEQ ID NO: 176169
  Payload ID: 14591
  Gene Symbol: RPP21
  Gene Name: ribonuclease P/MRP 21kDa subunit
  ENST ID: ENST00000430819
  CDS Start-End: 42-530

SEQ ID NO: 176189 - DNA, 3049 bp, Homo sapiens
  Payload ID: 14592
  Gene Symbol: RPP25
  Gene Name: ribonuclease P/MRP 25kDa subunit
  Uniprot ID: Q9BUL9
  ENST ID: ENST00000322177
  CDS Start-End: 882-1481
cttttcagaagaggtcacgcccgcttccccacgcgcctcggggaacagcctggcccaaagcctcactcctcacgtcccaggggtggacgggggtccgggagcctcgagctccgggcaggcgtggcgaggctgaagtctgggtcttccgcgccccgcgaggaccacgccgcgacgtaatcgcccgcggggaggcgcggagtggagccgcagccagctcctcccgcactctgctgaccgcgcactagctgtccttgaggcaagaatacttgggagcggaaaaaaggtgggggtgttccccggggcgggggaggaggggcaaggccccagcaagcctcttggaaatctctccctgggaggggacgaggggcggccttcagttgcaaatgggaagggctcggataccggatttgaagcagtgtttgcacggcaagcgcagcttttatttagactgccggtttgtgagggttggctctcagagcgctgatggcgattatagtggaacttcaccttcacctgctcatgcgccccgcagcgcgcccgctcccacgcccgcgtagctgaggacccagactcgccaggaaaggctagtgaggctggggcccgggcgggcccggccgggccgggtcaggggaggggcctggcggcaggggcggggcctcagctaaaggcgcggagcacccggcgccgagagcgctgagtagagcggcgcccgctcgagagaagtggggccgagatcgcgccgtcccagcccgcccgccggcgtctgcgctgctccggcgcccttacccctgctggcccttgcaaggcgcgaccggcggccatgcagccccggggctgaggccgccccatggcaaagccggcggtcccggcgacgacggcgcatggagaacttccgtaaggtgcgctccgaagaggcgccagcggggtgcggggccgagggaggcggcccgggctccggccccttcgcagacctggcgccgggcgcggtgcacatgcgggtcaaggaaggcagcaagatccggaacctgatggccttcgccaccgccagcatggcgcagccagccacgcgcgccatcgtcttcagcggctgcggccgggccaccaccaaaaccgtcacgtgcgccgagatcctcaagcgccgcctggcgggcctgcaccaggtcacgcggctgcgctaccggagcgtacgcgaggtgtggcagagcctcccgcctgggcccacgcagggtcagacgcctggcgagccggccgctagtctcagcgtacttaagaacgtgcccggcctcgccatcctactttccaaggacgcgctggatccgcgacagcccggctaccagcccccgaatccccatcctggtccctcgtccccgccagccgcgccagcgtccaagaggagcctaggggaacccgcagctggagaaggctccgcgaagcgatcgcaacccgagccaggggttgcggacgaggatcagacggcctgaaactccggactgtgggccacctagtccggcaggatcttccgccagcgcctccaccttcagatgtacctccagcctttcactcctcggtcctccggagcccacaacctggacacagctcctcaagacaggtagcatggaccttaaggcgacaagagaggggccccaggagtggcaggagaggatccccgaccaccctagggaaacttcgtgcgataattgctgcttatgcccgtgttgcgtgaagacacggaacttcaccttttctgggaccttctttgggggagaatggtggacagtgggattctggaaacttgtttgggacccccaagggttaaagccacccagcattcacgaagagcacctgaagtatggaagctgagaagagttattggaatcacccccaccgttgacagaggaaggcagggggtgagaattaactgcttgagggtaggagagtctgagatgtgggggccctattccgctccccgccctgggacagttttcctttctagttttctttcccctgcttcagaggagcatctctgagggttctagctcttttaacaccccttttccccctgctggcccagagggagacccaggactgaactctccaggcctcctcccctgagccctgcagctggctggagtcttgcttccaataaaacaagcacaaaaatggctgtgtcccccattttttttctaaccacccgcctgtgcagagacagctctcgcctggccccttgtgtctcccctcccctccagccttgcgtcctgagtctttggagtcttcagggtcaggcacagagactgaacagcttcaaaatggtgcaaggcactgcccagtccctggcttcttcctctctcctcccccactccgccctcccgggctggccctggcctcagaggctgttgcaaatgggggcccgtgtacccctgtacatcgccactaagggaaagggagcggcacattgtttttctgggaggggaaggaaggagtggaaggacagcatcgatgaactctcctggaggtcactgcaaagggtggcagaccctgctgaggtccctgaatctgcagcctccagacaataaactgaaccttacccagaaggctggcacaaagcccccagctctgtgggtaggatctccccttcactgccctctctctgagaaaggacagcacacccttgggaaagggggaggagagagactgagcacaaatccactgctggaaattactattcagcagagaagctgggtcttgggctgtgaatcactgcaggcctcctgataagctgctgcctccagccctgcacagctgtctgttgagagataacagcctcataagcttctctgcccaactccaagccagctggggggtgggggtgctgctgtgtgctggaagagctctggtgagttgggggtggcatacagccccaggatctcagaagcagatctcatcccatgcaactcagcagcacccctggaaagggggagatgcggaagaatgtatttataagtcattttgctggcagaaccctgaaataaatcctgctggtgacaagaga

SEQ ID NO: 176190 - DNA, 1092 bp, Homo sapiens
  Payload ID: 14593
  Gene Symbol: RPP25L
  Gene Name: ribonuclease P/MRP 25kDa subunit-like
  Uniprot ID: Q8N5L8
  ENST ID: ENST00000297613
  CDS Start-End: 282-773
gcgcgccatcttggctccggatcgtgcgtgaggcggcttcggtgagagccggaaccgggcgggcagaggggcgctcgtagggttgggggacgcctgtggcttggctgcagcggccggcaagaccctggaagagaccgtggctatggaaacggccaaggctgtcttggaatgtcctgagcagccctccgagtcgagcctctgcccccgagtttctgagtgacctgggttgatatagattgaccttgtgggcagcgagagtcacagacaagacagcaagcaggatggagcactaccggaaagctggctctgtagagctcccagcgccttccccaatgccccagctacctcctgatacccttgagatgcgggtccgagatggcagcaaaattcgcaacctgctggggttggctctgggtcggttggagggcggcagtgctcggcatgtagtgttctcaggttctggcagggctgcaggaaaggctgtcagctgcgctgagattgtcaagcggcgggtcccaggcctgcaccagctcaccaagctacgtttccttcagactgaggacagctgggtcccagcctcacctgacacagggctagaccccctcacagtgcgccgccatgtgcctgcagtgtgggtgctgctcagccgggaccccctggaccccaatgagtgtggttaccaacccccaggagcaccccctggcctgggttccatgcccagctccagctgtggccctcgttcccgaagaagggctcgagacacccgatcgtgaagacctgctgagccagcctgttctccgggcctgaatgtctggggtgcttgtgccttttctgagaagcgttgtgactgctcaacatccccatcaaggtttgagtccacaaaagtggacctccctatcatgcttccccttccctctagcatgtgggaagggactgctgtgaagaatgacagatgtggggcctctgccaagttctgcattgctaaataagggcttcctctgccttctacctacagtgcatttgaactgccttctgaaagaggtccagggagggatttaggaaataaagtttctacctatttgatgagcctct

SEQ ID NO: 176191 - DNA, 888 bp, Homo sapiens
  Payload ID: 14593
  Gene Symbol: RPP25L
  Gene Name: ribonuclease P/MRP 25kDa subunit-like
  Uniprot ID: Q8N5L8
  ENST ID: ENST00000378959
  CDS Start-End: 78-569
gcgcgccatcttggctccggatcgtgcgtgaggcggcttcgtgggcagcgagagtcacagacaagacagcaagcaggatggagcactaccggaaagctggctctgtagagctcccagcgccttccccaatgccccagctacctcctgatacccttgagatgcgggtccgagatggcagcaaaattcgcaacctgctggggttggctctgggtcggttggagggcggcagtgctcggcatgtagtgttctcaggttctggcagggctgcaggaaaggctgtcagctgcgctgagattgtcaagcggcgggtcccaggcctgcaccagctcaccaagctacgtttccttcagactgaggacagctgggtcccagcctcacctgacacagggctagaccccctcacagtgcgccgccatgtgcctgcagtgtgggtgctgctcagccgggaccccctggaccccaatgagtgtggttaccaacccccaggagcaccccctggcctgggttccatgcccagctccagctgtggccctcgttcccgaagaagggctcgagacacccgatcgtgaagacctgctgagccagcctgttctccgggcctgaatgtctggggtgcttgtgccttttctgagaagcgttgtgactgctcaacatccccatcaaggtttgagtccacaaaagtggacctccctatcatgcttccccttccctctagcatgtgggaagggactgctgtgaagaatgacagatgtggggcctctgccaagttctgcattgctaaataagggcttcctctgccttctacctacagtgcatttgaactgccttctgaaagaggtccagggagggatttaggaaataaagtttctacctatttgatgagcctct

SEQ ID NO: 176192 - DNA, 767 bp, Homo sapiens
  Payload ID: 14594
  Gene Symbol: RPP30
  Gene Name: ribonuclease P/MRP 30kDa subunit
  ENST ID: ENST00000277882
  CDS Start-End: 5-767
cagcatggcggtgtttgcagatttggacctgcgagcgggttctgacctgaaggctctgcgcggacttgtggagacagccgctcaccgtgagttgccccggcttcgcgcctggccaacctcatgccacccagaccatcgggccacactccggattggctattcagttgttgctatcaatcatatcgttgactttaaggaaaagaaacaggaaattgaaaaaccagtagctgtttctgaactcttcacaactttgccaattgtacagggaaaatcaagaccaattaaaattttaactagattaacaattattgtctcggatccatctcactgcaatgttttgagagcaacttcttcaagggcccggctctatgatgttgttgcagtttttccaaagacagaaaagctttttcatattgcttgcacacatttagatgtggatttagtctgcataactgtaacagagaaactaccattttacttcaaaagacctcctattaatgtggcgattgaccgaggcctggcttttgaacttgtctatagccctgctatcaaagactccacaatgagaaggtatacaatttccagtgccctcaatttgatgcaaatctgcaaaggaaagaatgtaattatatctagtgctgcagaaaggcctttagaaataagagggccatatgacgtggcaaatctaggcttgctgtttgggctctctgaaagtgacgccaaggctgcggtgtccaccaactgccgagcagcgcttctccatggag

SEQ ID NO: 176193 - DNA, 2589 bp, Homo sapiens
  Payload ID: 14594
  Gene Symbol: RPP30
  Gene Name: ribonuclease P/MRP 30kDa subunit
  Uniprot ID: P78346
  ENST ID: ENST00000371703
  CDS Start-End: 272-1078
ggagtattgaatagttgggaattggaacccctccagggggaaccaaacattgtcgttcagaagaagacaaagagagattgaaatgaagctgttgatttcaacacacaaattctggtggtagatgaaagcaaagcaagtaagtttctccgaatccctagtcaactggaggtagagacggactgcgcaggttaactacagctcccagcatgcctgaggggcgggctcagcggctgcgcagactggcgcgcgcggacggtcatgggacttcagcatggcggtgtttgcagatttggacctgcgagcgggttctgacctgaaggctctgcgcggacttgtggagacagccgctcaccttggctattcagttgttgctatcaatcatatcgttgactttaaggaaaagaaacaggaaattgaaaaaccagtagctgtttctgaactcttcacaactttgccaattgtacagggaaaatcaagaccaattaaaattttaactagattaacaattattgtctcggatccatctcactgcaatgttttgagagcaacttcttcaagggcccggctctatgatgttgttgcagtttttccaaagacagaaaagctttttcatattgcttgcacacatttagatgtggatttagtctgcataactgtaacagagaaactaccattttacttcaaaagacctcctattaatgtggcgattgaccgaggcctggcttttgaacttgtctatagccctgctatcaaagactccacaatgagaaggtatacaatttccagtgccctcaatttgatgcaaatctgcaaaggaaagaatgtaattatatctagtgctgcagaaaggcctttagaaataagagggccatatgacgtggcaaatctaggcttgctgtttgggctctctgaaagtgacgccaaggctgcggtgtccaccaactgccgagcagcgcttctccatggagaaactagaaaaactgcttttggaattatctctacagtgaagaaacctcggccatcagaaggagatgaagattgtcttccagcttccaagaaagccaagtgtgagggctgaaaagaatgccccagtctctgtcagcactcccttcttcccttttatagttcatcagccacaacaaaaataaaacctttgtgtgatttactgttttcatttggagctagaaatcaatagtctataaaaacagttttacttgcaatccattaaaacaacaaacgaaacctagtgaagcatctttttaaaaggctgccagcttaatgaatttagatgtactttaagagagaaagactggttatttctcctttgtgtaagtgataaacaacagcaaatatacttgaataaaatgtttcaggtatttttgtttcattttgtttttgagatagggtctttgttgctcaggctggagtacagtggcataatcacagctcactgcaacctcaatcctgggctcaagtgatcctcccgcttcagcctctcaagcagcgggaactacaggtgtgcactaccacacctggctattttttttttttttttttttttcccttgtagagacatggtctcactatgttgctgaggctggtctcaaactcctaggatcaagccatcctcccgctttggcctcctaaagtgctgggattacatgagccaccacatgcagccagatgtttgaatattttaagagcttctttcgaaagtttcttgttcatactcaaatagtagttattttgaagatattcaaacttatattgaagaagtgactttagttcctcttgttttaagcttctttcatgtattcaaatcagcatttttttctaagaaattgctatagaatttgtggaaggagagaggatacacatgtaaaattacatctggtctcttccttcactgcttcatgcctacgtaaggtctttgaaataggattccttacttttagttagaaacccctaaaacgctaatattgattttcctgatagctgtattaaaaatagcaaagcatcggactgaaccaactttggaaataatttatttttataatgggatcatgttaagtagaagtagctttttatgcaaatacatgcatttatgcaatattaatgtaagggctctaaaacaatggagtagagccagaggtataactgaataagaaatttttttaagcaagagaaagacaactgttctgcgggttggagaaaatacaatttttttttttttttttgagacagtctcgctctgtcccccaggctggagtgcagtggctcgatctctgctcactgcaagctccgcctcctgggttcatgccattctcctgcctcagcctcctgagtagctgggactacaggcgctcgccatgtatttagcagagacggggtttcaccgtgttagccaggatggtctcaatctcctgacctcatattccacccgcctcggcctcccaaagtgctgggattacaggcgttagccactgcgcccggcccgagaaaatacagttttaaaaagagaaagctttataacctcaccaatgaatacaaatgtttaaataaaatattgattaaaaaaacattaaaagt

SEQ ID NO: 176194 - DNA, 1004 bp, Homo sapiens
  Payload ID: 14594
  Gene Symbol: RPP30
  Gene Name: ribonuclease P/MRP 30kDa subunit
  Uniprot ID: P78346
  ENST ID: ENST00000413330
  CDS Start-End: 36-1004
agactggcgcgcgcggacggtcatgggacttcagcatggcggtgtttgcagatttggacctgcgagcgggttctgacctgaaggctctgcgcggacttgtggagacagccgctcaccttggctattcagttgttgctatcaatcatatcgttgactttaaggaaaagaaacaggaaattgaaaaaccagtagctgtttctgaactcttcacaactttgccaattgtacagggaaaatcaagaccaattaaaattttaactagattaacaattattgtctcggatccatctcactgcaatgttttgagagcaacttcttcaagggcccggctctatgatgttgttgcagtttttccaaagacagaaaagctttttcatattgcttgcacacatttagatgtggatttagtctgcataactgtaacagagaaactaccattttacttcaaaagacctcctattaatgtggcgattgaccgaggcctggcttttgaacttgtctatagccctgctatcaaagactccacaatgagaaggtatacaatttccagtgccctcaatttgatgcaaatctgcaaaggaaagaatgtaattatatctagtgctgcagaaaggcctttagaaataagagggccatatgacgtggcaaatctaggcttgctgtttgggctctctgaaagtgacgccaaggctgcggtgtccaccaactgccgagcagcgcttctccatggagaaactagaaaaactgcttttggaattatctctacagtgaagaaacctcggccatcagaaggagatgaagattgtcttccagcttccaagaaagccaagtggtctcactctgtcacccaggctggagtgcagtggcacaatctcggctcactgcaacctttgcctcttgggctcaagccatcctcccacctcagcctcccaagaactagaattcaacaaagacaacttttgatctctcatcagagagatcatactcccaagaacaggctttga

SEQ ID NO: 176195 - DNA, 726 bp, Homo sapiens
  Payload ID: 14594
  Gene Symbol: RPP30
  Gene Name: ribonuclease P/MRP 30kDa subunit
  ENST ID: ENST00000414836
  CDS Start-End: 1-639
gaaattgaaaaaccagtagctgtttctgaactcttcacaactttgccaattgtacagggaaaatcaagaccaattaaaattttaactagattaacaattattgtctcggatccatctcactgcaatgttttgagagcaacttcttcaagggcccggctctatgatgttgttgcagtttttccaaagacagaaaagctttttcatattgcttgcacacatttagatgtggatttagtctgcataactgtaacagagaaactaccattttacttcaaaagacctcctattaatgtggcgattgaccgaggcctggcttttgaacttgtctatagccctgctatcaaagactccacaatgagaaggtatacaatttccagtgccctcaatttgatgcaaatctgcaaaggaaagcctttagaaataagagggccatatgacgtggcaaatctaggcttgctgtttgggctctctgaaagtgacgccaaggctgcggtgtccaccaactgccgagcagcgcttctccatggagaaactagaaaaactgcttttggaattatctctacagtgaagaaacctcggccatcagaaggagatgaagattgtcttccagcttccaagaaagccaagtgtgagggctgaaaagaatgccccagtctctgtcagcactcccttcttcccttttatagttcatcagccacaacaaaaataaaacctttgtgtgattta

SEQ ID NO: 176196 - DNA, 1457 bp, Homo sapiens
  Payload ID: 14595
  Gene Symbol: RPP38
  Gene Name: ribonuclease P/MRP 38kDa subunit
  Uniprot ID: P78345
  ENST ID: ENST00000378197
  CDS Start-End: 515-1366
accacggattcgccatcgtgagttccaggtgggcgcgcggggcccacgtagggcaggaggccagccccggggggatcgggcccgggactctgcggaatctggaggccgaagcccgcgcgcacgcagggtctctgctgcttccccaacgcctgttgcgtggccgcaggacccgccgccctcccggttgggccgcccagtcccgggccgggcgcgtgcacccagagcttccgcgtttctagtccggctcctctgctggattgcagcgccggctgggcaccaggagtacaaagcgaaaacccccgccggcccttctgttctccacggtctccaaggagacacggacaacagaacaacacttccgtgtgctaaatagtaaagcaccaagacagggtcagatgtgttactgggctggagtgtggtggcacaatcacgctcactgcatccttgacctcctgggctcaagtgatcttcccacctcagcctcccaagtagctgggactacaggattttcaaaatggctgcagctcctcaagcaccggggcggggatctctccgtaagacgagacctctggttgtgaagacgtcgttgaacaacccatacatcatccgctggagcgctctggagagcgaggatatgcacttcatcctacagacgcttgaggacaggcttaaagctattggacttcagaagattgaagataagaagaaaaagaacaaaacaccttttctgaaaaaagaaagcagagagaaatgcagcattgctgttgatattagtgagaatctgaaggagaagaaaacagatgctaagcagcaagtgtcagggtggacgcctgcacacgtcaggaagcagcttgccattggcgttaacgaagttaccagagccctggaaaggagggaactgctgttagttctggtgtgtaaatcagtcaagcctgccatgatcacctcacacttgattcagttaagcctaagcagaagtgtccctgcctgtcaggtcccccggctcagtgagagaatcgcccccgtcattggcttaaaatgtgttctagccttggcgttcaaaaagaacaccactgactttgtggacgaagtaagagccatcatccccagagtccccagtttaagtgtaccatggcttcaagacagaattgaagattctggggaaaatttagagactgaacctctggaaagccaagacagagagcttttggacacttcatttgaagatctgtcaaaacctaagagaaagcttgctgacggtcggcaggcttctgtaacattacaaccccttaaaataaagaaactgattccaaaccctaataagataaggaaaccacccaaaagtaaaaaagctactccaaagtaatcttgcataaacttgtcatgtcatacagtttgtgaaaggacaccttgtaaagaagccttgaaactaataaaatgagttatacttacataga

SEQ ID NO: 176197 - DNA, 833 bp, Homo sapiens
  Payload ID: 14595
  Gene Symbol: RPP38
  Gene Name: ribonuclease P/MRP 38kDa subunit
  ENST ID: ENST00000378201
  CDS Start-End: 325-762
ggccgctttcccctctccggagtgacctaacacaggataacgaaacctgcactgctccgagcgcttcctccccggcccgtcgcgtctgcgaggcgaggccgggaggcgagggctctgcgcacgcgcggcgcaggcgcactgggcgccggtgctgttgccttcaggtgaccacggattcgccatcgtgagttccagacagggtcagatgtgttactgggctggagtgtggtggcacaatcacgctcactgcatccttgacctcctgggctcaagtgatcttcccacctcagcctcccaagtagctgggactacaggattttcaaaatggctgcagctcctcaagcaccggggcggggatctctccgtaagacgagacctctggttgtgaagacgtcgttgaacaacccatacatcatccgctggagcgctctggagagcgaggatatgcacttcatcctacagacgcttgaggacaggcttaaagctattggacttcagaagattgaagataagaagaaaaagaacaaaacaccttttctgaaaaaagaaagcagagagaaatgcagcattgctgttgatattagtgagaatctgaaggagaagaaaacagatgctaagcagcaagtgtcagggtggacgcctgcacacgtcaggaagcagcttgccattggcgttaacgaagttaccagagccctggaaaggagggaactgctgttagttctgtttcactcttgttgtccaggctggagtgcagtggtgtgatcccggctcactgcaaccccgcctcctgggttcaagcgattctcctgcctcagcctcctgaatagctggga

SEQ ID NO: 176198 - DNA, 1030 bp, Homo sapiens
  Payload ID: 14595
  Gene Symbol: RPP38
  Gene Name: ribonuclease P/MRP 38kDa subunit
  Uniprot ID: P78345
  ENST ID: ENST00000378202
  CDS Start-End: 90-941
gcgcacgcgcggcgcaggcgcactgggcgccggtgctgttgccttcaggtgaccacggattcgccatcgtgagttccaggattttcaaaatggctgcagctcctcaagcaccggggcggggatctctccgtaagacgagacctctggttgtgaagacgtcgttgaacaacccatacatcatccgctggagcgctctggagagcgaggatatgcacttcatcctacagacgcttgaggacaggcttaaagctattggacttcagaagattgaagataagaagaaaaagaacaaaacaccttttctgaaaaaagaaagcagagagaaatgcagcattgctgttgatattagtgagaatctgaaggagaagaaaacagatgctaagcagcaagtgtcagggtggacgcctgcacacgtcaggaagcagcttgccattggcgttaacgaagttaccagagccctggaaaggagggaactgctgttagttctggtgtgtaaatcagtcaagcctgccatgatcacctcacacttgattcagttaagcctaagcagaagtgtccctgcctgtcaggtcccccggctcagtgagagaatcgcccccgtcattggcttaaaatgtgttctagccttggcgttcaaaaagaacaccactgactttgtggacgaagtaagagccatcatccccagagtccccagtttaagtgtaccatggcttcaagacagaattgaagattctggggaaaatttagagactgaacctctggaaagccaagacagagagcttttggacacttcatttgaagatctgtcaaaacctaagagaaagcttgctgacggtcggcaggcttctgtaacattacaaccccttaaaataaagaaactgattccaaaccctaataagataaggaaaccacccaaaagtaaaaaagctactccaaagtaatcttgcataaacttgtcatgtcatacagtttgtgaaaggacaccttgtaaagaagccttgaaactaataaaatgagttatacttacata

SEQ ID NO: 176199 - DNA, 1296 bp, Homo sapiens
  Payload ID: 14595
  Gene Symbol: RPP38
  Gene Name: ribonuclease P/MRP 38kDa subunit
  Uniprot ID: P78345
  ENST ID: ENST00000378203
  CDS Start-End: 360-1211
ctcgttgtgtcgtttccgggtcgcgcgacgctgtgggccgctttcccctctccggagtgacctaacacaggataacgaaacctgcactgctccgagcgcttcctccccggcccgtcgcgtctgcgaggcgaggccgggaggcgagggctctgcgcacgcgcggcgcaggcgcactgggcgccggtgctgttgccttcaggtgaccacggattcgccatcgtgagttccagacagggtcagatgtgttactgggctggagtgtggtggcacaatcacgctcactgcatccttgacctcctgggctcaagtgatcttcccacctcagcctcccaagtagctgggactacaggattttcaaaatggctgcagctcctcaagcaccggggcggggatctctccgtaagacgagacctctggttgtgaagacgtcgttgaacaacccatacatcatccgctggagcgctctggagagcgaggatatgcacttcatcctacagacgcttgaggacaggcttaaagctattggacttcagaagattgaagataagaagaaaaagaacaaaacaccttttctgaaaaaagaaagcagagagaaatgcagcattgctgttgatattagtgagaatctgaaggagaagaaaacagatgctaagcagcaagtgtcagggtggacgcctgcacacgtcaggaagcagcttgccattggcgttaacgaagttaccagagccctggaaaggagggaactgctgttagttctggtgtgtaaatcagtcaagcctgccatgatcacctcacacttgattcagttaagcctaagcagaagtgtccctgcctgtcaggtcccccggctcagtgagagaatcgcccccgtcattggcttaaaatgtgttctagccttggcgttcaaaaagaacaccactgactttgtggacgaagtaagagccatcatccccagagtccccagtttaagtgtaccatggcttcaagacagaattgaagattctggggaaaatttagagactgaacctctggaaagccaagacagagagcttttggacacttcatttgaagatctgtcaaaacctaagagaaagcttgctgacggtcggcaggcttctgtaacattacaaccccttaaaataaagaaactgattccaaaccctaataagataaggaaaccacccaaaagtaaaaaagctactccaaagtaatcttgcataaacttgtcatgtcatacagtttgtgaaaggacaccttgtaaagaagccttgaaactaataaaatgagttatactta

SEQ ID NO: 176200 - DNA, 863 bp, Homo sapiens
  Payload ID: 14595
  Gene Symbol: RPP38
  Gene Name: ribonuclease P/MRP 38kDa subunit
  ENST ID: ENST00000441850
  CDS Start-End: 358-863
ggggcccacgtagggcaggaggccagccccggggggatcgggcccgggactctgcggaatctggaggccgaagcccgcgcgcacgcagggtctctgctgcttccccaacgcctgttgcgtggccgcaggacccgccgccctcccggttgggccgcccagtcccgggccgggcgcgtgcacccagagcttccgcgtttctagtccggctcctctgctggattgcagcgccggctgggcaccaggagtacaaagcgaaaacccccgccggcccttctgttctccacggtctccaaggagacacggacaacagaacaacacttccgtgtgctaaatagtaaagcaccaaggattttcaaaatggctgcagctcctcaagcaccggggcggggatctctccgtaagacgagacctctggttgtgaagacgtcgttgaacaacccatacatcatccgctggagcgctctggagagcgaggatatgcacttcatcctacagacgcttgaggacaggcttaaagctattggacttcagaagattgaagataagaagaaaaagaacaaaacaccttttctgaaaaaagaaagcagagagaaatgcagcattgctgttgatattagtgagaatctgaaggagaagaaaacagatgctaagcagcaagtgtcagggtggacgcctgcacacgtcaggaagcagcttgccattggcgttaacgaagttaccagagccctggaaaggagggaactgctgttagttctggtgtgtaaatcagtcaagcctgccatgatcacctcacacttgattcagttaagcctaagcagaagtgtccctgcctgtcaggtcccccggctcagtgagagaatcgc

SEQ ID NO: 176201 - DNA, 1537 bp, Homo sapiens
  Payload ID: 14595
  Gene Symbol: RPP38
  Gene Name: ribonuclease P/MRP 38kDa subunit
  Uniprot ID: P78345
  ENST ID: ENST00000616640
  CDS Start-End: 598-1449
ctcgttgtgtcgtttccgggtcgcgcgacgctgtgggccgctttcccctctccggagtgacctaacacaggataacgaaacctgcactgctccgagcgcttcctccccggcccgtcgcgtctgcgaggcgaggccgggaggcgagggctctgcgcacgcgcggcgcaggcgcactgggcgccggtgctgttgccttcaggtgaccacggattcgccatcgtgagttccaggtgggcgcgcggggcccacgtagggcaggaggccagccccggggggatcgggcccgggactctgcggaatctggaggccgaagcccgcgcgcacgcagggtctctgctgcttccccaacgcctgttgcgtggccgcaggacccgccgccctcccggttgggccgcccagtcccgggccgggcgcgtgcacccagagcttccgcgtttctagtccggctcctctgctggattgcagcgccggctgggcaccaggagtacaaagcgaaaacccccgccggcccttctgttctccacggtctccaaggagacacggacaacagaacaacacttccgtgtgctaaatagtaaagcaccaaggattttcaaaatggctgcagctcctcaagcaccggggcggggatctctccgtaagacgagacctctggttgtgaagacgtcgttgaacaacccatacatcatccgctggagcgctctggagagcgaggatatgcacttcatcctacagacgcttgaggacaggcttaaagctattggacttcagaagattgaagataagaagaaaaagaacaaaacaccttttctgaaaaaagaaagcagagagaaatgcagcattgctgttgatattagtgagaatctgaaggagaagaaaacagatgctaagcagcaagtgtcagggtggacgcctgcacacgtcaggaagcagcttgccattggcgttaacgaagttaccagagccctggaaaggagggaactgctgttagttctggtgtgtaaatcagtcaagcctgccatgatcacctcacacttgattcagttaagcctaagcagaagtgtccctgcctgtcaggtcccccggctcagtgagagaatcgcccccgtcattggcttaaaatgtgttctagccttggcgttcaaaaagaacaccactgactttgtggacgaagtaagagccatcatccccagagtccccagtttaagtgtaccatggcttcaagacagaattgaagattctggggaaaatttagagactgaacctctggaaagccaagacagagagcttttggacacttcatttgaagatctgtcaaaacctaagagaaagcttgctgacggtcggcaggcttctgtaacattacaaccccttaaaataaagaaactgattccaaaccctaataagataaggaaaccacccaaaagtaaaaaagctactccaaagtaatcttgcataaacttgtcatgtcatacagtttgtgaaaggacaccttgtaaagaagccttgaaactaataaaatgagttatacttacat

SEQ ID NO: 176202 - DNA, 1088 bp, Homo sapiens
  Payload ID: 14596
  Gene Symbol: RPP40
  Gene Name: ribonuclease P/MRP 40kDa subunit
  Uniprot ID: O75818
  ENST ID: ENST00000319533
  CDS Start-End: 35-1057
gcggaggccgggaggaccaggaacccaggagagcatggccacgctgcgccggcttcgggaggcgccgcggcacttactggtttgcgagaaatccaacttcggcaaccacaagtcgcgccaccggcatcttgtgcagacgcactactataactacagggtttcatttctcattcctgaatgtgggatactatcggaagaactgaaaaacctggtcatgaacactggaccctattactttgtgaagaatttacctcttcatgaattaattacacctgaattcatcagtacctttataaagaaagggaaattaattttgtcactggataaagacacttatgaagaaactggacttcagggtcatccatctcagttttctggcagaaaaattatgaaatttattgtttccattgatttgatggaattatccttaaacttggattctaagaagtatgaaagaatatcttggtctttcaaagaaaagaagccattgaaatttgattttcttttggcttggcataaaacaggttcagaagaatcgacaatgatgtcatatttttccaagtaccaaattcaggagcatcagccaaaagtagcactgagcacgttgagagatctccagtgcccagtgctgcagagcagcgagctggagggaacgccagaggtgtcctgccgggctctggagctcttcgactggctcggcgccgtcttcagtaatgtcgacctaaataatgagcctaataatttcatatcaacctattgctgtcctgagccaagcacagtggtggcaaaagcttatttgtgtacaatcactggcttcatacttccagagaagatctgtctcctattggaacatctctgtcactactttgatgaaccgaagttagctccatgggttacactgtccgttcaaggctttgcagacagccctgtttcttgggaaaaaaatgaacatggttttcgaaaaggaggagaacatttatataactttgtgatttttaataatcaggactattggcttcagatggctgttggggcaaatgatcactgtccaccataaaaaataaaaattaaaaatcgtgtttacttac

SEQ ID NO: 176203 - DNA, 1483 bp, Homo sapiens
  Payload ID: 14596
  Gene Symbol: RPP40
  Gene Name: ribonuclease P/MRP 40kDa subunit
  Uniprot ID: O75818
  ENST ID: ENST00000380051
  CDS Start-End: 46-1137
gtgccccgccagcggaggccgggaggaccaggaacccaggagagcatggccacgctgcgccggcttcgggaggcgccgcggcacttactggtttgcgagaaatccaacttcggcaaccacaagtcgcgccaccggcatcttgtgcagacgcactactataactacagggtttcatttctcattcctgaatgtgggatactatcggaagaactgaaaaacctggtcatgaacactggaccctattactttgtgaagaatttacctcttcatgaattaattacacctgaattcatcagtacctttataaagaaaggttcttgctatgcactaacatacaatacacatattgatgaagataatactgttgccctgctaccaaatgggaaattaattttgtcactggataaagacacttatgaagaaactggacttcagggtcatccatctcagttttctggcagaaaaattatgaaatttattgtttccattgatttgatggaattatccttaaacttggattctaagaagtatgaaagaatatcttggtctttcaaagaaaagaagccattgaaatttgattttcttttggcttggcataaaacaggttcagaagaatcgacaatgatgtcatatttttccaagtaccaaattcaggagcatcagccaaaagtagcactgagcacgttgagagatctccagtgcccagtgctgcagagcagcgagctggagggaacgccagaggtgtcctgccgggctctggagctcttcgactggctcggcgccgtcttcagtaatgtcgacctaaataatgagcctaataatttcatatcaacctattgctgtcctgagccaagcacagtggtggcaaaagcttatttgtgtacaatcactggcttcatacttccagagaagatctgtctcctattggaacatctctgtcactactttgatgaaccgaagttagctccatgggttacactgtccgttcaaggctttgcagacagccctgtttcttgggaaaaaaatgaacatggttttcgaaaaggaggagaacatttatataactttgtgatttttaataatcaggactattggcttcagatggctgttggggcaaatgatcactgtccaccataaaaaataaaaattaaaaatcgtgtttacttacatttacgcttgctttcagatttcttaatggtaaaaggtctgtgtgtccactcaggcttgtgtgatggtgacatttctcagatcagcatttgctggcatcctgccctgcacctgagacccatctgtgatggcagcaaggcctgctgtccagtgaatagctcatagttgatttctctctgtcaacataagcacagggttgtgggttactatgtggtacactgggccaggatgtccagggaccggggatattggtccccatctcactccattggttgagatatattttgttcattacaactttttcagataataaaaa

SEQ ID NO: 176204 - DNA, 500 bp, Homo sapiens
  Payload ID: 14596
  Gene Symbol: RPP40
  Gene Name: ribonuclease P/MRP 40kDa subunit
  ENST ID: ENST00000479782
  CDS Start-End: 17-358
aggaacccaggagagcatggccacgctgcgccggcttcgggaggcgccgcggcacttactggtttgcgagaaatccaacttcggcaaccacaagtcgcgccaccggcatcttgtgcagacgcactactataactacagggtttcatttctcattcctgaatgtgggatactatcggaagaactgaaaaacctggtcatgaacactggaccctattactttgtgaagaatttacctcttcatgaattaattacacctgaattcatcagtacctttataaagaaagaattctactttggacccctctccgcgcatccccaaaggttcttgctatgcactaacatacaatacacatattgatgaagataatactgttgccctgctaccaaatgggaaattaattttgtcactggataaagacacttatgaagaaactggacttcagggtcatccatctcagttttctggcagaaaaattatgaaatttattgtttccattgat

SEQ ID NO: 176205 - DNA, 1042 bp, Homo sapiens
  Payload ID: 14596
  Gene Symbol: RPP40
  Gene Name: ribonuclease P/MRP 40kDa subunit
  ENST ID: ENST00000464646
  CDS Start-End: 131-1042
ggtacccagtctggagggagctgttgtcaggggcgttctggctgctcactcgtgtcaacccgccgaactgggagtttcatttctcattcctgaatgtgggatactatcggaagaactgaaaaacctggtcatgaacactggaccctattactttgtgaagaatttacctcttcatgaattaattacacctgaattcatcagtacctttataaagaaaggttcttgctatgcactaacatacaatacacatattgatgaagataatactgttgccctgctaccaaatgggaaattaattttgtcactggataaagacacttatgaagaaactggacttcagggtcatccatctcagttttctggcagaaaaattatgaaatttattgtttccattgatttgatggaattatccttaaacttggattctaagaagtatgaaagaatatcttggtctttcaaagaaaagaagccattgaaatttgattttcttttggcttggcataaaacaggttcagaagaatcgacaatgatgtcatatttttccaagtaccaaattcaggagcatcagccaaaagtagcactgagcacgttgagagatctccagtgcccagtgctgcagagcagcgagctggagggaacgccagaggtgtcctgccgggctctggagctcttcgactggctcggcgccgtcttcagtaatgtcgacctaaataatgagcctaataatttcatatcaacctattgctgtcctgagccaagcacagtggtggcaaaagcttatttgtgtacaatcactggcttcatacttccagagaagatctgtctcctattggaacatctctgtcactactttgatgaaccgaagttagctccatgggttacactgtccgttcaaggctttgcagacagccctgtttcttgggaaaaaaatgaacatggttttcgaaaaggaggagaacatttatataactttgtgatttttaataatcaggactattggcttcagatggctgttggggcaaatgatcactgtccaccataa

SEQ ID NO: 176206 - DNA, 1056 bp, Homo sapiens
  Payload ID: 14596
  Gene Symbol: RPP40
  Gene Name: ribonuclease P/MRP 40kDa subunit
  ENST ID: ENST00000618533
  CDS Start-End: 62-1027
gaggaaggggcggggcgtgccccgccagcggaggccgggaggaccaggaacccaggagagcatggccacgctgcgccggcttcgggaggcgccgcggcacttactggtttgcgagaaatccaacttcggcaaccacaagtcgcgccaccggcatcttgtgcagacgcactactataactacagggtttcatttctcattcctgaatgtgggatactatcggaagaactgaaaaacctggtcatgaacactggaccctattactttgtgaagaatttacctcttcatgaattaattacacctgaattcatcagtacctttataaagaaaggttcttgctatgcactaacatacaatacacatattgatgaagataatactgttgccctgctaccaaatgggaaattaattttgtcactggataaagacacttatgaagaaactggacttcagggtcatccatctcagttttctggcagaaaaattatgaaatttagttcagaagaatcgacaatgatgtcatatttttccaagtaccaaattcaggagcatcagccaaaagtagcactgagcacgttgagagatctccagtgcccagtgctgcagagcagcgagctggagggaacgccagaggtgtcctgccgggctctggagctcttcgactggctcggcgccgtcttcagtaatgtcgacctaaataatgagcctaataatttcatatcaacctattgctgtcctgagccaagcacagtggtggcaaaagcttatttgtgtacaatcactggcttcatacttccagagaagatctgtctcctattggaacatctctgtcactactttgatgaaccgaagttagctccatgggttacactgtccgttcaaggctttgcagacagccctgtttcttgggaaaaaaatgaacatggttttcgaaaaggaggagaacatttatataactttgtgatttttaataatcaggactattggcttcagatggctgttggggcaaatgatcactgtccaccataaaaaataaaaattaaaaatcgtgtttactt

SEQ ID NO: 176207 - DNA, 1220 bp, Homo sapiens
  Payload ID: 14597
  Gene Symbol: RNASET2
  Gene Name: ribonuclease T2
  ENST ID: ENST00000028008
  CDS Start-End: 403-618
ctccggtgcaggcccgcagggcgccctgggctgggagcaacgcgactgaccgtggtcgtgggcggacggcggctgcagcgtggaggagctggggtcgctgtgggtcgcgaagcagagcccgggacgtgcgcgcttggtgcacgatcctgaaggggagctccgaggggcccgggtcgccagggctgctgcggccattcccggagcccggcgcggggcccgcgagatactggtttaggccgtcccagggctccgggcgcacccggtggccgctgctgcagcggagggagcgcggcggcgcgggggctcggagacagcgtttctcccggaagtcttcctcgggcagcaggtgggaagtgggagccggagcggcagctggcagcgttctctccgcaggtcggcaccatgcgccctgcagccctgcgcggggccctgctgggctgcctctgcctggcgttgctttgcctgggcggtgcggacaagcgcctgcgtgacaaccatgagtggaaaaaactaattatggttcagcactggcctgagacagtatgcgagaaaattcaaaacgactgtagagaccctccggattactggacaatacatggactatggcaagcccgataaaagtgaaggatgtaatagatcgtggcccttcaatttagaagagattaaggatcttttgccagaaatgagggcatactggcctgacgtaattcactcgtttcccaatcgcagccgcttctggaagcatgagtgggaaaagcatgggacctgcgccgcccaggtggatgcgctcaactcccagaagaagtactttggcagaagcctggaactctacagggagctggacctcaacagtgtgcttctaaaattggggataaaaccatccatcaattactaccaagttgcagattttaaagatgcccttgccagagtatatggagtgatacccaaaatccagtgccttccaccaagccaggatgaggaagtacagacaattggtcagatagaactgtgcctcactaagcaagaccagcagctgcaaaactgcaccgagccgggggagcagccgtcccccaagcaggaagtctggctggcaaatggggccgccgagagccggggtctgagagtctgtgaagatggcccagtcttctatcccccacctaaaaagaccaagcattgatgcccaagttttggaaatattctgttttaaaaagcaagagaaa

SEQ ID NO: 176208 - DNA, 1924 bp, Homo sapiens
  Payload ID: 14597
  Gene Symbol: RNASET2
  Gene Name: ribonuclease T2
  Uniprot ID: O00584
  ENST ID: ENST00000421787
  CDS Start-End: 362-727
gcgactgaccgtggtcgtgggcggacggcggctgcagcgtggaggagctggggtcgctgtgggtcgcgaagcagagcccgggacgtgcgcgcttggtgcacgatcctgaaggggagctccgaggggcccgggtcgccagggctgctgcggccattcccggagcccggcgcggggcccgcgagatactggtttaggccgtcccagggctccgggcgcacccggtggccgctgctgcagcggagggagcgcggcggcgcgggggctcggagacagcgtttctcccggaagtcttcctcgggcagcaggtgggaagtgggagccggagcggcagctggcagcgttctctccgcaggtcggcaccatgcgccctgcagccctgcgcggggccctgctgggctgcctctgcctggcgttgctttgcctgggcggtgcggacaagcgcctgcgtgacaaccatgagtggaaaaaactaattatggttcagcactggcctgagacagtatgcgagaaaattcaaaacgactgtagagaccctccggattactggacaatacatggactatggcccgataaaagtgaaggatgtaatagatcgtggcccttcaatttagaagagattaagaaaaattggatggagattacagacagttcactcccttccccctcaactctcccaatcattaacatcttctatagtgtgttacatttgttacaattaatgaactgatactgatactttattattaaataaagtttagcattaacattagggtttactcctgtgttgtgcggctttggacaaatgcaggagagcaagtcccacccagtgtgctctggagcagccgctggccctaaaccccctgagccatacctccccttcttcctccccttgaacccccaagcaaccgcgaatctcattcctgtctcttaagactaccttttccaaattgtcacgtcgttggaatcatacagtatgtagcctctgcagactggcttcttgcacttagcaatgtatgtttgcagttcctccagtgtcttttcatgactcgacggctcattggtttttgttgctgaaaatattccattgtttggatgtacactttatcccttcacctataacagcttgtattttcgtgtgcagttttatgattactcaaattgcacttgtagatatatcttaacaaacacttcatacaaaataagcataggattattttattcaccaaagtattgttaattagcagagctcaattctttggtgtcagtttatcaaatttaccttctaggttttgagtttattattaagaacctgcgtagacttattttattttttaatgcataggatcttttgccagaaatgagggcatactggcctgacgtaattcactcgtttcccaatcgcagccgcttctggaagcatgagtgggaaaagcatgggacctgcgccgcccaggtggatgcgctcaactcccagaagaagtactttggcagaagcctggaactctacagggagctggacctcaacagtgtgcttctaaaattggggataaaaccatccatcaattactaccaagttgcagattttaaagatgcccttgccagagtatatggagtgatacccaaaatccagtgccttccaccaagccaggatgaggaagtacagacaattggtcagatagaactgtgcctcactaagcaagaccagcagctgcaaaactgcaccgagccgggggagcagccgtcccccaagcaggaagtctggctggcaaatggggccgccgagagccggggtctgagagtctgtgaagatggcccagtcttctatcccccacctaaaaagaccaagcattgatgcccaagttttggaaatattctgttttaaaaagcaagagaaattcacaaactgcagctttctaaaaaacaa

SEQ ID NO: 176209 - DNA, 887 bp, Homo sapiens
  Payload ID: 14597
  Gene Symbol: RNASET2
  Gene Name: ribonuclease T2
  Uniprot ID: O00584
  ENST ID: ENST00000476238
  CDS Start-End: 69-839
ttggtgctcccagcacctagcaccgggagactggagaggtttccaggagagtgacccgagtcggcaccatgcgccctgcagccctgcgcggggccctgctgggctgcctctgcctggcgttgctttgcctgggcggtgcggacaagcgcctgcgtgacaaccatgagtggaaaaaactaattatggttcagcactggcctgagacagtatgcgagaaaattcaaaacgactgtagagaccctccggattactggacaatacatggactatggcccgataaaagtgaaggatgtaatagatcgtggcccttcaatttagaagagattaaggatcttttgccagaaatgagggcatactggcctgacgtaattcactcgtttcccaatcgcagccgcttctggaagcatgagtgggaaaagcatgggacctgcgccgcccaggtggatgcgctcaactcccagaagaagtactttggcagaagcctggaactctacagggagctggacctcaacagtgtgcttctaaaattggggataaaaccatccatcaattactaccaagttgcagattttaaagatgcccttgccagagtatatggagtgatacccaaaatccagtgccttccaccaagccaggatgaggaagtacagacaattggtcagatagaactgtgcctcactaagcaagaccagcagctgcaaaactgcaccgagccgggggagcagccgtcccccaagcaggaagtctggctggcaaatggggccgccgagagccggggtctgagagtctgtgaagatggcccagtcttctatcccccacctaaaaagaccaagcattgatgcccaagttttggaaatattctgttttaaaaagcaagagaaattcac

SEQ ID NO: 176210 - DNA, 1417 bp, Homo sapiens
  Payload ID: 14597
  Gene Symbol: RNASET2
  Gene Name: ribonuclease T2
  ENST ID: ENST00000366855
  CDS Start-End: 677-1333
gtgccgtcctgggggcgtggctctctgctccggtgcaggcccgcagggcgccctgggctgggagcaacgcgactgaccgtggtcgtgggcggacggcggctgcagcgtggaggagctggggtcgctgtgggtcgcgaagcagagcccgggacgtgcgcgcttggtgcacgatcctgaaggggagctccgaggggcccgggtcgccagggctgctgcggccattcccggagcccggcgcggggcccgcgagatactggtttaggccgtcccagggctccgggcgcacccggtggccgctgctgcagcggagggagcgcggcggcgcgggggctcggagacagcgtttctcccggaagtcttcctcgggcagcaggtgggaagtgggagccggagcggcagctggcagcgttctctccgcaggtcggcaccatgcgccctgcagccctgcgcggggccctgctgggctgcctctgcctggcgttgctttgcctgggcggtgcggacaagcgcctgcgactgctcccagcctaggacgcgacaaagcaggtggcaggcttggtggagcactgttcctgcactcgaagttctctcagaggtcgaagaagtcgtggaggggacacttaatttcagctttcactgcggcgggtgtgacaaccatgagtggaaaaaactaattatggttcagcactggcctgagacagtatgcgagaaaattcaaaacgactgtagagaccctccggattactggacaatacatggactatggcccgataaaagtgaaggatgtaatagatcgtggcccttcaatttagaagagattaaggatcttttgccagaaatgagggcatactggcctgacgtaattcactcgtttcccaatcgcagccgcttctggaagcatgagtgggaaaagcatgggacctgcgccgcccaggtggatgcgctcaactcccagaagaagtactttggcagaagcctggaactctacagggagctggacctcaacagtgtgcttctaaaattggggataaaaccatccatcaattactaccaagttgcagattttaaagatgcccttgccagagtatatggagtgatacccaaaatccagtgccttccaccaagccaggatgaggaagtacagacaattggtcagatagaactgtgcctcactaagcaagaccagcagctgcaaaactgcaccgagccgggggagcagccgtcccccaagcaggaagtctggctggcaaatggggccgccgagagccggggtctgagagtctgtgaagatggcccagtcttctatcccccacctaaaaagaccaagcattgatgcccaagttttggaaatattctgttttaaaaagcaagagaaattcacaaactgcagctttctaaaaaacaactccaaagtgaa

SEQ ID NO: 176211 - DNA, 963 bp, Homo sapiens
  Payload ID: 14597
  Gene Symbol: RNASET2
  Gene Name: ribonuclease T2
  ENST ID: ENST00000478180
  CDS Start-End: 203-963
caggagagtgacccgagtaggtcccctcctaattctggagccgtccctcgggctgcgcagtggagcgccgaggtggcgggaggctgcggggagcctgggcggccaagcaccatctgcagtcaggagctcccgggcagcttgcagggcgcagtttttgaaagcgggtgctgcgtgcggaccgcgggcctgcagggtcggcaccatgcgccctgcagccctgcgcggggccctgctgggctgcctctgcctggcgttgctttgcctgggcggtgcggacaagcgcctgcgtgacaaccatgagtggaaaaaactaattatggttcagcactggcctgagacagtatgcgagaaaattcaaaacgactgtagagaccctccggattactggacaatacatggactatggcccgataaaagtgaaggatgtaatagatcgtggcccttcaatttagaagagattaaggatcttttgccagaaatgagggcatactggcctgacgtaattcactcgtttcccaatcgcagccgcttctggaagcatgagtgggaaaagcatgggacctgcgccgcccaggtggatgcgctcaactcccagaagaagtactttggcagaagcctggaactctacagggagctggacctcaacagtgtgcttctaaaattggggataaaaccatccatcaattactaccaagttgcagattttaaagatgcccttgccagagtatatggagtgatacccaaaatccagtgccttccaccaagccaggatgaggaagtacagacaattggtcagatagaactgtgcctcactaagcaagaccagcagctgcaaaactgcaccgagccgggggagcagccgtcccccaagcaggaagtctggctggcaaatggggccgccgagagccggggtctgagagtctgtgaagatggcccagtcttctatcccccacctaaaaagac

SEQ ID NO: 176212 - DNA, 1375 bp, Homo sapiens
  Payload ID: 14597
  Gene Symbol: RNASET2
  Gene Name: ribonuclease T2
  Uniprot ID: O00584
  ENST ID: ENST00000508775
  CDS Start-End: 521-1291
ctgcctcggcctctctgagccaaccacggggcggggcgtgaacgccgggcggggacgtgccgttctggggggcgtgtccaccggcgggggcgtgccgtcctgggggcgtggctctctgctccggtgcaggcccgcagggcgccctgggctgggagcaacgcgactgaccgtggtcgtgggcggacggcggctgcagcgtggaggagctggggtcgctgtgggtcgcgaagcagagcccgggacgtgcgcgcttggtgcacgatcctgaaggggagctccgaggggcccgggtcgccagggctgctgcggccattcccggagcccggcgcggggcccgcgagatactggtttaggccgtcccagggctccgggcgcacccggtggccgctgctgcagcggagggagcgcggcggcgcgggggctcggagacagcgtttctcccggaagtcttcctcgggcagcaggtgggaagtgggagccggagcggcagctggcagcgttctctccgcaggtcggcaccatgcgccctgcagccctgcgcggggccctgctgggctgcctctgcctggcgttgctttgcctgggcggtgcggacaagcgcctgcgtgacaaccatgagtggaaaaaactaattatggttcagcactggcctgagacagtatgcgagaaaattcaaaacgactgtagagaccctccggattactggacaatacatggactatggcccgataaaagtgaaggatgtaatagatcgtggcccttcaatttagaagagattaaggatcttttgccagaaatgagggcatactggcctgacgtaattcactcgtttcccaatcgcagccgcttctggaagcatgagtgggaaaagcatgggacctgcgccgcccaggtggatgcgctcaactcccagaagaagtactttggcagaagcctggaactctacagggagctggacctcaacagtgtgcttctaaaattggggataaaaccatccatcaattactaccaagttgcagattttaaagatgcccttgccagagtatatggagtgatacccaaaatccagtgccttccaccaagccaggatgaggaagtacagacaattggtcagatagaactgtgcctcactaagcaagaccagcagctgcaaaactgcaccgagccgggggagcagccgtcccccaagcaggaagtctggctggcaaatggggccgccgagagccggggtctgagagtctgtgaagatggcccagtcttctatcccccacctaaaaagaccaagcattgatgcccaagttttggaaatattctgttttaaaaagcaagagaaattcacaaactgcagctttctaaaaaacaactccaaagtgaa

SEQ ID NO: 176213 - DNA, 1124 bp, Homo sapiens
  Payload ID: 14597
  Gene Symbol: RNASET2
  Gene Name: ribonuclease T2
  ENST ID: ENST00000611959
  CDS Start-End: 408-1124
ctctgctccggtgcaggcccgcagggcgccctgggctgggagcaacgcgactgaccgtggtcgtgggcggacggcggctgcagcgtggaggagctggggtcgctgtgggtcgcgaagcagagcccgggacgtgcgcgcttggtgcacgatcctgaaggggagctccgaggggcccgggtcgccagggctgctgcggccattcccggagcccggcgcggggcccgcgagatactggtttaggccgtcccagggctccgggcgcacccggtggccgctgctgcagcggagggagcgcggcggcgcgggggctcggagacagcgtttctcccggaagtcttcctcgggcagcaggtgggaagtgggagccggagcggcagctggcagcgttctctccgcaggtcggcaccatgcgccctgcagccctgcgcggggccctgctgggctgcctctgcctggcgttgctttgcctgggcggtgcggacaagcgcctgcgtgacaaccatgagtggaaaaaactaattatggttcagcactggcctgagacagtatgcgagaaaattcaaaacgactgtagagaccctccggattactggacaatacatggactatggcccgataaaagtgaaggatgtaatagatcgtggcccttcaatttagaagagattaagaaaaattggatggagattacagacagttcactcccttcccccagcatgggacctgcgccgcccaggtggatgcgctcaactcccagaagaagtactttggcagaagcctggaactctacagggagctggacctcaacaggtgggtgcgcccttcccccggctgcacttcccagtggggatctctgctgtcgcccaagcctgacagctggatccaggggagtgggtgtagacctcactgccctccagcagcttctgcatgtgcactattcggctactgggatcattcctgaggaatgttctgagcctaccaagcctttccagatcattctacatcacgatcacacagagtgggtgcagagtattgggatgcccatctggaccatctcatcatcagagtcggccatagggaaaacgaggactcaaccagcatgtgccgttctcagccatgattcctga

SEQ ID NO: 176214 - DNA, 1391 bp, Homo sapiens
  Payload ID: 14597
  Gene Symbol: RNASET2
  Gene Name: ribonuclease T2
  ENST ID: ENST00000620173
  CDS Start-End: 408-1328
ctctgctccggtgcaggcccgcagggcgccctgggctgggagcaacgcgactgaccgtggtcgtgggcggacggcggctgcagcgtggaggagctggggtcgctgtgggtcgcgaagcagagcccgggacgtgcgcgcttggtgcacgatcctgaaggggagctccgaggggcccgggtcgccagggctgctgcggccattcccggagcccggcgcggggcccgcgagatactggtttaggccgtcccagggctccgggcgcacccggtggccgctgctgcagcggagggagcgcggcggcgcgggggctcggagacagcgtttctcccggaagtcttcctcgggcagcaggtgggaagtgggagccggagcggcagctggcagcgttctctccgcaggtcggcaccatgcgccctgcagccctgcgcggggccctgctgggctgcctctgcctggcgttgctttgcctgggcggtgcggacaagcgcctgcgtgacaaccatgagtggaaaaaactaattatggttcagcactggcctgagacagtatgcgagaaaattcaaaacgactgtagagaccctccggattactggacaatacatggactatggcccgataaaagtgaaggatgtaatagatcgtggcccttcaatttagaagagattaaggtattgacttttaattatatttctactgcagagtgctcctcacacagactctcctcctctcctccgggactcactgcagggaatggtttctggggagggtcagaggaaaggtgtggacgtggatggccaatgtttttagaacagataaaggatcttttgccagaaatgagggcatactggcctgacgtaattcactcgtttcccaatcgcagccgcttctggaagcatgagtgggaaaagcatgggacctgcgccgcccaggtggatgcgctcaactcccagaagaagtactttggcagaagcctggaactctacagggagctggacctcaacagtgtgcttctaaaattggggataaaaccatccatcaattactaccaagttgcagattttaaagatgcccttgccagagtatatggagtgatacccaaaatccagtgccttccaccaagccaggatgaggaagtacagacaattggtcagatagaactgtgcctcactaagcaagaccagcagctgcaaaactgcaccgagccgggggagcagccgtcccccaagcaggaagtctggctggcaaatggggccgccgagagccggggtctgagagtctgtgaagatggcccagtcttctatcccccacctaaaaagaccaagcattgatgcccaagttttggaaatattctgttttaaaaagcaagagaaattcacaaactgcagctttct

SEQ ID NO: 176215 - DNA, 878 bp, Homo sapiens
  Payload ID: 14598
  Gene Symbol: RNASE1
  Gene Name: ribonuclease, RNase A family, 1 (pancreatic)
  Uniprot ID: P07998
  ENST ID: ENST00000340900
  CDS Start-End: 156-626
gctgagtgattgcagaaactggccttccatctctctcagacaccaagctgcagatccaggtcaccacctagaggggaggaagacctcgctttggagagtgggaataaaacgctcgtggaaaagggtacacgcttttctgggaaagtgaggccaccatggctctggagaagtctcttgtccggctccttctgcttgtcctgatactgctggtgctgggctgggtccagccttccctgggcaaggaatcccgggccaagaaattccagcggcagcatatggactcagacagttcccccagcagcagctccacctactgtaaccaaatgatgaggcgccggaatatgacacaggggcggtgcaaaccagtgaacacctttgtgcacgagcccctggtagatgtccagaatgtctgtttccaggaaaaggtcacctgcaagaacgggcagggcaactgctacaagagcaactccagcatgcacatcacagactgccgcctgacaaacggctccaggtaccccaactgtgcataccggaccagcccgaaggagagacacatcattgtggcctgtgaagggagcccatatgtgccagtccactttgatgcttctgtggaggactctacctaaggtcagagcagcgagataccccacctccctcaacctcatcctctccacagctgcctcttccctcttccttccctgctgtgaaagaagtaactacagttagggctcctattcaacacacacatgcttccctttcctgagtcccatccctgcgtgattttgggggtgaagagtgggttgtgaggtgggccccatgttaacccctccactctttctttcaataaaacgcagttgcaaacacctgatttctgaagc

SEQ ID NO: 176216 - DNA, 1348 bp, Homo sapiens
  Payload ID: 14598
  Gene Symbol: RNASE1
  Gene Name: ribonuclease, RNase A family, 1 (pancreatic)
  Uniprot ID: P07998
  ENST ID: ENST00000397967
  CDS Start-End: 508-978
agagacttgggttttgctccctaggagccctggaatagctttggccagaattccctatctcccattagaacctctcctttgcgtcctttgttaacctccaagtctacttggtgaaaacgcccacgaagaagtaacaaggactttgttcctagtgtgccaggtttgggcaccagtgctgtagtggctttctctgctgctccttgtgcatcagcagacagatgtggttcacataggaagaaagactaacgtaggcaaagatttgctctttcttcagcagccctagaaagacggcggcctgggtgattcaccactccttcctcacgtccttgattttatttgaactgagctccagatgctcctcccacccttttcctcttggaagccaaacccctttgtaatctgtataaggtccacaccccgggagctgagtgattgcagaaactggccttccatctctctcagacaccaagctgcagatccaggcttttctgggaaagtgaggccaccatggctctggagaagtctcttgtccggctccttctgcttgtcctgatactgctggtgctgggctgggtccagccttccctgggcaaggaatcccgggccaagaaattccagcggcagcatatggactcagacagttcccccagcagcagctccacctactgtaaccaaatgatgaggcgccggaatatgacacaggggcggtgcaaaccagtgaacacctttgtgcacgagcccctggtagatgtccagaatgtctgtttccaggaaaaggtcacctgcaagaacgggcagggcaactgctacaagagcaactccagcatgcacatcacagactgccgcctgacaaacggctccaggtaccccaactgtgcataccggaccagcccgaaggagagacacatcattgtggcctgtgaagggagcccatatgtgccagtccactttgatgcttctgtggaggactctacctaaggtcagagcagcgagataccccacctccctcaacctcatcctctccacagctgcctcttccctcttccttccctgctgtgaaagaagtaactacagttagggctcctattcaacacacacatgcttccctttcctgagtcccatccctgcgtgattttgggggtgaagagtgggttgtgaggtgggccccatgttaacccctccactctttctttcaataaaacgcagttgcaaacacctgatttctgaagcggttctgtctaggtactgtttctggcattgccttccagcaaggggtaagaactgtaaatctgattcactttggagaacggtgaatggagtaattaaatgccttcccttctgacttgga

SEQ ID NO: 176217 - DNA, 769 bp, Homo sapiens
  Payload ID: 14598
  Gene Symbol: RNASE1
  Gene Name: ribonuclease, RNase A family, 1 (pancreatic)
  Uniprot ID: P07998
  ENST ID: ENST00000397970
  CDS Start-End: 161-631
gattgcagaaactggccttccatctctctcagacaccaagctgcagatccaggtcactttgtaggtcaccacctagaggggaggaagacctcgctttggagagtgggaataaaacgctcgtggaaaagggtacacgcttttctgggaaagtgaggccaccatggctctggagaagtctcttgtccggctccttctgcttgtcctgatactgctggtgctgggctgggtccagccttccctgggcaaggaatcccgggccaagaaattccagcggcagcatatggactcagacagttcccccagcagcagctccacctactgtaaccaaatgatgaggcgccggaatatgacacaggggcggtgcaaaccagtgaacacctttgtgcacgagcccctggtagatgtccagaatgtctgtttccaggaaaaggtcacctgcaagaacgggcagggcaactgctacaagagcaactccagcatgcacatcacagactgccgcctgacaaacggctccaggtaccccaactgtgcataccggaccagcccgaaggagagacacatcattgtggcctgtgaagggagcccatatgtgccagtccactttgatgcttctgtggaggactctacctaaggtcagagcagcgagataccccacctccctcaacctcatcctctccacagctgcctcttccctcttccttccctgctgtgaaagaagtaactacagttagggctcctattcaacacacacatgcttccctttcctgag

SEQ ID NO: 176218 - DNA, 896 bp, Homo sapiens
  Payload ID: 14598
  Gene Symbol: RNASE1
  Gene Name: ribonuclease, RNase A family, 1 (pancreatic)
  Uniprot ID: P07998
  ENST ID: ENST00000412779
  CDS Start-End: 184-654
ttgagcactgggtacaaatgtattttggatcaaagaaactccagtattcaaagataggaactgacaggattttaggtcactttgtaggtcaccacctagaggggaggaagacctcgctttggagagtgggaataaaacgctcgtggaaaagggtacacgcttttctgggaaagtgaggccaccatggctctggagaagtctcttgtccggctccttctgcttgtcctgatactgctggtgctgggctgggtccagccttccctgggcaaggaatcccgggccaagaaattccagcggcagcatatggactcagacagttcccccagcagcagctccacctactgtaaccaaatgatgaggcgccggaatatgacacaggggcggtgcaaaccagtgaacacctttgtgcacgagcccctggtagatgtccagaatgtctgtttccaggaaaaggtcacctgcaagaacgggcagggcaactgctacaagagcaactccagcatgcacatcacagactgccgcctgacaaacggctccaggtaccccaactgtgcataccggaccagcccgaaggagagacacatcattgtggcctgtgaagggagcccatatgtgccagtccactttgatgcttctgtggaggactctacctaaggtcagagcagcgagataccccacctccctcaacctcatcctctccacagctgcctcttccctcttccttccctgctgtgaaagaagtaactacagttagggctcctattcaacacacacatgcttccctttcctgagtcccatccctgcgtgattttgggggtgaagagtgggttgtgaggtgggccccatgttaacccctccactctttctttcaataaaacgcagttgcaaacacctga

SEQ ID NO: 176219 - DNA, 655 bp, Homo sapiens
  Payload ID: 14598
  Gene Symbol: RNASE1
  Gene Name: ribonuclease, RNase A family, 1 (pancreatic)
  ENST ID: ENST00000555698
  CDS Start-End: 101-451
gattgcagaaactggccttccatctctctcagacaccaagctgcagatccagccttccctgggcaaggaatcccgggccaagaaattccagcggcagcatatggactcagacagttcccccagcagcagctccacctactgtaaccaaatgatgaggcgccggaatatgacacaggggcggtgcaaaccagtgaacacctttgtgcacgagcccctggtagatgtccagaatgtctgtttccaggaaaaggtcacctgcaagaacgggcagggcaactgctacaagagcaactccagcatgcacatcacagactgccgcctgacaaacggctccaggtaccccaactgtgcataccggaccagcccgaaggagagacacatcattgtggcctgtgaagggagcccatatgtgccagtccactttgatgcttctgtggaggactctacctaaggtcagagcagcgagataccccacctccctcaacctcatcctctccacagctgcctcttccctcttccttccctgctgtgaaagaagtaactacagttagggctcctattcaacacacacatgcttccctttcctgagtcccatccctgcgtgattttgggggtgaagagtgggttgtgaggtgggccccatgttaacccctcc

SEQ ID NO: 176220 - DNA, 717 bp, Homo sapiens
  Payload ID: 14599
  Gene Symbol: RNASE10
  Gene Name: ribonuclease, RNase A family, 10 (non-active)
  Uniprot ID: Q5GAN6
  ENST ID: ENST00000328444
  CDS Start-End: 20-670
cgcttcctctccaggcaaaatgaagctgaatctggtgcagatctttttcatgttgctgatgctgctgctgggcctggggatgggcctggggttgggacttcatatggctacagcagtcttggaggagagtgatcaaccgctcaatgaattttggtccagtgactcacaggacaaagctgaggccactgaggagggagacggcacccaaaccacagaaacgctggtgcttagcaacaaagaagtggtgcaacctggctggccagaagatcccatcctcggtgaagatgaggttgggggtaacaagatgctcagagcctcagctctctttcagagcaacaaagactatcttaggcttgaccagacagatagagaatgcaatgatatgatggcacacaagatgaaggagcccagtcagagttgcatagcccagtatgcattcatccatgaggatctaaacacagtcaaagctgtctgtaacagtcctgtcattgcctgtgagctcaaggggggaaaatgtcacaaaagctcccgaccttttgatttgacattgtgcgagctgtcccaaccagaccaggtcactcctaactgcaattacctaacttctgttataaaaaagcacattattataacctgtaatgacatgaagcgccagttaccaactggacaatgaagcaactcatcatcttttttctcttcaccttctcctgttcctcttcc

SEQ ID NO: 176221 - DNA, 1172 bp, Homo sapiens
  Payload ID: 14599
  Gene Symbol: RNASE10
  Gene Name: ribonuclease, RNase A family, 10 (non-active)
  Uniprot ID: Q5GAN6
  ENST ID: ENST00000430083
  CDS Start-End: 405-1139
agctcctaaccgcgagtgatccgccagccttggcctcccaaggtgccgggattgcagacggagtctggttcactcagtgctcaatggtgcccaggctggagtgcagtggcgtgatctcagctcgctacaacctccatctcccagccgcctgccttggcctcccaaagtgccgagattgcagcctctgcctggccgccaccccgtctgggaagtgaggagcgtctctgcctggccgcccatcgtctgggatacgaggagcctctctgcctggctgcccagtctggaaagtgaggagcgtctctgcccggccgccatcccatctaggaagcgaggagcgcctcttccccgccgccatcccatctaggaagtgaggagcgtctctgcccggccgcccatcgtctgagatgtggggagcacctctgccccgccgccctgtctgggatgtgaggagcgcctctgctgggccgcaaccctgtctgggaggcaaaatgaagctgaatctggtgcagatctttttcatgttgctgatgctgctgctgggcctggggatgggcctggggttgggacttcatatggctacagcagtcttggaggagagtgatcaaccgctcaatgaattttggtccagtgactcacaggacaaagctgaggccactgaggagggagacggcacccaaaccacagaaacgctggtgcttagcaacaaagaagtggtgcaacctggctggccagaagatcccatcctcggtgaagatgaggttgggggtaacaagatgctcagagcctcagctctctttcagagcaacaaagactatcttaggcttgaccagacagatagagaatgcaatgatatgatggcacacaagatgaaggagcccagtcagagttgcatagcccagtatgcattcatccatgaggatctaaacacagtcaaagctgtctgtaacagtcctgtcattgcctgtgagctcaaggggggaaaatgtcacaaaagctcccgaccttttgatttgacattgtgcgagctgtcccaaccagaccaggtcactcctaactgcaattacctaacttctgttataaaaaagcacattattataacctgtaatgacatgaagcgccagttaccaactggacaatgaagcaactcatcatcttttttctcttcaccttct

SEQ ID NO: 176222 - DNA, 872 bp, Homo sapiens
  Payload ID: 14600
  Gene Symbol: RNASE11
  Gene Name: ribonuclease, RNase A family, 11 (non-active)
  Uniprot ID: Q8TAA1
  ENST ID: ENST00000398008
  CDS Start-End: 189-788
gagcaggcatgggtgggtcacaggctttggagagcactctctgtcctgatcttttcagttgagagacttcagctgttcattgctcatttggacttagttcaagaattttgggtgtcaccaggtaaacagagccctcagcatctgaatagaaactgaacaggaacagaagagattacactacatctgagatggagacctttcctctgctgctgctcagcctgggcctggttcttgcagaagcatcagaaagcacaatgaagataattaaagaagaatttacagacgaagagatgcaatatgacatggcaaaaagtggccaagaaaaacagaccattgagatattaatgaacccgatcctgttagttaaaaataccagcctcagcatgtccaaggatgatatgtcttccacattactgacattcagaagtttacattataatgaccccaagggaaacagttcgggtaatgacaaagagtgttgcaatgacatgacagtctggagaaaagtttcagaagcaaacggatcgtgcaagtggagcaataacttcatccgcagctccacagaagtgatgcgcagggtccacagggcccccagctgcaagtttgtacagaatcctggcataagctgctgtgagagcctagaactggaaaatacagtgtgccagttcactacaggcaaacaattccccaggtgccaataccatagtgttacctcattagagaagatattgacagtgctgacaggtcattctctgatgagctggttagtttgtggctctaagttgtaaatcccacagagctttaggactagggtcttactaaagaaggacctcttcttgttcattcttgtttaaacctttccttaatatcta

SEQ ID NO: 176223 - DNA, 1034 bp, Homo sapiens
  Payload ID: 14600
  Gene Symbol: RNASE11
  Gene Name: ribonuclease, RNase A family, 11 (non-active)
  Uniprot ID: Q8TAA1
  ENST ID: ENST00000398009
  CDS Start-End: 256-855
agctatggcatttcaatcctgtatgtgagagctagagactcatacagtgacctagagcaggcatggaattttgggtgtcaccaggtaaacagagccctcagcatctgaatagaaactgaacaggaacagttagacacaacagcagaaactcccaggaaacaaacacgatttcacttttagctctgcaacaaagtggaatcttcctctacaggatcaacttgccgaaggaactgaagagattacactacatctgagatggagacctttcctctgctgctgctcagcctgggcctggttcttgcagaagcatcagaaagcacaatgaagataattaaagaagaatttacagacgaagagatgcaatatgacatggcaaaaagtggccaagaaaaacagaccattgagatattaatgaacccgatcctgttagttaaaaataccagcctcagcatgtccaaggatgatatgtcttccacattactgacattcagaagtttacattataatgaccccaagggaaacagttcgggtaatgacaaagagtgttgcaatgacatgacagtctggagaaaagtttcagaagcaaacggatcgtgcaagtggagcaataacttcatccgcagctccacagaagtgatgcgcagggtccacagggcccccagctgcaagtttgtacagaatcctggcataagctgctgtgagagcctagaactggaaaatacagtgtgccagttcactacaggcaaacaattccccaggtgccaataccatagtgttacctcattagagaagatattgacagtgctgacaggtcattctctgatgagctggttagtttgtggctctaagttgtaaatcccacagagctttaggactagggtcttactaaagaaggacctcttcttgttcattcttgtttaaacctttccttaatatctactctttagcactatagtgaactcctgattatttattctaactggaggagtgaaaaatccaaaattgtggataattcaattaaaagttatgactga

SEQ ID NO: 176224 - DNA, 946 bp, Homo sapiens
  Payload ID: 14600
  Gene Symbol: RNASE11
  Gene Name: ribonuclease, RNase A family, 11 (non-active)
  Uniprot ID: Q8TAA1
  ENST ID: ENST00000432835
  CDS Start-End: 347-946
ctagagactcatacagtgacctagagcaggcatgggtgggtcacaggctttggagagcactctctgtcctgatcttttcagttgagagacttcagctgttcattgctcatttggacttagttcaaggtcatgtcaaagaagaaggtgcacttacgctagttgttagctctgtcttttgtaaccatcaagttccatgcgattgatcagatttaggagggggcgttgggggataatcgtaagtgaaggacagtttgcaaccttaattttgggtgtcaccaggtaaacagagccctcagcatctgaatagaaactgaacaggaacagaagagattacactacatctgagatggagacctttcctctgctgctgctcagcctgggcctggttcttgcagaagcatcagaaagcacaatgaagataattaaagaagaatttacagacgaagagatgcaatatgacatggcaaaaagtggccaagaaaaacagaccattgagatattaatgaacccgatcctgttagttaaaaataccagcctcagcatgtccaaggatgatatgtcttccacattactgacattcagaagtttacattataatgaccccaagggaaacagttcgggtaatgacaaagagtgttgcaatgacatgacagtctggagaaaagtttcagaagcaaacggatcgtgcaagtggagcaataacttcatccgcagctccacagaagtgatgcgcagggtccacagggcccccagctgcaagtttgtacagaatcctggcataagctgctgtgagagcctagaactggaaaatacagtgtgccagttcactacaggcaaacaattccccaggtgccaataccatagtgttacctcattagagaagatattgacagtgctgacaggtcattctctgatgagctggttagtttgtggctctaagttgtaa

SEQ ID NO: 176225 - DNA, 850 bp, Homo sapiens
  Payload ID: 14600
  Gene Symbol: RNASE11
  Gene Name: ribonuclease, RNase A family, 11 (non-active)
  ENST ID: ENST00000443456
  CDS Start-End: 315-850
actcatacagtgacctagagcaggcatgggtgggtcacaggctttggagagcactctctgtcctgatcttttcagttgagagacttcagctgttcattgctcatttggacttagttcaaggtcatgtcaaagaagaaggtgcacttacgctagttgttagctctgtcttttgtaaccatcaagttccatgcgattgatcagatttaggagggggcgttgggggataatcaattttgggtgtcaccaggtaaacagagccctcagcatctgaatagaaactgaacaggaacagaagagattacactacatctgagatggagacctttcctctgctgctgctcagcctgggcctggttcttgcagaagcatcagaaagcacaatgaagataattaaagaagaatttacagacgaagagatgcaatatgacatggcaaaaagtggccaagaaaaacagaccattgagatattaatgaacccgatcctgttagttaaaaataccagcctcagcatgtccaaggatgatatgtcttccacattactgacattcagaagtttacattataatgaccccaagggaaacagttcgggtaatgacaaagagtgttgcaatgacatgacagtctggagaaaagtttcagaagcaaacggatcgtgcaagtggagcaataacttcatccgcagctccacagaagtgatgcgcagggtccacagggcccccagctgcaagtttgtacagaatcctggcataagctgctgtgagagcctagaactggaaaatacagtgtgccagttcactacaggcaaacaattccccaggtgccaataccatagtgttacctcattagagaa

SEQ ID NO: 176226 - DNA, 791 bp, Homo sapiens
  Payload ID: 14600
  Gene Symbol: RNASE11
  Gene Name: ribonuclease, RNase A family, 11 (non-active)
  ENST ID: ENST00000413502
  CDS Start-End: 364-791
agccccgtgccaggcaaggcgggtcaccgggcagcgtcggggccctcttctgcctcggggtctcttcacggagggcgccctgcggcgacagctttcgccggccgcgcgcacggcggtcggtacctgttaaggacgagatgccttccgaccaccggataactcgggacggtccctgatttgcctgctccctgtccaacagcatcttcggctcactcggaagtgaaaacatgcaatttcatgttataacatgcaatttcatgtcataaattattcccactgacgcctgaacatttttcctaaaagggatctgcagtcacaaggcgccgccttccggaatttagaagagattacactacatctgagatggagacctttcctctgctgctgctcagcctgggcctggttcttgcagaagcatcagaaagcacaatgaagataattaaagaagaatttacagacgaagagatgcaatatgacatggcaaaaagtggccaagaaaaacagaccattgagatattaatgaacccgatcctgttagttaaaaataccagcctcagcatgtccaaggatgatatgtcttccacattactgacattcagaagtttacattataatgaccccaagggaaacagttcgggtaatgacaaagagtgttgcaatgacatgacagtctggagaaaagtttcagaagcaaacggatcgtgcaagtggagcaataacttcatccgcagctccacagaagtgatgcgcagggtccacagggcccccagctgcaagtttgtacagaatcc

SEQ ID NO: 176227 - DNA, 1101 bp, Homo sapiens
  Payload ID: 14600
  Gene Symbol: RNASE11
  Gene Name: ribonuclease, RNase A family, 11 (non-active)
  Uniprot ID: Q8TAA1
  ENST ID: ENST00000553849
  CDS Start-End: 186-785
actcatctcatggcttcttccatcttaggtggccgtttttcagctgagtttcattttctagttctctgtggtaattctgttgtcattgttgtctccatagaattttgggtgtcaccaggtaaacagagccctcagcatctgaatagaaactgaacaggaacagaagagattacactacatctgagatggagacctttcctctgctgctgctcagcctgggcctggttcttgcagaagcatcagaaagcacaatgaagataattaaagaagaatttacagacgaagagatgcaatatgacatggcaaaaagtggccaagaaaaacagaccattgagatattaatgaacccgatcctgttagttaaaaataccagcctcagcatgtccaaggatgatatgtcttccacattactgacattcagaagtttacattataatgaccccaagggaaacagttcgggtaatgacaaagagtgttgcaatgacatgacagtctggagaaaagtttcagaagcaaacggatcgtgcaagtggagcaataacttcatccgcagctccacagaagtgatgcgcagggtccacagggcccccagctgcaagtttgtacagaatcctggcataagctgctgtgagagcctagaactggaaaatacagtgtgccagttcactacaggcaaacaattccccaggtgccaataccatagtgttacctcattagagaagatattgacagtgctgacaggtcattctctgatgagctggttagtttgtggctctaagttgtaaatcccacagagctttaggactagggtcttactaaagaaggacctcttcttgttcattcttgtttaaacctttccttaatatctactctttagcactatagtgaactcctgattatttattctaactggaggagtgaaaaatccaaaattgtggataattcaattaaaagttatgactgatactggcgtgcagattcttctctctctatctctctctctgtgtggggggagggtggggagggtgtaaaacaaactgaatttcatcctagctcagctataaagccaagaaacagaatccacctaactaggcagaatta

SEQ ID NO: 176228 - DNA, 527 bp, Homo sapiens
  Payload ID: 14600
  Gene Symbol: RNASE11
  Gene Name: ribonuclease, RNase A family, 11 (non-active)
  ENST ID: ENST00000554842
  CDS Start-End: 119-527
gtcactaattctgagctatggcatttcaatcctaattttgggtgtcaccaggtaaacagagccctcagcatctgaatagaaactgaacaggaacagaagagattacactacatctgagatggagacctttcctctgctgctgctcagcctgggcctggttcttgcagaagcatcagaaagcacaatgaagataattaaagaagaatttacagacgaagagatgcaatatgacatggcaaaaagtggccaagaaaaacagaccattgagatattaatgaacccgatcctgttagttaaaaataccagcctcagcatgtccaaggatgatatgtcttccacattactgacattcagaagtttacattataatgaccccaagggaaacagttcgggtaatgacaaagagtgttgcaatgacatgacagtctggagaaaagtttcagaagcaaacggatcgtgcaagtggagcaataacttcatccgcagctccacagaagtgatgcgcagggtccacagggcccccagct

SEQ ID NO: 176229 - DNA, 886 bp, Homo sapiens
  Payload ID: 14600
  Gene Symbol: RNASE11
  Gene Name: ribonuclease, RNase A family, 11 (non-active)
  Uniprot ID: Q8TAA1
  ENST ID: ENST00000555841
  CDS Start-End: 108-707
cagtgacctagagcaggcatggaattttgggtgtcaccaggtaaacagagccctcagcatctgaatagaaactgaacaggaacagaagagattacactacatctgagatggagacctttcctctgctgctgctcagcctgggcctggttcttgcagaagcatcagaaagcacaatgaagataattaaagaagaatttacagacgaagagatgcaatatgacatggcaaaaagtggccaagaaaaacagaccattgagatattaatgaacccgatcctgttagttaaaaataccagcctcagcatgtccaaggatgatatgtcttccacattactgacattcagaagtttacattataatgaccccaagggaaacagttcgggtaatgacaaagagtgttgcaatgacatgacagtctggagaaaagtttcagaagcaaacggatcgtgcaagtggagcaataacttcatccgcagctccacagaagtgatgcgcagggtccacagggcccccagctgcaagtttgtacagaatcctggcataagctgctgtgagagcctagaactggaaaatacagtgtgccagttcactacaggcaaacaattccccaggtgccaataccatagtgttacctcattagagaagatattgacagtgctgacaggtcattctctgatgagctggttagtttgtggctctaagttgtaaatcccacagagctttaggactagggtcttactaaagaaggacctcttcttgttcattcttgtttaaacctttccttaatatctactctttagcactatagtgaactcctgattatttattctaactggaggagtgaaaaatccaaaattgtggataattcaattaaaagttatgactga

SEQ ID NO: 176230 - DNA, 681 bp, Homo sapiens
  Payload ID: 14600
  Gene Symbol: RNASE11
  Gene Name: ribonuclease, RNase A family, 11 (non-active)
  ENST ID: ENST00000557503
  CDS Start-End: 146-681
ggcatttcaatcctgtatgtgagagctagagactcatacagtgacctagagcaggcatggaattttgggtgtcaccaggtaaacagagccctcagcatctgaatagaaactgaacaggaacagaagagattacactacatctgagatggagacctttcctctgctgctgctcagcctgggcctggttcttgcagaagcatcagaaagcacaatgaagataattaaagaagaatttacagacgaagagatgcaatatgacatggcaaaaagtggccaagaaaaacagaccattgagatattaatgaacccgatcctgttagttaaaaataccagcctcagcatgtccaaggatgatatgtcttccacattactgacattcagaagtttacattataatgaccccaagggaaacagttcgggtaatgacaaagagtgttgcaatgacatgacagtctggagaaaagtttcagaagcaaacggatcgtgcaagtggagcaataacttcatccgcagctccacagaagtgatgcgcagggtccacagggcccccagctgcaagtttgtacagaatcctggcataagctgctgtgagagcctagaactggaaaatacagtgtgccagttcactacaggcaaacaattccccaggtgccaataccatagtgttacctcattagagaa

SEQ ID NO: 176231 - DNA, 703 bp, Homo sapiens
  Payload ID: 14600
  Gene Symbol: RNASE11
  Gene Name: ribonuclease, RNase A family, 11 (non-active)
  ENST ID: ENST00000557105
  CDS Start-End: 189-703
cacaggctttggagagcactctctgtcctgatcttttcagttgagagacttcagctgttcattgctcatttggacttagttcaaggtcatgtcaaagaagaagaattttgggtgtcaccaggtaaacagagccctcagcatctgaatagaaactgaacaggaacagaagagattacactacatctgagatggagacctttcctctgctgctgctcagcctgggcctggttcttgcagaagcatcagaaagcacaatgaagataattaaagaagaatttacagacgaagagatgcaatatgacatggcaaaaagtggccaagaaaaacagaccattgagatattaatgaacccgatcctgttagttaaaaataccagcctcagcatgtccaaggatgatatgtcttccacattactgacattcagaagtttacattataatgaccccaagggaaacagttcgggtaatgacaaagagtgttgcaatgacatgacagtctggagaaaagtttcagaagcaaacggatcgtgcaagtggagcaataacttcatccgcagctccacagaagtgatgcgcagggtccacagggcccccagctgcaagtttgtacagaatcctggcataagctgctgtgagagcctagaactggaaaatacagtgtgccagttcactacaggcaaacaattccccaggtgccaatacca

SEQ ID NO: 176232 - DNA, 883 bp, Homo sapiens
  Payload ID: 14600
  Gene Symbol: RNASE11
  Gene Name: ribonuclease, RNase A family, 11 (non-active)
  Uniprot ID: Q8TAA1
  ENST ID: ENST00000620912
  CDS Start-End: 106-705
gtgacctagagcaggcatggaattttgggtgtcaccaggtaaacagagccctcagcatctgaatagaaactgaacaggaacagaagagattacactacatctgagatggagacctttcctctgctgctgctcagcctgggcctggttcttgcagaagcatcagaaagcacaatgaagataattaaagaagaatttacagacgaagagatgcaatatgacatggcaaaaagtggccaagaaaaacagaccattgagatattaatgaacccgatcctgttagttaaaaataccagcctcagcatgtccaaggatgatatgtcttccacattactgacattcagaagtttacattataatgaccccaagggaaacagttcgggtaatgacaaagagtgttgcaatgacatgacagtctggagaaaagtttcagaagcaaacggatcgtgcaagtggagcaataacttcatccgcagctccacagaagtgatgcgcagggtccacagggcccccagctgcaagtttgtacagaatcctggcataagctgctgtgagagcctagaactggaaaatacagtgtgccagttcactacaggcaaacaattccccaggtgccaataccatagtgttacctcattagagaagatattgacagtgctgacaggtcattctctgatgagctggttagtttgtggctctaagttgtaaatcccacagagctttaggactagggtcttactaaagaaggacctcttcttgttcattcttgtttaaacctttccttaatatctactctttagcactatagtgaactcctgattatttattctaactggaggagtgaaaaatccaaaattgtggataattcaattaaaagttatgactg

SEQ ID NO: 176233 - DNA, 631 bp, Homo sapiens
  Payload ID: 14601
  Gene Symbol: RNASE12
  Gene Name: ribonuclease, RNase A family, 12 (non-active)
  Uniprot ID: Q5GAN4
  ENST ID: ENST00000556526
  CDS Start-End: 101-544
ggggttggagcaggaggaatctgactgtcctttgctactttctatcttcccttactcaacagcagtcaaagccaaagatgcgaagtcactcttacctctgatgataataatggtgataattttcttggtgcttctgttctgggaaaatgaggtgaatgatgaagcagtgatgtcaactttagaacacttgcatgtggactaccctcagaatgacgttcccgttcctgcaaggtactgcaaccacatgatcatacaaagagttatcagggaacctgaccacacttgtaaaaaggagcatgtcttcatccatgagaggcctcgaaaaatcaatggtatttgcatttctcccaagaaggttgcttgccaaaacctttcggccattttctgctttcagagtgagacaaagttcaaaatgacagtctgtcagctcattgaaggcacaagataccctgcctgcaggtaccactattcccccacagaggggtttgttcttgtcacttgtgatgacttgaggccagatagtttccttggctatgttaaataactcaagatcagctcccgagtctgagatctcttctctcaatggcattggagctggctgtgcctgaggcagacctggaccgtggacatg

SEQ ID NO: 176234 - DNA, 1607 bp, Homo sapiens
  Payload ID: 14602
  Gene Symbol: RNASE13
  Gene Name: ribonuclease, RNase A family, 13 (non-active)
  Uniprot ID: Q5GAN3
  ENST ID: ENST00000382951
  CDS Start-End: 139-609
atttttacctagaaacctttctagcctctcctcatctcttgactgtcttggccttggcaagaagaatacacgtccctacccagctatcttcagctcctgtccttcctcccagctgccagagaattgtcagcaggaggaatggcaccagctgtgacccggctccttttcctccagcttgttctggggccaactctggtcatggacatcaagatgcagattggcagcaggaacttctataccttaagcattgactatcccagggttaactacccaaagggtttccggggctattgtaatggtctgatgtcctatatgcgaggcaagatgcaaaattcagattgcccaaagatccattatgtgatacatgccccttggaaggccatccagaagttctgcaagtatagtgacagcttctgtgagaattacaatgaatactgcacactcacccaggattccctccccatcacggtctgctccctgagccaccaacagccacccactagctgctactacaatagcaccctaaccaaccagaagctctacctactctgctcccgcaagtatgaagctgatccaataggtatcgctggtctctattcgggaatttaattcctgagccactccccaacctctaccaccacaggccagctgtctccatttccaacactctgatccctgtaacaagacttccttcctgacttacgaggcaggcagggtcccctcccaagagaccaggtgggtgcgaaaatgtccagggctttgatcaccatgcaaagtggtgctatcttctaggttctttccagcttgtttaccccctcttcgcccccacctcctcatcatccttcctctcccagagacagtaaaacccacccaagaagttgactgtgtccagttggcagtgactgtccacccactgggccagatcctaagtcctggatggaggcccagggcctcagctcacaccatggcaacaggcaccagctccgagtctcacctccccatccccaccagccttctcatgtcagcctcccccagttcccttataattccctccactcacccacctactcaggggatatggctagctataggaacctccctgaggccctcagactcatgttagcctcacttccccacaacccccagtttccagcctgcttctctctgtgaaatcatggtttctcccttcatataactgtcctctcctgcttcctcttaccatggagcctaggactgtctcccccacactcccaacaaccgtagtcaccctgccttcctttttccaacctctttttcttccagtcttcttaccttggctcactggcatttcaaggtatcttctctcacccattccccagaggttcctgcttcccttctcttccagaagctcctcccaaatcccccagactccagagtctgcccctgaccaggcagcgaatgaggcaggcccggctctaatcgaacataaatttctaaaaccacatctgagtatgtaagatgtaaccattgggggaaactgggtgaagggcacacgagccccctctgtaccattttttgtaacttcctgtcaacccataatcaattcaaaataaaaagttaataacaca

SEQ ID NO: 176235 - DNA, 755 bp, Homo sapiens
  Payload ID: 14603
  Gene Symbol: RNASE2
  Gene Name: ribonuclease, RNase A family, 2 (liver, eosinophil-derived neurotoxin)
  Uniprot ID: P10153
  ENST ID: ENST00000304625
  CDS Start-End: 91-576
ttccaagtaggggagaccagctgcccctgaaccccagaacaaccagctggatcagttctcacaggagctacagcgcggagactgggaaacatggttccaaaactgttcacttcccaaatttgtctgcttcttctgttggggcttctggctgtggagggctcactccatgtcaaacctccacagtttacctgggctcaatggtttgaaacccagcacatcaatatgacctcccagcaatgcaccaatgcaatgcaggtcattaacaattatcaacggcgatgcaaaaaccaaaatactttccttcttacaacttttgctaacgtagttaatgtttgtggtaacccaaatatgacctgtcctagtaacaaaactcgcaaaaattgtcaccacagtggaagccaggtgcctttaatccactgtaacctcacaactccaagtccacagaatatttcaaactgcaggtatgcgcagacaccagcaaacatgttctatatagttgcatgtgacaacagagatcaacgacgagaccctccacagtatccggtggttccagttcacctggatagaatcatctaagctcctgtatcagcactcctcatcatcactcatctgccaagctcctcaatcatagccaagatcccatctctccatatactttgggtatcagcatctgtcctcatcagtctccataccccttcagctttcctgagctgaagtgccttgtgaaccctgcaataaactgctttgcaaattca

SEQ ID NO: 176236 - DNA, 720 bp, Homo sapiens
  Payload ID: 14604
  Gene Symbol: RNASE3
  Gene Name: ribonuclease, RNase A family, 3
  Uniprot ID: P12724
  ENST ID: ENST00000304639
  CDS Start-End: 59-541
cccagaacaaccagctggatcagttctcacaggagccacagctcagagactgggaaacatggttccaaaactgttcacttcccaaatttgtctgcttcttctgttggggcttatgggtgtggagggctcactccatgccagacccccacagtttacgagggctcagtggtttgccatccagcacatcagtctgaacccccctcgatgcaccattgcaatgcgggcaattaacaattatcgatggcgttgcaaaaaccaaaatacttttcttcgtacaacttttgctaatgtagttaatgtttgtggtaaccaaagtatacgctgccctcataacagaactctcaacaattgtcatcggagtagattccgggtgcctttactccactgtgacctcataaatccaggtgcacagaatatttcaaactgcacgtatgcagacagaccaggaaggaggttctatgtagttgcatgtgacaacagagatccacgggattctccacggtatcctgtggttccagttcacctggataccaccatctaagctcctgtatcagcagtcctcatcatcactcatctgccaagctcctcaatcatagccaagatcccatccctccatgtactctgggtatcagcaactgtcctcatcagtctccataccccttcagctttcctgagctgaagtcccttgtgaaccctgcaataaactgctttgcaaattca

SEQ ID NO: 176237 - DNA, 853 bp, Homo sapiens
  Payload ID: 14605
  Gene Symbol: RNASE4
  Gene Name: ribonuclease, RNase A family, 4
  Uniprot ID: P34096
  ENST ID: ENST00000397995
  CDS Start-End: 132-575
gtacacacactcacacaaggacgccaaccccacctagatgcaaagcaggattcaaaagaacatctttgcgttttctaccggctccccatcatcgtactagggaggaagaagcgggcacctctaagatactgatggctctgcagaggacccattcattgcttctgcttttgctgctgaccctgctggggctggggctggtccagccctcctatggccaggatggcatgtaccagcgattcctgcggcaacacgtgcaccctgaggagacaggtggcagtgatcgctactgcaacttgatgatgcaaagacggaagatgactttgtatcactgcaagcgcttcaacaccttcatccatgaagatatctggaacattcgtagtatctgcagcaccaccaatatccaatgcaagaacggcaagatgaactgccatgagggtgtagtgaaggtcacagattgcagggacacaggaagttccagggcacccaactgcagatatcgggccatagcgagcactagacgtgttgtcattgcctgtgagggtaacccacaggtgcctgtgcactttgacggttagatgccaccatgtagggattatcgcgagtggttgaccttacacttactccttaaatagcagtgagtaatgcatttgagctgtcccaggctctgtctcctcagctcatttcctactctttttctctatataactcattctattaaatacattgcaccaaagagatatggagacataaacctgtaatgaatgaggctgggcttttctgtaataagcttccttttataatactggtcagcttagctctctcagatcctatcctgtggaatttagttattatg

SEQ ID NO: 176238 - DNA, 1341 bp, Homo sapiens
  Payload ID: 14605
  Gene Symbol: RNASE4
  Gene Name: ribonuclease, RNase A family, 4
  Uniprot ID: P34096
  ENST ID: ENST00000555597
  CDS Start-End: 111-554
acacaactggaacccatctccaggaacaaacagctggaacccatctcccgttgaagggaaactgccagatttttgtaagattcttcctcctgggcacctctaagatactgatggctctgcagaggacccattcattgcttctgcttttgctgctgaccctgctggggctggggctggtccagccctcctatggccaggatggcatgtaccagcgattcctgcggcaacacgtgcaccctgaggagacaggtggcagtgatcgctactgcaacttgatgatgcaaagacggaagatgactttgtatcactgcaagcgcttcaacaccttcatccatgaagatatctggaacattcgtagtatctgcagcaccaccaatatccaatgcaagaacggcaagatgaactgccatgagggtgtagtgaaggtcacagattgcagggacacaggaagttccagggcacccaactgcagatatcgggccatagcgagcactagacgtgttgtcattgcctgtgagggtaacccacaggtgcctgtgcactttgacggttagatgccaccatgtagggattatcgcgagtggttgaccttacacttactccttaaatagcagtgagtaatgcatttgagctgtcccaggctctgtctcctcagctcatttcctactctttttctctatataactcattctattaaatacattgcaccaaagagatatggagacataaacctgtaatgaatgaggctgggcttttctgtaataagcttccttttataatactggtcagcttagctctctcagatcctatcctgtggaatttagttattatgtgtatttatgtagtatttcaaacatttcaaaatgctttcatctatgtttatcacattttaataccacagcacttataatgatgtcactacatatagaagctcaaagttaagggatttgctgaagactgtaaagttaatggaagaattgagacaaaaatccagtgtagctggccacttatccagggctttttctacttcatcacaaggaatgttttgaaagtgtctgctttttttatccttaaaattcacctgtcagggaggcattaaaaatttggaaatgtatgccagcaaaatgtgagctctgtattttttggcattcttatgtttgggtttaataagattaagaaaatgatactgggaattttctttttcctgaaactttgaatcaccctagtaagtcaaagtactaaaaaatgtactagatcattaagacttatgtgctcttactgattgaaagattttttatgttttccttgtaataaaggacctaaaccgaaggtacctgagaa

SEQ ID NO: 176239 - DNA, 2520 bp, Homo sapiens
  Payload ID: 14605
  Gene Symbol: RNASE4
  Gene Name: ribonuclease, RNase A family, 4
  Uniprot ID: P34096
  ENST ID: ENST00000555835
  CDS Start-End: 677-1120
tttttccacccccttttgtcaactactgaaaaaaagtctccgttaaatttgaaacacaaactgtctcgcgatgggctgtcctgccaaagaaagcagcagcgaataagtacgtggcagatggtgctgtcgaccagtgtcaagaccaagtttcatgggttcctggacgctcagccaggggtagtctctgaagggccgcctggcaattgggagcagaagccagtttcccgccatctgctctccgtggaggcagtgctctcgcggctgctgcccgttggggtccagctgaggaaggagcgcggatcccaggctcgttctttgcctgggctgcccctgcggcccctggggcgggtgctgctgcggcgccagctccaagggcggatccaggcgggaggggcctcctcggagaagcggggcgcggtcccaactacgcagaggctggcacgccgaccctccacacctcaccacgcccccatctccgtccgtgtacacacactcacacaaggacgccaaccccacctagatgcaaagcaggattcaaaagaacatctttgcgttttctaccggctccccatcatcgtactagggaggaagaagcgggtgagaaacaaaacttctttccattgtcctgcccgtttctgcggacttgttctgaggccgaggcacctctaagatactgatggctctgcagaggacccattcattgcttctgcttttgctgctgaccctgctggggctggggctggtccagccctcctatggccaggatggcatgtaccagcgattcctgcggcaacacgtgcaccctgaggagacaggtggcagtgatcgctactgcaacttgatgatgcaaagacggaagatgactttgtatcactgcaagcgcttcaacaccttcatccatgaagatatctggaacattcgtagtatctgcagcaccaccaatatccaatgcaagaacggcaagatgaactgccatgagggtgtagtgaaggtcacagattgcagggacacaggaagttccagggcacccaactgcagatatcgggccatagcgagcactagacgtgttgtcattgcctgtgagggtaacccacaggtgcctgtgcactttgacggttagatgccaccatgtagggattatcgcgagtggttgaccttacacttactccttaaatagcagtgagtaatgcatttgagctgtcccaggctctgtctcctcagctcatttcctactctttttctctatataactcattctattaaatacattgcaccaaagagatatggagacataaacctgtaatgaatgaggctgggcttttctgtaataagcttccttttataatactggtcagcttagctctctcagatcctatcctgtggaatttagttattatgtgtatttatgtagtatttcaaacatttcaaaatgctttcatctatgtttatcacattttaataccacagcacttataatgatgtcactacatatagaagctcaaagttaagggatttgctgaagactgtaaagttaatggaagaattgagacaaaaatccagtgtagctggccacttatccagggctttttctacttcatcacaaggaatgttttgaaagtgtctgctttttttatccttaaaattcacctgtcagggaggcattaaaaatttggaaatgtatgccagcaaaatgtgagctctgtattttttggcattcttatgtttgggtttaataagattaagaaaatgatactgggaattttctttttcctgaaactttgaatcaccctagtaagtcaaagtactaaaaaatgtactagatcattaagacttatgtgctcttactgattgaaagattttttatgttttccttgtaataaaggacctaaaccgaaggtacctgagaagactgtgctatggtattattttttttctctgacttttaaattcttgtttagtttataaacatgcatgcaccttaataacctcataaactctggtcaaagactaatgcctatcagatccatgaccacaacacagaagatttgtctcatttactccagagagaatgattcctctcaaagacaattctcacagctcttccttctcccttagaatatttagaagcaaattagggagctgtcaggtctctgagcccaagcctgcacgtatacatccagatggcctgaagcaactgaagaaccacaaaagaagtgaaaataaccaattcctgccttaactgatgacattccaccactgtgatttgttcctgccccaccttaactgatcaattagccttgtgacattccttctcctggacaattagactcaggagctccccaccagagcaccttgtgacccccgcccctgcccgctagagaataacccactttgaccgtaatttcccactaccaacccaaatcctataaaactgccccaccccatctccctttgctgactccttttttggactcagtctgcctgcacccaggtgattaaaaagctttattgctcacacaa

SEQ ID NO: 176240 - DNA, 1498 bp, Homo sapiens
  Payload ID: 14606
  Gene Symbol: RNASE7
  Gene Name: ribonuclease, RNase A family, 7
  Uniprot ID: Q9H1E1
  ENST ID: ENST00000298690
  CDS Start-End: 258-728
gtatttgggacatgtaagtggagaggcatgaacctgattcatttcctgatccagtgatgctcccagcccacccccaaacagacacagcgtagcccgggccagctcttaaggagttcaggagtgagaagaggccctcagagatctgacagcctaggagtgcgtggacaccacctcagcccactgagcaggagtcacagcacgaagaccaagcgcaaagcgacccctgccctccatcctgactgctcctcctaagagagatggcaccggccagagcaggattctgcccccttctgctgcttctgctgctggggctgtgggtggcagagatcccagtcagtgccaagcccaagggcatgacctcatcacagtggtttaaaattcagcacatgcagcccagccctcaagcatgcaactcagccatgaaaaacattaacaagcacacaaaacggtgcaaagacctcaacaccttcctgcacgagcctttctccagtgtggccgccacctgccagacccccaaaatagcctgcaagaatggcgataaaaactgccaccagagccacggggccgtgtccctgaccatgtgtaagctcacctcagggaagcatccgaactgcaggtacaaagagaagcgacagaacaagtcttacgtagtggcctgtaagcctccccagaaaaaggactctcagcaattccacctggttcctgtacacttggacagagtcctttaggtttccagactggcttgctctttggctgaccttcaattccctctccaggactccgcaccactcccctacacccagagcattctcttcccctcatctcttggggctgttcctggttcagcctctgctgggaggctgaagctgacactctggtgagctgagctctagagggatggcttttcatctttttgttgctgttttcccagatgcttatccccaagaaacagcaagctcaggtctgtgggttccctggtctatgccattgcacatgtctcccctgccccctggcattagggcagcatgacaaggagaggaaataaatggaaagggggcatatgggatttgtggacacagctgtttctgttcctgaactagaagtcttccccagctctgacgtggcagtgaggtgacctgaaggaaagaaaaatataaataaataccacttcatatttgtatagaatcctctaatcccttgtgacatagacttgacagggattgtatgccttctttatggatgaggaaattaaggttttagaaagcttaatgaattaaagagcttgtctaattagttagtagcagaacctggacttgaacctaggtctccttgctctaaatacagtgtaccttctactctaccagttgcgcaagaaagaagtcactgttacagaggcaagcggtgaactaggtaagagttcactcatgaagaaacgagtgctctgaagagccagttaccctgtgttggctgcaataaaggtcattacctctctagccaa

SEQ ID NO: 176241 - DNA, 922 bp, Homo sapiens
  Payload ID: 14606
  Gene Symbol: RNASE7
  Gene Name: ribonuclease, RNase A family, 7
  Uniprot ID: Q9H1E1
  ENST ID: ENST00000481538
  CDS Start-End: 168-638
agcccgggccagctcttaaggagttcaggagtgagaagaggccctcagagatctgacagcctaggagtgcgtggacaccacctcagcccactgagcaggagtcacagcacgaagaccaagcgcaaagcgacccctgccctccatcctgactgctcctcctaagagagatggcaccggccagagcaggattctgcccccttctgctgcttctgctgctggggctgtgggtggcagagatcccagtcagtgccaagcccaagggcatgacctcatcacagtggtttaaaattcagcacatgcagcccagccctcaagcatgcaactcagccatgaaaaacattaacaagcacacaaaacggtgcaaagacctcaacaccttcctgcacgagcctttctccagtgtggccgccacctgccagacccccaaaatagcctgcaagaatggcgataaaaactgccaccagagccacggggccgtgtccctgaccatgtgtaagctcacctcagggaagcatccgaactgcaggtacaaagagaagcgacagaacaagtcttacgtagtggcctgtaagcctccccagaaaaaggactctcagcaattccacctggttcctgtacacttggacagagtcctttaggtttccagactggcttgctctttggctgaccttcaattccctctccaggactccgcaccactcccctacacccagagcattctcttcccctcatctcttggggctgttcctggttcagcctctgctgggaggctgaagctgacactctgttgcgcaagaaagaagtcactgttacagaggcaagcggtgaactaggtaagagttcactcatgaagaaacgagtgctctgaagagccagttaccctgtgttggctgcaataaaggtcattacctctctagccaag

SEQ ID NO: 176242 - DNA, 634 bp, Homo sapiens
  Payload ID: 14607
  Gene Symbol: RNASE8
  Gene Name: ribonuclease, RNase A family, 8
  Uniprot ID: Q8TDE3
  ENST ID: ENST00000308227
  CDS Start-End: 72-536
caagactcccccatgatgacctattcatccacctacctcctcactctgttccactgtctcccttaagagagatggcaccggccagagcaggatgctgccccctgctgctgctgcttctggggctgtgggtggcagaggtcctagtcagagccaagcccaaggacatgacatcatctcagtggtttaaaactcagcatgtgcagcccagccctcaagcatgcaactcagccatgagcatcatcaataagtacacagaacggtgcaaagacctcaacaccttcctgcacgagcccttctccagtgtggccatcacctgccagacccccaacatagcctgcaagaatagctgtaaaaactgccaccagagccacgggcccatgtccctgaccatgggtgagctcacctcagggaagtacccaaactgcaggtacaaagagaagcacctgaacacaccttacatagtggcctgtgaccctccacaacagggtgacccagggtacccacttgttcctgtgcacttggataaagttgtctaagccctggtgcccacgttccacctcacactctgcagactgtatgctgctgcttttcctccctccagttcgttattaatccttgctccccactgcaaatg

SEQ ID NO: 176243 - DNA, 1049 bp, Homo sapiens
  Payload ID: 14608
  Gene Symbol: RNASE9
  Gene Name: ribonuclease, RNase A family, 9 (non-active)
  Uniprot ID: P60153
  ENST ID: ENST00000338904
  CDS Start-End: 73-690
gctctacctcttggacttccaacttctgtgagtcaacatagtgcctcttgcatttaagtgtctgcaggaaaaatgatgagaactctcatcaccacacacccactgcccctgcttctattgccgcagcagctgctgcagctggtgcagtttcaagaggtggatacagattttgatttcccagaagaagataaaaaagaagaatttgaagagtgtttggaaaaattttttagtacagggcccgccagaccacctaccaaagaaaaagtcaaaagacgtgtccttattgaacctggaatgccactaaatcatatagagtactgtaaccatgaaatcatgggaaaaaatgtttactacaaacaccgttgggtggcagaacattacttccttcttatgcaatatgacgagctccaaaaaatctgttacaacagatttgtgccatgtaagaatggaattaggaaatgtaacaggagcaaaggtcttgtagaaggagtgtattgtaatttaacagaagcatttgaaataccagcgtgtaaatacgaatcactttataggaagggctacgtccttatcacttgttcatggcaaaatgaaatgcaaaaacgtattcctcatactataaatgatctcgtggagccacctgaacacagaagtttcctcagtgaggatggtgtctttgtcatatcgccctagcagagcgttctctgagagcttagggtgggaggaatatttctctccatactgatccttatagatcaaagttgagaatggtaattttgcttccattcactttaatcacccaccttcctttcttcctttcccaacacctcacaaaagcaccttaggctaggttcacagacggtgctctgagatgtggtctcatgcaggtcccctaagttagcatgccttgaatgtgttacggatacagatgcctgcagtggaaggatgaccagcaccaagaggaaaaggaaatggttgcctgaagtgtgctccaaagacacatccatgtgattctctagttcagcagaaagaataaaaattgcttcaatcta

SEQ ID NO: 176244 - DNA, 1247 bp, Homo sapiens
  Payload ID: 14608
  Gene Symbol: RNASE9
  Gene Name: ribonuclease, RNase A family, 9 (non-active)
  Uniprot ID: P60153
  ENST ID: ENST00000404716
  CDS Start-End: 256-888
gctctacctcttggacttccaacttctgtgagtcaacatagtgcctcttgcatttaagaaacatctcatcacactcttatcagcattgagtttaaatttcaattagtgagaactgaggaaaaaccaagaagcctgcattccacagatcaagatgttgcagaggctccgcgttcttgtgagagtatgttccgagctctctgacctgtcaccatgggatcactcttttgaagagacttcctggaggacactgatgacatgtctgcaggaaaaatgatgagaactctcatcaccacacacccactgcccctgcttctattgccgcagcagctgctgcagctggtgcagtttcaagaggtggatacagattttgatttcccagaagaagataaaaaagaagaatttgaagagtgtttggaaaaattttttagtacagggcccgccagaccacctaccaaagaaaaagtcaaaagacgtgtccttattgaacctggaatgccactaaatcatatagagtactgtaaccatgaaatcatgggaaaaaatgtttactacaaacaccgttgggtggcagaacattacttccttcttatgcaatatgacgagctccaaaaaatctgttacaacagatttgtgccatgtaagaatggaattaggaaatgtaacaggagcaaaggtcttgtagaaggagtgtattgtaatttaacagaagcatttgaaataccagcgtgtaaatacgaatcactttataggaagggctacgtccttatcacttgttcatggcaaaatgaaatgcaaaaacgtattcctcatactataaatgatctcgtggagccacctgaacacagaagtttcctcagtgaggatggtgtctttgtcatatcgccctagcagagcgttctctgagagcttagggtgggaggaatatttctctccatactgatccttatagatcaaagttgagaatggtaattttgcttccattcactttaatcacccaccttcctttcttcctttcccaacacctcacaaaagcaccttaggctaggttcacagacggtgctctgagatgtggtctcatgcaggtcccctaagttagcatgccttgaatgtgttacggatacagatgcctgcagtggaaggatgaccagcaccaagaggaaaaggaaatggttgcctgaagtgtgctccaaagacacatccatgtgattctctagttcagcagaaagaataaaaattgcttcaatcta

SEQ ID NO: 176245 - DNA, 1084 bp, Homo sapiens
  Payload ID: 14608
  Gene Symbol: RNASE9
  Gene Name: ribonuclease, RNase A family, 9 (non-active)
  Uniprot ID: P60153
  ENST ID: ENST00000429244
  CDS Start-End: 108-725
gctctacctcttggacttccaacttctgtgagtcaacatagtgcctcttgcatttaagaaacatctcatcacactcttatcagcattgagttttgtctgcaggaaaaatgatgagaactctcatcaccacacacccactgcccctgcttctattgccgcagcagctgctgcagctggtgcagtttcaagaggtggatacagattttgatttcccagaagaagataaaaaagaagaatttgaagagtgtttggaaaaattttttagtacagggcccgccagaccacctaccaaagaaaaagtcaaaagacgtgtccttattgaacctggaatgccactaaatcatatagagtactgtaaccatgaaatcatgggaaaaaatgtttactacaaacaccgttgggtggcagaacattacttccttcttatgcaatatgacgagctccaaaaaatctgttacaacagatttgtgccatgtaagaatggaattaggaaatgtaacaggagcaaaggtcttgtagaaggagtgtattgtaatttaacagaagcatttgaaataccagcgtgtaaatacgaatcactttataggaagggctacgtccttatcacttgttcatggcaaaatgaaatgcaaaaacgtattcctcatactataaatgatctcgtggagccacctgaacacagaagtttcctcagtgaggatggtgtctttgtcatatcgccctagcagagcgttctctgagagcttagggtgggaggaatatttctctccatactgatccttatagatcaaagttgagaatggtaattttgcttccattcactttaatcacccaccttcctttcttcctttcccaacacctcacaaaagcaccttaggctaggttcacagacggtgctctgagatgtggtctcatgcaggtcccctaagttagcatgccttgaatgtgttacggatacagatgcctgcagtggaaggatgaccagcaccaagaggaaaaggaaatggttgcctgaagtgtgctccaaagacacatccatgtgattctctagttcagcagaaagaataaaaattgcttcaatcta

SEQ ID NO: 176246 - DNA, 1172 bp, Homo sapiens
  Payload ID: 14608
  Gene Symbol: RNASE9
  Gene Name: ribonuclease, RNase A family, 9 (non-active)
  Uniprot ID: P60153
  ENST ID: ENST00000553706
  CDS Start-End: 181-813
gctctacctcttggacttccaacttctgtgagtcaacatagtgcctcttgcatttaagaaacatctcatcacactcttatcagcattgagtttaaatttcaattagtgagaactgaggaaaaaccaagaagcctgcattccacagatcaagatgttgcagaggctccgcgttcttgtgagatgtctgcaggaaaaatgatgagaactctcatcaccacacacccactgcccctgcttctattgccgcagcagctgctgcagctggtgcagtttcaagaggtggatacagattttgatttcccagaagaagataaaaaagaagaatttgaagagtgtttggaaaaattttttagtacagggcccgccagaccacctaccaaagaaaaagtcaaaagacgtgtccttattgaacctggaatgccactaaatcatatagagtactgtaaccatgaaatcatgggaaaaaatgtttactacaaacaccgttgggtggcagaacattacttccttcttatgcaatatgacgagctccaaaaaatctgttacaacagatttgtgccatgtaagaatggaattaggaaatgtaacaggagcaaaggtcttgtagaaggagtgtattgtaatttaacagaagcatttgaaataccagcgtgtaaatacgaatcactttataggaagggctacgtccttatcacttgttcatggcaaaatgaaatgcaaaaacgtattcctcatactataaatgatctcgtggagccacctgaacacagaagtttcctcagtgaggatggtgtctttgtcatatcgccctagcagagcgttctctgagagcttagggtgggaggaatatttctctccatactgatccttatagatcaaagttgagaatggtaattttgcttccattcactttaatcacccaccttcctttcttcctttcccaacacctcacaaaagcaccttaggctaggttcacagacggtgctctgagatgtggtctcatgcaggtcccctaagttagcatgccttgaatgtgttacggatacagatgcctgcagtggaaggatgaccagcaccaagaggaaaaggaaatggttgcctgaagtgtgctccaaagacacatccatgtgattctctagttcagcagaaagaataaaaattgcttcaatcta

SEQ ID NO: 176247 - DNA, 1101 bp, Homo sapiens
  Payload ID: 14608
  Gene Symbol: RNASE9
  Gene Name: ribonuclease, RNase A family, 9 (non-active)
  Uniprot ID: P60153
  ENST ID: ENST00000554964
  CDS Start-End: 125-742
gctctacctcttggacttccaacttctgtgagtcaacatagtgcctcttgcatttaagaaatttcaattagtgagaactgaggaaaaaccaagaagcctgcattccacagtgtctgcaggaaaaatgatgagaactctcatcaccacacacccactgcccctgcttctattgccgcagcagctgctgcagctggtgcagtttcaagaggtggatacagattttgatttcccagaagaagataaaaaagaagaatttgaagagtgtttggaaaaattttttagtacagggcccgccagaccacctaccaaagaaaaagtcaaaagacgtgtccttattgaacctggaatgccactaaatcatatagagtactgtaaccatgaaatcatgggaaaaaatgtttactacaaacaccgttgggtggcagaacattacttccttcttatgcaatatgacgagctccaaaaaatctgttacaacagatttgtgccatgtaagaatggaattaggaaatgtaacaggagcaaaggtcttgtagaaggagtgtattgtaatttaacagaagcatttgaaataccagcgtgtaaatacgaatcactttataggaagggctacgtccttatcacttgttcatggcaaaatgaaatgcaaaaacgtattcctcatactataaatgatctcgtggagccacctgaacacagaagtttcctcagtgaggatggtgtctttgtcatatcgccctagcagagcgttctctgagagcttagggtgggaggaatatttctctccatactgatccttatagatcaaagttgagaatggtaattttgcttccattcactttaatcacccaccttcctttcttcctttcccaacacctcacaaaagcaccttaggctaggttcacagacggtgctctgagatgtggtctcatgcaggtcccctaagttagcatgccttgaatgtgttacggatacagatgcctgcagtggaaggatgaccagcaccaagaggaaaaggaaatggttgcctgaagtgtgctccaaagacacatccatgtgattctctagttcagcagaaagaataaaaattgcttcaatcta

SEQ ID NO: 176248 - DNA, 2668 bp, Homo sapiens
  Payload ID: 14608
  Gene Symbol: RNASE9
  Gene Name: ribonuclease, RNase A family, 9 (non-active)
  Uniprot ID: P60153
  ENST ID: ENST00000555230
  CDS Start-End: 1692-2309
gctctacctcttggacttccaacttctgtgagtcaacatagtgcctcttgcatttaagaaatttcaattagtgagaactgaggaaaaaccaagaagcctgcattccacagatcaagatgttgcagaggctccgcgttcttgtgagagtatgttccgagctctctgacctgtcaccatgggatcactcttttgaagagacttcctggaggacactgatgacagtgtgaaagcagggatgggaggaaaagcagggaggggagggacagtgtggcacatggccgccccagagtgcccattctcacatcgccattttaggcaactttttcttttctttcccattctctgcactcctatgctcaactttcctgtctctactttctgatgtgttccccaacacccacctttctttaattccatcattctctaacctttctacacacatatatacaaacttagtatccagcctagaacaggaggctgtccatctccatcactgatagatcaaggtctccaggtaatgactgttagagaatcactcaggttgccaccaagtaggacttcttttacaacgagcctggtaaggtaagaaaactcaggaggttgcttctgcaattaaataattggttcttcatggagcatggaccaatttgtcaaagcactctaggggctcaaattccgttttagcactggccatttcagtagtcattgtgtttgacagcctagagagagagatacagtctagccttaagaagggaaaccagactgatagaggccatagaatagcagctaaggacagatgtgtggaatttagacaaaaataggcttgaaccaggagtctgccggatctaatgtgagattttaagcaacttcccttcacggagagatgttaataactttacacttctttttgcaactttcattgttataataacaacaatgctaaaaataatatatttattatagggttgtttggatgatggtgataatgtacttagagtgcttagtctagtgcttggcacttaactcctcattatgctagctatgactgtgtatcattgtttttactttagggtgacttcaagaatgtatttatcccagctgctcaaacttgaaccttccttgaccccttccccaagggcatctatggtcaaataagggcaagaggagaaagaaagacatggttaaggaatttttcttatcaaagtggaatgttcgaaaggggagggtggctcttttcagagcaagttctcaactcctggaaagggaaaagatgcatttatttcagacgaaaggagcatgtgagcctcctctctgcaccctccctttctccccactgctgtcttgatttcctttctccttccctctctccttaatctctctcttgctccatttcttccttgtttccttttcttcctccttacctttatttctctccctttctcattctccttcctttcaccttttcttctcttaccacagctctagactgactgtaggcctagtaaggtcatttttgtcaataatttagaagtattcagatcgattatgagttggtaatttaaaaatggtccaaaatcttagagcccagaacagcaacatgtggcataactgtgccccacacaggaaatggaagcaagcacattatcacaatagaacatatcccgttatctcttttagtgtctgcaggaaaaatgatgagaactctcatcaccacacacccactgcccctgcttctattgccgcagcagctgctgcagctggtgcagtttcaagaggtggatacagattttgatttcccagaagaagataaaaaagaagaatttgaagagtgtttggaaaaattttttagtacagggcccgccagaccacctaccaaagaaaaagtcaaaagacgtgtccttattgaacctggaatgccactaaatcatatagagtactgtaaccatgaaatcatgggaaaaaatgtttactacaaacaccgttgggtggcagaacattacttccttcttatgcaatatgacgagctccaaaaaatctgttacaacagatttgtgccatgtaagaatggaattaggaaatgtaacaggagcaaaggtcttgtagaaggagtgtattgtaatttaacagaagcatttgaaataccagcgtgtaaatacgaatcactttataggaagggctacgtccttatcacttgttcatggcaaaatgaaatgcaaaaacgtattcctcatactataaatgatctcgtggagccacctgaacacagaagtttcctcagtgaggatggtgtctttgtcatatcgccctagcagagcgttctctgagagcttagggtgggaggaatatttctctccatactgatccttatagatcaaagttgagaatggtaattttgcttccattcactttaatcacccaccttcctttcttcctttcccaacacctcacaaaagcaccttaggctaggttcacagacggtgctctgagatgtggtctcatgcaggtcccctaagttagcatgccttgaatgtgttacggatacagatgcctgcagtggaaggatgaccagcaccaagaggaaaaggaaatggttgcctgaagtgtgctccaaagacacatccatgtgattctctagttcagcagaaagaataaaaattgcttcaatcta

SEQ ID NO: 176249 - DNA, 1137 bp, Homo sapiens
  Payload ID: 14608
  Gene Symbol: RNASE9
  Gene Name: ribonuclease, RNase A family, 9 (non-active)
  Uniprot ID: P60153
  ENST ID: ENST00000557209
  CDS Start-End: 146-778
gctctacctcttggacttccaacttctgtgagtcaacatagtgcctcttgcatttaagaaatttcaattagtgagaactgaggaaaaaccaagaagcctgcattccacagatcaagatgttgcagaggctccgcgttcttgtgagatgtctgcaggaaaaatgatgagaactctcatcaccacacacccactgcccctgcttctattgccgcagcagctgctgcagctggtgcagtttcaagaggtggatacagattttgatttcccagaagaagataaaaaagaagaatttgaagagtgtttggaaaaattttttagtacagggcccgccagaccacctaccaaagaaaaagtcaaaagacgtgtccttattgaacctggaatgccactaaatcatatagagtactgtaaccatgaaatcatgggaaaaaatgtttactacaaacaccgttgggtggcagaacattacttccttcttatgcaatatgacgagctccaaaaaatctgttacaacagatttgtgccatgtaagaatggaattaggaaatgtaacaggagcaaaggtcttgtagaaggagtgtattgtaatttaacagaagcatttgaaataccagcgtgtaaatacgaatcactttataggaagggctacgtccttatcacttgttcatggcaaaatgaaatgcaaaaacgtattcctcatactataaatgatctcgtggagccacctgaacacagaagtttcctcagtgaggatggtgtctttgtcatatcgccctagcagagcgttctctgagagcttagggtgggaggaatatttctctccatactgatccttatagatcaaagttgagaatggtaattttgcttccattcactttaatcacccaccttcctttcttcctttcccaacacctcacaaaagcaccttaggctaggttcacagacggtgctctgagatgtggtctcatgcaggtcccctaagttagcatgccttgaatgtgttacggatacagatgcctgcagtggaaggatgaccagcaccaagaggaaaaggaaatggttgcctgaagtgtgctccaaagacacatccatgtgattctctagttcagcagaaagaataaaaattgcttcaatcta

SEQ ID NO: 176250 - DNA, 1212 bp, Homo sapiens
  Payload ID: 14608
  Gene Symbol: RNASE9
  Gene Name: ribonuclease, RNase A family, 9 (non-active)
  Uniprot ID: P60153
  ENST ID: ENST00000556208
  CDS Start-End: 221-853
gctctacctcttggacttccaacttctgtgagtcaacatagtgcctcttgcatttaagaaatttcaattagtgagaactgaggaaaaaccaagaagcctgcattccacagatcaagatgttgcagaggctccgcgttcttgtgagagtatgttccgagctctctgacctgtcaccatgggatcactcttttgaagagacttcctggaggacactgatgacatgtctgcaggaaaaatgatgagaactctcatcaccacacacccactgcccctgcttctattgccgcagcagctgctgcagctggtgcagtttcaagaggtggatacagattttgatttcccagaagaagataaaaaagaagaatttgaagagtgtttggaaaaattttttagtacagggcccgccagaccacctaccaaagaaaaagtcaaaagacgtgtccttattgaacctggaatgccactaaatcatatagagtactgtaaccatgaaatcatgggaaaaaatgtttactacaaacaccgttgggtggcagaacattacttccttcttatgcaatatgacgagctccaaaaaatctgttacaacagatttgtgccatgtaagaatggaattaggaaatgtaacaggagcaaaggtcttgtagaaggagtgtattgtaatttaacagaagcatttgaaataccagcgtgtaaatacgaatcactttataggaagggctacgtccttatcacttgttcatggcaaaatgaaatgcaaaaacgtattcctcatactataaatgatctcgtggagccacctgaacacagaagtttcctcagtgaggatggtgtctttgtcatatcgccctagcagagcgttctctgagagcttagggtgggaggaatatttctctccatactgatccttatagatcaaagttgagaatggtaattttgcttccattcactttaatcacccaccttcctttcttcctttcccaacacctcacaaaagcaccttaggctaggttcacagacggtgctctgagatgtggtctcatgcaggtcccctaagttagcatgccttgaatgtgttacggatacagatgcctgcagtggaaggatgaccagcaccaagaggaaaaggaaatggttgcctgaagtgtgctccaaagacacatccatgtgattctctagttcagcagaaagaataaaaattgcttcaatcta

SEQ ID NO: 176251 - DNA, 1136 bp, Homo sapiens
  Payload ID: 14608
  Gene Symbol: RNASE9
  Gene Name: ribonuclease, RNase A family, 9 (non-active)
  Uniprot ID: P60153
  ENST ID: ENST00000553541
  CDS Start-End: 160-777
gctctacctcttggacttccaacttctgtgagtcaacatagtgcctcttgcatttaagaaacatctcatcacactcttatcagcattgagtttaaatttcaattagtgagaactgaggaaaaaccaagaagcctgcattccacagtgtctgcaggaaaaatgatgagaactctcatcaccacacacccactgcccctgcttctattgccgcagcagctgctgcagctggtgcagtttcaagaggtggatacagattttgatttcccagaagaagataaaaaagaagaatttgaagagtgtttggaaaaattttttagtacagggcccgccagaccacctaccaaagaaaaagtcaaaagacgtgtccttattgaacctggaatgccactaaatcatatagagtactgtaaccatgaaatcatgggaaaaaatgtttactacaaacaccgttgggtggcagaacattacttccttcttatgcaatatgacgagctccaaaaaatctgttacaacagatttgtgccatgtaagaatggaattaggaaatgtaacaggagcaaaggtcttgtagaaggagtgtattgtaatttaacagaagcatttgaaataccagcgtgtaaatacgaatcactttataggaagggctacgtccttatcacttgttcatggcaaaatgaaatgcaaaaacgtattcctcatactataaatgatctcgtggagccacctgaacacagaagtttcctcagtgaggatggtgtctttgtcatatcgccctagcagagcgttctctgagagcttagggtgggaggaatatttctctccatactgatccttatagatcaaagttgagaatggtaattttgcttccattcactttaatcacccaccttcctttcttcctttcccaacacctcacaaaagcaccttaggctaggttcacagacggtgctctgagatgtggtctcatgcaggtcccctaagttagcatgccttgaatgtgttacggatacagatgcctgcagtggaaggatgaccagcaccaagaggaaaaggaaatggttgcctgaagtgtgctccaaagacacatccatgtgattctctagttcagcagaaagaataaaaattgcttcaatcta

SEQ ID NO: 176252 - DNA, 2703 bp, Homo sapiens
  Payload ID: 14608
  Gene Symbol: RNASE9
  Gene Name: ribonuclease, RNase A family, 9 (non-active)
  Uniprot ID: P60153
  ENST ID: ENST00000557068
  CDS Start-End: 1727-2344
gctctacctcttggacttccaacttctgtgagtcaacatagtgcctcttgcatttaagaaacatctcatcacactcttatcagcattgagtttaaatttcaattagtgagaactgaggaaaaaccaagaagcctgcattccacagatcaagatgttgcagaggctccgcgttcttgtgagagtatgttccgagctctctgacctgtcaccatgggatcactcttttgaagagacttcctggaggacactgatgacagtgtgaaagcagggatgggaggaaaagcagggaggggagggacagtgtggcacatggccgccccagagtgcccattctcacatcgccattttaggcaactttttcttttctttcccattctctgcactcctatgctcaactttcctgtctctactttctgatgtgttccccaacacccacctttctttaattccatcattctctaacctttctacacacatatatacaaacttagtatccagcctagaacaggaggctgtccatctccatcactgatagatcaaggtctccaggtaatgactgttagagaatcactcaggttgccaccaagtaggacttcttttacaacgagcctggtaaggtaagaaaactcaggaggttgcttctgcaattaaataattggttcttcatggagcatggaccaatttgtcaaagcactctaggggctcaaattccgttttagcactggccatttcagtagtcattgtgtttgacagcctagagagagagatacagtctagccttaagaagggaaaccagactgatagaggccatagaatagcagctaaggacagatgtgtggaatttagacaaaaataggcttgaaccaggagtctgccggatctaatgtgagattttaagcaacttcccttcacggagagatgttaataactttacacttctttttgcaactttcattgttataataacaacaatgctaaaaataatatatttattatagggttgtttggatgatggtgataatgtacttagagtgcttagtctagtgcttggcacttaactcctcattatgctagctatgactgtgtatcattgtttttactttagggtgacttcaagaatgtatttatcccagctgctcaaacttgaaccttccttgaccccttccccaagggcatctatggtcaaataagggcaagaggagaaagaaagacatggttaaggaatttttcttatcaaagtggaatgttcgaaaggggagggtggctcttttcagagcaagttctcaactcctggaaagggaaaagatgcatttatttcagacgaaaggagcatgtgagcctcctctctgcaccctccctttctccccactgctgtcttgatttcctttctccttccctctctccttaatctctctcttgctccatttcttccttgtttccttttcttcctccttacctttatttctctccctttctcattctccttcctttcaccttttcttctcttaccacagctctagactgactgtaggcctagtaaggtcatttttgtcaataatttagaagtattcagatcgattatgagttggtaatttaaaaatggtccaaaatcttagagcccagaacagcaacatgtggcataactgtgccccacacaggaaatggaagcaagcacattatcacaatagaacatatcccgttatctcttttagtgtctgcaggaaaaatgatgagaactctcatcaccacacacccactgcccctgcttctattgccgcagcagctgctgcagctggtgcagtttcaagaggtggatacagattttgatttcccagaagaagataaaaaagaagaatttgaagagtgtttggaaaaattttttagtacagggcccgccagaccacctaccaaagaaaaagtcaaaagacgtgtccttattgaacctggaatgccactaaatcatatagagtactgtaaccatgaaatcatgggaaaaaatgtttactacaaacaccgttgggtggcagaacattacttccttcttatgcaatatgacgagctccaaaaaatctgttacaacagatttgtgccatgtaagaatggaattaggaaatgtaacaggagcaaaggtcttgtagaaggagtgtattgtaatttaacagaagcatttgaaataccagcgtgtaaatacgaatcactttataggaagggctacgtccttatcacttgttcatggcaaaatgaaatgcaaaaacgtattcctcatactataaatgatctcgtggagccacctgaacacagaagtttcctcagtgaggatggtgtctttgtcatatcgccctagcagagcgttctctgagagcttagggtgggaggaatatttctctccatactgatccttatagatcaaagttgagaatggtaattttgcttccattcactttaatcacccaccttcctttcttcctttcccaacacctcacaaaagcaccttaggctaggttcacagacggtgctctgagatgtggtctcatgcaggtcccctaagttagcatgccttgaatgtgttacggatacagatgcctgcagtggaaggatgaccagcaccaagaggaaaaggaaatggttgcctgaagtgtgctccaaagacacatccatgtgattctctagttcagcagaaagaataaaaattgcttcaatcta

SEQ ID NO: 176253 - DNA, 1108 bp, Homo sapiens
  Payload ID: 14608
  Gene Symbol: RNASE9
  Gene Name: ribonuclease, RNase A family, 9 (non-active)
  Uniprot ID: P60153
  ENST ID: ENST00000611135
  CDS Start-End: 118-750
tctccagatcaagatgttgcagaggctccgcgttcttgtgagagtatgttccgagctctctgacctgtcaccatgggatcactcttttgaagagacttcctggaggacactgatgacatgtctgcaggaaaaatgatgagaactctcatcaccacacacccactgcccctgcttctattgccgcagcagctgctgcagctggtgcagtttcaagaggtggatacagattttgatttcccagaagaagataaaaaagaagaatttgaagagtgtttggaaaaattttttagtacagggcccgccagaccacctaccaaagaaaaagtcaaaagacgtgtccttattgaacctggaatgccactaaatcatatagagtactgtaaccatgaaatcatgggaaaaaatgtttactacaaacaccgttgggtggcagaacattacttccttcttatgcaatatgacgagctccaaaaaatctgttacaacagatttgtgccatgtaagaatggaattaggaaatgtaacaggagcaaaggtcttgtagaaggagtgtattgtaatttaacagaagcatttgaaataccagcgtgtaaatacgaatcactttataggaagggctacgtccttatcacttgttcatggcaaaatgaaatgcaaaaacgtattcctcatactataaatgatctcgtggagccacctgaacacagaagtttcctcagtgaggatggtgtctttgtcatatcgccctagcagagcgttctctgagagcttagggtgggaggaatatttctctccatactgatccttatagatcaaagttgagaatggtaattttgcttccattcactttaatcacccaccttcctttcttcctttcccaacacctcacaaaagcaccttaggctaggttcacagacggtgctctgagatgtggtctcatgcaggtcccctaagttagcatgccttgaatgtgttacggatacagatgcctgcagtggaaggatgaccagcaccaagaggaaaaggaaatggttgcctgaagtgtgctccaaagacacatccatgtgattctctagttcagcagaaagaataaaaattgcttcaatct

SEQ ID NO: 176254 - DNA, 1061 bp, Homo sapiens
  Payload ID: 14609
  Gene Symbol: RNASE6
  Gene Name: ribonuclease, RNase A family, k6
  Uniprot ID: Q93091
  ENST ID: ENST00000304677
  CDS Start-End: 294-746
gttttcagtcatgttgtttctttaagttggtttagccttcctgtatacatgtgataatgatactgttttaaagaacaggtgtgaaagtctaagagtttaatccagactctgcacaagaagttaatctgccaaaccctaggattctccttctgaaagctcagaatatttcttccccttccctatacacacagggctcgaagggttagagaagaaaggcagacaacagcttctgagctttggactaatcacagcctctgttctcagcaggagccccaacactgagaccagaaaagatggtgctatgctttcctcttcttttactgctgctggttctatggggaccagtgtgtccacttcatgcttggcctaagcgtctcaccaaggctcactggtttgaaattcagcatatacagccaagtcctctccaatgcaacagggcaatgagtggcatcaacaattatacccagcactgtaagcatcaaaatacctttctgcatgactctttccagaatgtggctgctgtctgtgatttgctcagcattgtctgcaaaaatcgtcggcacaactgccaccagagctcaaagcctgtcaacatgactgactgcagactcacttcaggaaagtatccccagtgccgctatagtgctgctgcccagtacaaattcttcattgttgcctgtgacccccctcagaagagcgatcccccctacaagttggttcctgtacacttagatagtattctctaaggcatccactgcatttcctttcatttgacatagcttctgttacaattgcatccatgttttcttttcttttgttgattttcttgttcccgtagaagaaagaagaaaggtgtttggagaattcgagtgcctaggatgccagaccagagttgagacaaaaagaaataagattattttctgctttgtagttctgtacttttcgagagaagggaatagggaagacagcaaagaaagattcagatttctaaccctgcaacttttgccaagctttattgccctgtgttcacagcaataaaaccacttcctgctgcattctaa

SEQ ID NO: 176255 - DNA, 952 bp, Homo sapiens
  Payload ID: 14610
  Gene Symbol: RNASEK
  Gene Name: ribonuclease, RNase K
  ENST ID: ENST00000546395
  CDS Start-End: 107-304
acagaggtcaaggaaggtttccccaggagcagttttggtttcagacggcgccgtctcccgcgaaagtcctgagaggagcccagccttttccgcctgccgcccccggatgggatggttgaggccggggccacgccccctctgcccccctgcgagggcatcctgggctttctcccaccgctttccgagcccgcttgcacctcggcgatccccgactcccttctttatggcgtcgctcctgtgctgtgggccgaagctggccgcctgcggcatcgtcctcagcgcctggggagtgatcatgttgtaatccacccaccgccacttcaagaagaaatgatatgaagaagtgccggttctccctcccctcttccgcactgtcccgtgatgatgacgcctccagagaggacgataatctgggttcctgggagagatggcttggtcactattcccacccttgcctcgaccacttgtctcaatgtcaccacctcacgccctgttccagataatgctcggaatatttttcaatgtccattccgctgtgttgattgaggacgttcccttcacggagaaagattttgagaatggcccccagaacatatacaacctttacgagcaagtcagctacaactgtttcatcgctgcaggcctttacctcctcctcggaggcttctctttctgccaagttcggctcaataagcgcaaggaatacatggtgcgctagggccccggcgcgtttccccgctccagcccctcctctatttaaagactccctgcaccgtgtcacccaggtcgcgtcccacccttgccggcgccctctgcgggactgggtttcccgggcgagagactgaatcccttctcccatctctggcatccggcccccgtggagagggctgaggctggggggctgttccgtttctccacccttcgctgtgtcccgtatctcaataaagagaat

SEQ ID NO: 176256 - DNA, 591 bp, Homo sapiens
  Payload ID: 14610
  Gene Symbol: RNASEK
  Gene Name: ribonuclease, RNase K
  ENST ID: ENST00000552039
  CDS Start-End: 130-345
ccaccgctttccgagcccgcttgcacctcggcgatccccgactcccttctttatggcgtcgctcctgtgctgtgggccgaagctggccgcctgcggcatcgtcctcagcgcctggggagtgatcatataatgctcggaatatttttcaatgtccattccgctgtgttgattgaggacgttcccttcacggagaaagattttgagaatggcccccagaacatatacaacctttacgagcaagtcagctacaactgtttcatcgctgcaggcctttacctcctcctcggaggcttctctttctgccaagttcggctcaataagcgcaaggaatacatggtgcgctagggccccggcgcgtttccccgctccagcccctcctctatttaaagactccctgcaccgtgtcacccaggtcgcgtcccacccttgccggcgccctctgcgggactgggtttcccgggcgagagactgaatcccttctcccatctctggcatccggcccccgtggagagggctgaggctggggggctgttccgtttctccacccttcgctgtgtcccgtatctcaataaagagaatctgctctcttca

SEQ ID NO: 176257 - DNA, 810 bp, Homo sapiens
  Payload ID: 14610
  Gene Symbol: RNASEK
  Gene Name: ribonuclease, RNase K
  Uniprot ID: Q6P5S7
  ENST ID: ENST00000548577
  CDS Start-End: 151-564
aacaaaccggaggccctcgctcttccaatactcacgccctagctacagaggtcaaggaaggtttccccaggagcagttttggtttcagacggcgccgtctcccgcgaaagtcctgagaggagcccagccttttccgcctgccgcccccggatgggatggttgaggccggggccacgccccctctgcccccctgcgagggcatcctgggctttctcccaccgctttccgagcccgcttgcacctcggcgatccccgactcccttctttatggcgtcgctcctgtgctgtgggccgaagctggccgcctgcggcatcgtcctcagcgcctggggagtgatcatgttgataatgctcggaatatttttcaatgtccattccgctgtgttgattgaggacgttcccttcacggagaaagattttgagaatggcccccagaacatatacaacctttacgagcaagtcagctacaactgtttcatcgctgcaggcctttacctcctcctcggaggcttctctttctgccaagttcggctcaataagcgcaaggaatacatggtgcgctagggccccggcgcgtttccccgctccagcccctcctctatttaaagactccctgcaccgtgtcacccaggtcgcgtcccacccttgccggcgccctctgcgggactgggtttcccgggcgagagactgaatcccttctcccatctctggcatccggcccccgtggagagggctgaggctggggggctgttccgtttctccacccttcgctgtgtcccgtatctcaataaagagaatctgctctcttca

SEQ ID NO: 176258 - DNA, 595 bp, Homo sapiens
  Payload ID: 14610
  Gene Symbol: RNASEK
  Gene Name: ribonuclease, RNase K
  ENST ID: ENST00000552842
  CDS Start-End: 39-179
gcccgcttgcacctcggcgatccccgactcccttctttatggcgtcgctcctgtgctgtgggccgaagctggccgcctgcggcatcgtcctcagcgcctggggagtgatcatgttggtgaggggactccccgataatgctcggaatatttttcaatgtccattccgctgtgttgattgaggacgttcccttcacggagaaagattttgagaatggcccccagaacatatacaacctttacgagcaagtcagctacaactgtttcatcgctgcaggcctttacctcctcctcggaggcttctctttctgccaagttcggctcaataagcgcaaggaatacatggtgcgctagggccccggcgcgtttccccgctccagcccctcctctatttaaagactccctgcaccgtgtcacccaggtcgcgtcccacccttgccggcgccctctgcgggactgggtttcccgggcgagagactgaatcccttctcccatctctggcatccggcccccgtggagagggctgaggctggggggctgttccgtttctccacccttcgctgtgtcccgtatctcaataaagagaatctgctctctt

SEQ ID NO: 176259 - DNA, 783 bp, Homo sapiens
  Payload ID: 14610
  Gene Symbol: RNASEK
  Gene Name: ribonuclease, RNase K
  ENST ID: ENST00000549393
  CDS Start-End: 149-550
ccgcttgcacctcggcgatccccgactcccttctttatggcgtcgctcctgtgctgtgggccgaagctggccgcctgcggcatcgtcctcagcgcctggggagtgatcatgttgtaatccacccaccgccacttcaagaagaaatgatatgaagaagtgccggttctccctcccctcttccgcactgtcccgtgatgatgacgcctccagagaggacgataatctgggttcctgggagagatggcttggtcactattcccacccttgcctcgaccacttgtctcaatgtcaccacctcacgccctgttccaggtggctgagtccgaatccaataatgctcggaatatttttcaatgtccattccgctgtgttgattgaggacgttcccttcacggagaaagattttgagaatggcccccagaacatatacaacctttacgagcaagtcagctacaactgtttcatcgctgcaggcctttacctcctcctcggaggcttctctttctgccaagttcggctcaataagcgcaaggaatacatggtgcgctagggccccggcgcgtttccccgctccagcccctcctctatttaaagactccctgcaccgtgtcacccaggtcgcgtcccacccttgccggcgccctctgcgggactgggtttcccgggcgagagactgaatcccttctcccatctctggcatccggcccccgtggagagggctgaggctggggggctgttccgtttctccacccttcgctgtgtcccgtatctcaataaagagaa

SEQ ID NO: 176260 - DNA, 739 bp, Homo sapiens
  Payload ID: 14610
  Gene Symbol: RNASEK
  Gene Name: ribonuclease, RNase K
  ENST ID: ENST00000552321
  CDS Start-End: 123-290
cctgagaggtgcttgagttgaatggaggacatgggaggaaaagagagtgcttgttccagaaatgtgtagctgggccttgttttcccagtaatccacccaccgccacttcaagaagaaatgatatgaagaagtgccggttctccctcccctcttccgcactgtcccgtgatgatgacgcctccagagaggacgataatctgggttcctgggagagatggcttggtcactattcccacccttgcctcgaccacttgtctcaatgtcaccacctcacgccctgttccagataatgctcggaatatttttcaatgtccattccgctgtgttgattgaggacgttcccttcacggagaaagattttgagaatggcccccagaacatatacaacctttacgagcaagtcagctacaactgtttcatcgctgcaggcctttacctcctcctcggaggcttctctttctgccaagttcggctcaataagcgcaaggaatacatggtgcgctagggccccggcgcgtttccccgctccagcccctcctctatttaaagactccctgcaccgtgtcacccaggtcgcgtcccacccttgccggcgccctctgcgggactgggtttcccgggcgagagactgaatcccttctcccatctctggcatccggcccccgtggagagggctgaggctggggggctgttccgtttctccacccttcgctgtgtcccgtatctcaataaagagaat

SEQ ID NO: 176261 - DNA, 425 bp, Homo sapiens
  Payload ID: 14610
  Gene Symbol: RNASEK
  Gene Name: ribonuclease, RNase K
  ENST ID: ENST00000570898
  CDS Start-End: 166-381
gggctttctcccaccgctttccgagcccgcttgcacctcggcgatccccgactcccttctttatggcgtcgctcctgtgctgtgggccgaagctggccgcctgcggcatcgtcctcagcgcctggggagtgatcatgttgtctacccattccccttttccagataatgctcggaatatttttcaatgtccattccgctgtgttgattgaggacgttcccttcacggagaaagattttgagaatggcccccagaacatatacaacctttacgagcaagtcagctacaactgtttcatcgctgcaggcctttacctcctcctcggaggcttctctttctgccaagttcggctcaataagcgcaaggaatacatggtgcgctagggccccggcgcgtttccccgctccagcccctcctctatttaaag

SEQ ID NO: 176262 - DNA, 566 bp, Homo sapiens
  Payload ID: 14610
  Gene Symbol: RNASEK
  Gene Name: ribonuclease, RNase K
  ENST ID: ENST00000593646
  CDS Start-End: 74-370
gagggcatcctgggctttctcccaccgctttccgagcccgcttgcacctcggcgatccccgactcccttctttatggcgtcgctcctgtgctgtgggccgaagctggccgcctgcggcatcgtcctcagcgcctggggagtgatcatgttgataatgctcggaatatttttcaatgtccattccgctgtgttgattgaggacgttcccttcacggagaaagattttgagaatggcccccagaacatatacaacctttacgagcaagtcagctacaactgtttcatcgctgcaggcctttacctcctcctcggaggcttctctttctgccaagttcggctcaataagcgcaaggaatacatggtgcgctagggccccggcgcgtttccccgctccagcccctcctctatttaaagactccctgcaccgtgtcacccaggtcgcgtcccacccttgccggcgccctctgcgggactgggtttcccgggcgagagactgaatcccttctcccatctctggcatccggcccccgtggagagggctgaggctggggggctgttccgtttct

SEQ ID NO: 176263 - DNA, 1894 bp, Homo sapiens
  Payload ID: 14611
  Gene Symbol: RNH1
  Gene Name: ribonuclease/angiogenin inhibitor 1
  Uniprot ID: P13489
  ENST ID: ENST00000354420
  CDS Start-End: 370-1755
tggcgggtggggttgtcgacacgttcaacccgttctgctggctcgagaacgaagtaggccgtctcgctctgggtctccaggcccgcgaccgtccgccagtcgtcccgaggcatgaagaactcttgactgacagaaacggagggtgtgtccaaagttttgaggacggccgagcggcgctccaaaacccgtcctcacagcctcgccccgttcgcctcagctacaacaaatcatcgtcaacctgttccaccttctccagtctggtagcaaaaaggggtgtctcagaatctccggcctgtgaaactgtgaggggattcggccaagacgtcctcttccctctgcctcccacccaggccactcttcacctccaccatgagcctggacatccagagcctggacatccagtgtgaggagctgagcgacgctagatgggccgagctcctccctctgctccagcagtgccaagtggtcaggctggacgactgtggcctcacggaagcacggtgcaaggacatcagctctgcacttcgagtcaaccctgcactggcagagctcaacctgcgcagcaacgagctgggcgatgtcggcgtgcattgcgtgctccagggcctgcagaccccctcctgcaagatccagaagctgagcctccagaactgctgcctgacgggggccggctgcggggtcctgtccagcacactacgcaccctgcccaccctgcaggagctgcacctcagcgacaacctcttgggggatgcgggcctgcagctgctctgcgaaggactcctggacccccagtgccgcctggaaaagctgcagctggagtattgcagcctctcggctgccagctgcgagcccctggcctccgtgctcagggccaagccggacttcaaggagctcacggttagcaacaacgacatcaatgaggctggcgtccgtgtgctgtgccagggcctgaaggactccccctgccagctggaggcgctcaagctggagagctgcggtgtgacatcagacaactgccgggacctgtgcggcattgtggcctccaaggcctcgctgcgggagctggccctgggcagcaacaagctgggtgatgtgggcatggcggagctgtgcccagggctgctccaccccagctccaggctcaggaccctgtggatctgggagtgtggcatcactgccaagggctgcggggatctgtgccgtgtcctcagggccaaggagagcctgaaggagctcagcctggccggcaacgagctgggggatgagggtgcccgactgctgtgtgagaccctgctggaacctggctgccagctggagtcgctgtgggtgaagtcctgcagcttcacagccgcctgctgctcccacttcagctcagtgctggcccagaacaggtttctcctggagctacagataagcaacaacaggctggaggatgcgggcgtgcgggagctgtgccagggcctgggccagcctggctctgtgctgcgggtgctctggttggccgactgcgatgtgagtgacagcagctgcagcagcctcgccgcaaccctgttggccaaccacagcctgcgtgagctggacctcagcaacaactgcctgggggacgccggcatcctgcagctggtggagagcgtccggcagccgggctgcctcctggagcagctggtcctgtacgacatttactggtctgaggagatggaggaccggctgcaggccctggagaaggacaagccatccctgagggtcatctcctgaggctcttcctgctgctgctctccctggacgaccggcctcgaggcaaccctggggcccaccagcccctgccatgctctcaccctgcatatcctaggtttgaagagaaacgctcagatccgcttatttctgccagtatatt

SEQ ID NO: 176264 - DNA, 1791 bp, Homo sapiens
  Payload ID: 14611
  Gene Symbol: RNH1
  Gene Name: ribonuclease/angiogenin inhibitor 1
  Uniprot ID: P13489
  ENST ID: ENST00000356187
  CDS Start-End: 276-1661
gccgagccccgcccagtagtccccgcccacgcacctgaccacgcccacgagccggctcgaacacgcccgcgccgctgactggcgggtggggttgtcgacacgttcaacccgttctgctggctcgagaacgaagtaggccgtctcgctctgggtctccaggcccgcgaccgtccgccagtcgtcccgagaatctccggcctgtgaaactgtgaggggattcggccaagacgtcctcttccctctgcctcccacccaggccactcttcacctccaccatgagcctggacatccagagcctggacatccagtgtgaggagctgagcgacgctagatgggccgagctcctccctctgctccagcagtgccaagtggtcaggctggacgactgtggcctcacggaagcacggtgcaaggacatcagctctgcacttcgagtcaaccctgcactggcagagctcaacctgcgcagcaacgagctgggcgatgtcggcgtgcattgcgtgctccagggcctgcagaccccctcctgcaagatccagaagctgagcctccagaactgctgcctgacgggggccggctgcggggtcctgtccagcacactacgcaccctgcccaccctgcaggagctgcacctcagcgacaacctcttgggggatgcgggcctgcagctgctctgcgaaggactcctggacccccagtgccgcctggaaaagctgcagctggagtattgcagcctctcggctgccagctgcgagcccctggcctccgtgctcagggccaagccggacttcaaggagctcacggttagcaacaacgacatcaatgaggctggcgtccgtgtgctgtgccagggcctgaaggactccccctgccagctggaggcgctcaagctggagagctgcggtgtgacatcagacaactgccgggacctgtgcggcattgtggcctccaaggcctcgctgcgggagctggccctgggcagcaacaagctgggtgatgtgggcatggcggagctgtgcccagggctgctccaccccagctccaggctcaggaccctgtggatctgggagtgtggcatcactgccaagggctgcggggatctgtgccgtgtcctcagggccaaggagagcctgaaggagctcagcctggccggcaacgagctgggggatgagggtgcccgactgctgtgtgagaccctgctggaacctggctgccagctggagtcgctgtgggtgaagtcctgcagcttcacagccgcctgctgctcccacttcagctcagtgctggcccagaacaggtttctcctggagctacagataagcaacaacaggctggaggatgcgggcgtgcgggagctgtgccagggcctgggccagcctggctctgtgctgcgggtgctctggttggccgactgcgatgtgagtgacagcagctgcagcagcctcgccgcaaccctgttggccaaccacagcctgcgtgagctggacctcagcaacaactgcctgggggacgccggcatcctgcagctggtggagagcgtccggcagccgggctgcctcctggagcagctggtcctgtacgacatttactggtctgaggagatggaggaccggctgcaggccctggagaaggacaagccatccctgagggtcatctcctgaggctcttcctgctgctgctctccctggacgaccggcctcgaggcaaccctggggcccaccagcccctgccatgctctcaccctgcatatcctaggtttgaagagaaacgctcagatccgcttatttctgc

SEQ ID NO: 176265 - DNA, 1722 bp, Homo sapiens
  Payload ID: 14611
  Gene Symbol: RNH1
  Gene Name: ribonuclease/angiogenin inhibitor 1
  Uniprot ID: P13489
  ENST ID: ENST00000397604
  CDS Start-End: 161-1546
cgagccggctcgaacacgcccgcgccgctgactggcgggtggggttgtcgacacgttcaacccgttctgctggctcgagaacgaagtaggccgtctcgctctgggtctccaggcccgcgaccgtccgccagtcgtcccgaggccactcttcacctccaccatgagcctggacatccagagcctggacatccagtgtgaggagctgagcgacgctagatgggccgagctcctccctctgctccagcagtgccaagtggtcaggctggacgactgtggcctcacggaagcacggtgcaaggacatcagctctgcacttcgagtcaaccctgcactggcagagctcaacctgcgcagcaacgagctgggcgatgtcggcgtgcattgcgtgctccagggcctgcagaccccctcctgcaagatccagaagctgagcctccagaactgctgcctgacgggggccggctgcggggtcctgtccagcacactacgcaccctgcccaccctgcaggagctgcacctcagcgacaacctcttgggggatgcgggcctgcagctgctctgcgaaggactcctggacccccagtgccgcctggaaaagctgcagctggagtattgcagcctctcggctgccagctgcgagcccctggcctccgtgctcagggccaagccggacttcaaggagctcacggttagcaacaacgacatcaatgaggctggcgtccgtgtgctgtgccagggcctgaaggactccccctgccagctggaggcgctcaagctggagagctgcggtgtgacatcagacaactgccgggacctgtgcggcattgtggcctccaaggcctcgctgcgggagctggccctgggcagcaacaagctgggtgatgtgggcatggcggagctgtgcccagggctgctccaccccagctccaggctcaggaccctgtggatctgggagtgtggcatcactgccaagggctgcggggatctgtgccgtgtcctcagggccaaggagagcctgaaggagctcagcctggccggcaacgagctgggggatgagggtgcccgactgctgtgtgagaccctgctggaacctggctgccagctggagtcgctgtgggtgaagtcctgcagcttcacagccgcctgctgctcccacttcagctcagtgctggcccagaacaggtttctcctggagctacagataagcaacaacaggctggaggatgcgggcgtgcgggagctgtgccagggcctgggccagcctggctctgtgctgcgggtgctctggttggccgactgcgatgtgagtgacagcagctgcagcagcctcgccgcaaccctgttggccaaccacagcctgcgtgagctggacctcagcaacaactgcctgggggacgccggcatcctgcagctggtggagagcgtccggcagccgggctgcctcctggagcagctggtcctgtacgacatttactggtctgaggagatggaggaccggctgcaggccctggagaaggacaagccatccctgagggtcatctcctgaggctcttcctgctgctgctctccctggacgaccggcctcgaggcaaccctggggcccaccagcccctgccatgctctcaccctgcatatcctaggtttgaagagaaacgctcagatccgcttatttctgccagtatattttggacactttataatcattaaagcactttcttggca

SEQ ID NO: 176266 - DNA, 1864 bp, Homo sapiens
  Payload ID: 14611
  Gene Symbol: RNH1
  Gene Name: ribonuclease/angiogenin inhibitor 1
  Uniprot ID: P13489
  ENST ID: ENST00000397614
  CDS Start-End: 301-1686
ggctgcgcctgcgtggttcgtcctcacgtggccgtcaagccctctagtgccttagattccagcgagctacgcaagcaatcctggcccagccgagcttgcttccccaaatcccgtaatccttgaccttattcccccaaagaagcggcctcccgggaaggagcgccctggcggagaagactcgaacggctcccacagccgggcgttgggggaaagaatctccggcctgtgaaactgtgaggggattcggccaagacgtcctcttccctctgcctcccacccaggccactcttcacctccaccatgagcctggacatccagagcctggacatccagtgtgaggagctgagcgacgctagatgggccgagctcctccctctgctccagcagtgccaagtggtcaggctggacgactgtggcctcacggaagcacggtgcaaggacatcagctctgcacttcgagtcaaccctgcactggcagagctcaacctgcgcagcaacgagctgggcgatgtcggcgtgcattgcgtgctccagggcctgcagaccccctcctgcaagatccagaagctgagcctccagaactgctgcctgacgggggccggctgcggggtcctgtccagcacactacgcaccctgcccaccctgcaggagctgcacctcagcgacaacctcttgggggatgcgggcctgcagctgctctgcgaaggactcctggacccccagtgccgcctggaaaagctgcagctggagtattgcagcctctcggctgccagctgcgagcccctggcctccgtgctcagggccaagccggacttcaaggagctcacggttagcaacaacgacatcaatgaggctggcgtccgtgtgctgtgccagggcctgaaggactccccctgccagctggaggcgctcaagctggagagctgcggtgtgacatcagacaactgccgggacctgtgcggcattgtggcctccaaggcctcgctgcgggagctggccctgggcagcaacaagctgggtgatgtgggcatggcggagctgtgcccagggctgctccaccccagctccaggctcaggaccctgtggatctgggagtgtggcatcactgccaagggctgcggggatctgtgccgtgtcctcagggccaaggagagcctgaaggagctcagcctggccggcaacgagctgggggatgagggtgcccgactgctgtgtgagaccctgctggaacctggctgccagctggagtcgctgtgggtgaagtcctgcagcttcacagccgcctgctgctcccacttcagctcagtgctggcccagaacaggtttctcctggagctacagataagcaacaacaggctggaggatgcgggcgtgcgggagctgtgccagggcctgggccagcctggctctgtgctgcgggtgctctggttggccgactgcgatgtgagtgacagcagctgcagcagcctcgccgcaaccctgttggccaaccacagcctgcgtgagctggacctcagcaacaactgcctgggggacgccggcatcctgcagctggtggagagcgtccggcagccgggctgcctcctggagcagctggtcctgtacgacatttactggtctgaggagatggaggaccggctgcaggccctggagaaggacaagccatccctgagggtcatctcctgaggctcttcctgctgctgctctccctggacgaccggcctcgaggcaaccctggggcccaccagcccctgccatgctctcaccctgcatatcctaggtttgaagagaaacgctcagatccgcttatttctgccagtatattttggacactttataatcattaaagcactttcttggcagg

SEQ ID NO: 176267 - DNA, 2014 bp, Homo sapiens
  Payload ID: 14611
  Gene Symbol: RNH1
  Gene Name: ribonuclease/angiogenin inhibitor 1
  Uniprot ID: P13489
  ENST ID: ENST00000397615
  CDS Start-End: 453-1838
cctcacgtggccgtcaagccctctagtgccttagattccagcgagctacgcaagcaatcctggcccagccgagcttgcttccccaaatcccgtaatccttgaccttattcccccaaagaagcggcctcccgggaaggagcgccctggcggagaagactcgaacggctcccacagccgggcgttgggggaaaggcatgaagaactcttgactgacagaaacggagggtgtgtccaaagttttgaggacggccgagcggcgctccaaaacccgtcctcacagcctcgccccgttcgcctcagctacaacaaatcatcgtcaacctgttccaccttctccagtctggtagcaaaaaggggtgtctcagaatctccggcctgtgaaactgtgaggggattcggccaagacgtcctcttccctctgcctcccacccaggccactcttcacctccaccatgagcctggacatccagagcctggacatccagtgtgaggagctgagcgacgctagatgggccgagctcctccctctgctccagcagtgccaagtggtcaggctggacgactgtggcctcacggaagcacggtgcaaggacatcagctctgcacttcgagtcaaccctgcactggcagagctcaacctgcgcagcaacgagctgggcgatgtcggcgtgcattgcgtgctccagggcctgcagaccccctcctgcaagatccagaagctgagcctccagaactgctgcctgacgggggccggctgcggggtcctgtccagcacactacgcaccctgcccaccctgcaggagctgcacctcagcgacaacctcttgggggatgcgggcctgcagctgctctgcgaaggactcctggacccccagtgccgcctggaaaagctgcagctggagtattgcagcctctcggctgccagctgcgagcccctggcctccgtgctcagggccaagccggacttcaaggagctcacggttagcaacaacgacatcaatgaggctggcgtccgtgtgctgtgccagggcctgaaggactccccctgccagctggaggcgctcaagctggagagctgcggtgtgacatcagacaactgccgggacctgtgcggcattgtggcctccaaggcctcgctgcgggagctggccctgggcagcaacaagctgggtgatgtgggcatggcggagctgtgcccagggctgctccaccccagctccaggctcaggaccctgtggatctgggagtgtggcatcactgccaagggctgcggggatctgtgccgtgtcctcagggccaaggagagcctgaaggagctcagcctggccggcaacgagctgggggatgagggtgcccgactgctgtgtgagaccctgctggaacctggctgccagctggagtcgctgtgggtgaagtcctgcagcttcacagccgcctgctgctcccacttcagctcagtgctggcccagaacaggtttctcctggagctacagataagcaacaacaggctggaggatgcgggcgtgcgggagctgtgccagggcctgggccagcctggctctgtgctgcgggtgctctggttggccgactgcgatgtgagtgacagcagctgcagcagcctcgccgcaaccctgttggccaaccacagcctgcgtgagctggacctcagcaacaactgcctgggggacgccggcatcctgcagctggtggagagcgtccggcagccgggctgcctcctggagcagctggtcctgtacgacatttactggtctgaggagatggaggaccggctgcaggccctggagaaggacaagccatccctgagggtcatctcctgaggctcttcctgctgctgctctccctggacgaccggcctcgaggcaaccctggggcccaccagcccctgccatgctctcaccctgcatatcctaggtttgaagagaaacgctcagatccgcttatttctgccagtatattttggacactttataatcattaaagcactttcttggca

SEQ ID NO: 176268 - DNA, 1725 bp, Homo sapiens
  Payload ID: 14611
  Gene Symbol: RNH1
  Gene Name: ribonuclease/angiogenin inhibitor 1
  Uniprot ID: P13489
  ENST ID: ENST00000438658
  CDS Start-End: 197-1582
aagccctctagtgccttagattccagcgagctacgcaagcaatcctggcccagccgagcttgcttccccaaatcccgtaatccttgaccttattcccccaaagaagcggcctcccgggaaggagcgccctggcggagaagactcgaacggctcccacagccgggcgttgggggaaaggccactcttcacctccaccatgagcctggacatccagagcctggacatccagtgtgaggagctgagcgacgctagatgggccgagctcctccctctgctccagcagtgccaagtggtcaggctggacgactgtggcctcacggaagcacggtgcaaggacatcagctctgcacttcgagtcaaccctgcactggcagagctcaacctgcgcagcaacgagctgggcgatgtcggcgtgcattgcgtgctccagggcctgcagaccccctcctgcaagatccagaagctgagcctccagaactgctgcctgacgggggccggctgcggggtcctgtccagcacactacgcaccctgcccaccctgcaggagctgcacctcagcgacaacctcttgggggatgcgggcctgcagctgctctgcgaaggactcctggacccccagtgccgcctggaaaagctgcagctggagtattgcagcctctcggctgccagctgcgagcccctggcctccgtgctcagggccaagccggacttcaaggagctcacggttagcaacaacgacatcaatgaggctggcgtccgtgtgctgtgccagggcctgaaggactccccctgccagctggaggcgctcaagctggagagctgcggtgtgacatcagacaactgccgggacctgtgcggcattgtggcctccaaggcctcgctgcgggagctggccctgggcagcaacaagctgggtgatgtgggcatggcggagctgtgcccagggctgctccaccccagctccaggctcaggaccctgtggatctgggagtgtggcatcactgccaagggctgcggggatctgtgccgtgtcctcagggccaaggagagcctgaaggagctcagcctggccggcaacgagctgggggatgagggtgcccgactgctgtgtgagaccctgctggaacctggctgccagctggagtcgctgtgggtgaagtcctgcagcttcacagccgcctgctgctcccacttcagctcagtgctggcccagaacaggtttctcctggagctacagataagcaacaacaggctggaggatgcgggcgtgcgggagctgtgccagggcctgggccagcctggctctgtgctgcgggtgctctggttggccgactgcgatgtgagtgacagcagctgcagcagcctcgccgcaaccctgttggccaaccacagcctgcgtgagctggacctcagcaacaactgcctgggggacgccggcatcctgcagctggtggagagcgtccggcagccgggctgcctcctggagcagctggtcctgtacgacatttactggtctgaggagatggaggaccggctgcaggccctggagaaggacaagccatccctgagggtcatctcctgaggctcttcctgctgctgctctccctggacgaccggcctcgaggcaaccctggggcccaccagcccctgccatgctctcaccctgcatatcctaggtttgaagagaaacgctcagatccgcttatttctgccagtatattttgg

SEQ ID NO: 176269 - DNA, 624 bp, Homo sapiens
  Payload ID: 14611
  Gene Symbol: RNH1
  Gene Name: ribonuclease/angiogenin inhibitor 1
  ENST ID: ENST00000524464
  CDS Start-End: 135-368
gctgactggcgggtggggttgtcgacacgttcaacccgttctgctggctcgagaacgaagtaggccgtctcgctctgggtctccaggcccgcgaccgtccgccagtcgtcccgaggccactcttcacctccaccatgagcctggacatccagagcctggacatccagtgtgaggagctgagcgacgctagatgggccgagctcctccctctgctccagcagtgccaagtggtcaggctggacgactgtggcctcacggaagcacggtgcaaggacatcagctctgcacttcgagtcaaccctgcactggcagagctcaacctgcgcagcaacgagctgggcgatgtcgggtgcccgactgctgtgtgagaccctgctggaacctggctgccagctggagtcgctgtgggtgaagtcctgcagcttcacagccgcctgctgctcccacttcagctcagtgctggcccagaacaggtttctcctggagctacagataagcaacaacaggctggaggatgcgggcgtgcgggagctgtgccagggcctgggccagcctggctctgtgctgcgggtgctctggttggccgactgcgatgtgagtgacagcagctgcagcagcctcgcc

SEQ ID NO: 176270 - DNA, 1019 bp, Homo sapiens
  Payload ID: 14611
  Gene Symbol: RNH1
  Gene Name: ribonuclease/angiogenin inhibitor 1
  ENST ID: ENST00000529768
  CDS Start-End: 1-858
gagagctgcggtgtgacatcagacaactgccgggacctgtgcggcattgtggcctccaaggcctcgctgcgggagctggccctgggcagcaacaagctgggtgatgtgggcatggcggagctgtgcccagggctgctccaccccagctccaggctcaggaccctgtggatctgggagtgtggcatcactgccaagggctgcggggatctgtgccgtgtcctcagggccaaggagagcctgaaggagctcagcctggccggcaacgagctgggggatgagggtgcccgactgctgtgtgagaccctgctggaacctggctgccagctggagtcgctgtgggtgaagtcctgcagcttcacagccgcctgctgctcccacttcagctcagtgctggcccagaacaggtttctcctggagctacagataagcaacaacaggctggaggatgcgggcgtgcgggagctgtgccagggcctgggccagcctggctctgtgctgcgggtgctctggttggccgactgcgatgtgagtgacagcagctgcagcagcctcgccgcaaccctgttggccaaccacagcctgcgtgagctggacctcagcaacaactgcctgggggacgccggcatcctgcagctggtggagagcgtccggcagccgggctgcctcctggagcagctggtgtatgtgcacgcgctgggcgggtggtgcggccagggctgcccagggaggaaggcgggggtgggggaggacacgggcccatgcctcccttctggcctgtgtgcagcctgtacgacatttactggtctgaggagatggaggaccggctgcaggccctggagaaggacaagccatccctgagggtcatctcctgaggctcttcctgctgctgctctccctggacgaccggcctcgaggcaaccctggggcccaccagcccctgccatgctctcaccctgcatatcctaggtttgaagagaaacgctcagatccgcttatttctgccagtatattttggacac

SEQ ID NO: 176271 - DNA, 480 bp, Homo sapiens
  Payload ID: 14611
  Gene Symbol: RNH1
  Gene Name: ribonuclease/angiogenin inhibitor 1
  ENST ID: ENST00000531540
  CDS Start-End: 455-480
agaggacttctgcaccgtttcccgaggacagtttggcagtgtttcagaagggccttagaaccaggcaggcccccttctaggatggtggaaagcctaaagatctgaaaacggtctcaagtgtcgtcttagcgattggctgactaaaccgaatgcaagccggagactgcacacgatgttgccgttaacagttacactgggccgggcagtcagaggcaggcggatcacctgaggtcaggagttcgagaacagcctggccaacatggcatgaagaactcttgactgacagaaacggagggtgtgtccaaagttttgaggacggccgagcggcgctccaaaacccgtcctcacagcctcgccccgttcgcctcagctacaacaaatcatcgtcaacctgttccaccttctccagtctggtagcaaaaaggggtgtctcaggccactcttcacctccaccatgagcctggacatccagagcctgga

SEQ ID NO: 176272 - DNA, 855 bp, Homo sapiens
  Payload ID: 14611
  Gene Symbol: RNH1
  Gene Name: ribonuclease/angiogenin inhibitor 1
  ENST ID: ENST00000529115
  CDS Start-End: 172-678
gaccacgcccacgagccggctcgaacacgcccgcgccgctgactggcgggtggggttgtcgacacgttcaacccgttctgctggctcgagaacgaagtaggccgtctcgctctgggtctccaggcccgcgaccgtccgccagtcgtcccgaggccactcttcacctccaccatgagcctggacatccagagcctggacatccagtgtgaggagctgagcgacgctagatgggccgagctcctccctctgctccagcagtgccaagtggtcaggctggacgactgtggcctcacggaagcacggtgcaaggacatcagctctgcacttcgagtcaaccctgcactggcagagctcaacctgcgcagcaacgagctgggcgatgtcggcgtgcattgcgtgctccagggcctgcagaccccctcctgcaagatccagaagctgaggagctgcacctcagcgacaacctcttgggggatgcgggcctgcagctgctctgcgaaggactcctggacccccagtgccgcctggaaaagctgcagctggagtattgcagcctctcggctgccagctgcgagcccctggcctccgtgctcagggccaagccggacttcaaggagctcacggttagcaacaacgacatcaatgaggctggcgtccgtgtgctgtgccagggcctgaaggactccccctgccagctggaggcgctcaagctggagagctgcggtgtgacatcagacaactgccgggacctgtgcggcattgtggcctccaaggcctcgctgcgggagctggccctgggcagcaacaagctgggtgatgtgggcatggcggagctgtgcccagggctgctccacc

SEQ ID NO: 176273 - DNA, 2973 bp, Homo sapiens
  Payload ID: 14611
  Gene Symbol: RNH1
  Gene Name: ribonuclease/angiogenin inhibitor 1
  Uniprot ID: P13489
  ENST ID: ENST00000534797
  CDS Start-End: 1409-2794
cacaccctggtcggttttgctcacgtgcttcgggtcggttggattcagttcctccatgtggggccgtgggatgtcaccaccctttgccactgtccttgcaggccgggcgcccaggcgtgtggacccgagcccagccttgcgtctttcctcccagttggtaccaggggcctcttgcctccactcatgcagagtggaccagccgcctctgaagcagccccggggagaggagtgccaggcacacagactcaggaagctgggggtgtcagggcaccaggagcctctcaagcggtcctgttggccgtctttctgaagggcagctggggttgcatcatttccccaagtggatcctgccaactttctggggcttctggatgagagccctctccccaccccacccacccctccccgcattgtggcatcagtgctgctgcttccagggagccttcctggccatccaagcctcctctccaggttcctgccctgctgtagtccccaggccagtgcttggcaggtgctcagggaatgtatccaccaaccaaggtttggggtggctgtctctgcctgaccactttccccaggcccctggcgggtacctgagctgtgctctcagggcctcaggaacctccttccatattcagggcctgtgcctggggaggcttcagggtgtagcagctgtgcccatcccaggctgacccacccagcttgcctggtagcccagcctctgggctagtgtgccgtggggcaggggatgtgctgtagcctggtgcagagtccccaaccccagaagggggccatggaagctgacaccccaagtggccgcccccctgctctgtcttgcttcggacactgtggccgggtccaggatcctggcatcctgggaggtctctggctttgtgggcagcctgcctggcccgcacagtctgcctgtcctgagggtgagacacaggtcaagcccacagacccccttgctcccctgctggggcctccaggctcacagaccaccccaccctaccctgtccttgcccaagcaaatgagaggcaggggcttcccgggctgctgctgtcccgccctctgtggggcaggaggaggtgcccacagaggctgggtggtgatagccaggagatgggctggcatctgcattacccaagctctgctgcccatggtggcctttctgggggtgggtgctggtccctgccccctgccccacccctgatgtctgctccagagacaaaggtggggagggtgctgaagaggaagtgtttgcccagggagaggctgcggctcctcctgaaacatcagccctgtgggtcctgtttgcagaatctccggcctgtgaaactgtgaggggattcggccaagacgtcctcttccctctgcctcccacccaggccactcttcacctccaccatgagcctggacatccagagcctggacatccagtgtgaggagctgagcgacgctagatgggccgagctcctccctctgctccagcagtgccaagtggtcaggctggacgactgtggcctcacggaagcacggtgcaaggacatcagctctgcacttcgagtcaaccctgcactggcagagctcaacctgcgcagcaacgagctgggcgatgtcggcgtgcattgcgtgctccagggcctgcagaccccctcctgcaagatccagaagctgagcctccagaactgctgcctgacgggggccggctgcggggtcctgtccagcacactacgcaccctgcccaccctgcaggagctgcacctcagcgacaacctcttgggggatgcgggcctgcagctgctctgcgaaggactcctggacccccagtgccgcctggaaaagctgcagctggagtattgcagcctctcggctgccagctgcgagcccctggcctccgtgctcagggccaagccggacttcaaggagctcacggttagcaacaacgacatcaatgaggctggcgtccgtgtgctgtgccagggcctgaaggactccccctgccagctggaggcgctcaagctggagagctgcggtgtgacatcagacaactgccgggacctgtgcggcattgtggcctccaaggcctcgctgcgggagctggccctgggcagcaacaagctgggtgatgtgggcatggcggagctgtgcccagggctgctccaccccagctccaggctcaggaccctgtggatctgggagtgtggcatcactgccaagggctgcggggatctgtgccgtgtcctcagggccaaggagagcctgaaggagctcagcctggccggcaacgagctgggggatgagggtgcccgactgctgtgtgagaccctgctggaacctggctgccagctggagtcgctgtgggtgaagtcctgcagcttcacagccgcctgctgctcccacttcagctcagtgctggcccagaacaggtttctcctggagctacagataagcaacaacaggctggaggatgcgggcgtgcgggagctgtgccagggcctgggccagcctggctctgtgctgcgggtgctctggttggccgactgcgatgtgagtgacagcagctgcagcagcctcgccgcaaccctgttggccaaccacagcctgcgtgagctggacctcagcaacaactgcctgggggacgccggcatcctgcagctggtggagagcgtccggcagccgggctgcctcctggagcagctggtcctgtacgacatttactggtctgaggagatggaggaccggctgcaggccctggagaaggacaagccatccctgagggtcatctcctgaggctcttcctgctgctgctctccctggacgaccggcctcgaggcaaccctggggcccaccagcccctgccatgctctcaccctgcatatcctaggtttgaagagaaacgctcagatccgcttatttctgccagtatattttggacactttataatcattaaagcactttcttggcagga

SEQ ID NO: 176274 - DNA, 870 bp, Homo sapiens
  Payload ID: 14611
  Gene Symbol: RNH1
  Gene Name: ribonuclease/angiogenin inhibitor 1
  ENST ID: ENST00000529306
  CDS Start-End: 304-870
cgagctacgcaagcaatcctggcccagccgagcttgcttccccaaatcccgtaatccttgaccttattcccccaaagaagcggcctcccgggaaggagcgccctggcggagaagactcgaacggctcccacagccgggcgttgggggaaagctacaacaaatcatcgtcaacctgttccaccttctccagtctggtagcaaaaaggggtgtctcagaatctccggcctgtgaaactgtgaggggattcggccaagacgtcctcttccctctgcctcccacccaggccactcttcacctccaccatgagcctggacatccagagcctggacatccagtgtgaggagctgagcgacgctagatgggccgagctcctccctctgctccagcagtgccaagtggtcaggctggacgactgtggcctcacggaagcacggtgcaaggacatcagctctgcacttcgagtcaaccctgcactggcagagctcaacctgcgcagcaacgagctgggcgatgtcggcgtgcattgcgtgctccagggcctgcagaccccctcctgcaagatccagaagctgagcctccagaactgctgcctgacgggggccggctgcggggtcctgtccagcacactacgcaccctgcccaccctgcaggagctgcacctcagcgacaacctcttgggggatgcgggcctgcagctgctctgcgaaggactcctggacccccagtgccgcctggaaaagctgcagctggagtattgcagcctctcggctgccagctgcgagcccctggcctccgtgctcagggccaagccggacttcaaggagctcacggttagcaacaacgacatcaatgaggctggcgtccgtgtg

SEQ ID NO: 176275 - DNA, 704 bp, Homo sapiens
  Payload ID: 14611
  Gene Symbol: RNH1
  Gene Name: ribonuclease/angiogenin inhibitor 1
  ENST ID: ENST00000532055
  CDS Start-End: 584-704
gaggacagtttggcagtgtttcagaagggccttagaaccaggcaggcccccttctaggatggtggaaagcctaaagatctgaaaacggtctcaagtgtcgtcttagcgattggctgactaaaccgaatgcaagccggagactgcacacgatgttgccgttaacagttacactgggccgggcagtcagaggcaggcggatcacctgaggtcaggagttcgagaacagcctggccaacatgaggccaccttcttccatcttcaaaacctactgtctctgcataagaactctcatgattatatgccggccgcccagacaccccagggcatgaagaactcttgactgacagaaacggagggtgtgtccaaagttttgaggacggccgagcggcgctccaaaacccgtcctcacagcctcgccccgttcgcctcagctacaacaaatcatcgtcaacctgttccaccttctccagtctggtagcaaaaaggggtgtctcagaatctccggcctgtgaaactgtgaggggattcggccaagacgtcctcttccctctgcctcccacccaggccactcttcacctccaccatgagcctggacatccagagcctggacatccagtgtgaggagctgagcgacgctagatgggccgagctcctccctctgctccagcagtgccaagtggtcaggctggacgactgtggcctca

SEQ ID NO: 176276 - DNA, 727 bp, Homo sapiens
  Payload ID: 14611
  Gene Symbol: RNH1
  Gene Name: ribonuclease/angiogenin inhibitor 1
  ENST ID: ENST00000529368
  CDS Start-End: 146-727
cgactagcgggcgcggcccccagggtggactccccgccagccccggcctggaggctccgcccgcccccgcctgggcggaaggaacgcggagcggctctggccttgggtctgcggcggcggcgtcgggccactcttcacctccaccatgagcctggacatccagagcctggacatccagtgtgaggagctgagcgacgctagatgggccgagctcctccctctgctccagcagtgccaagtggtcaggctggacgactgtggcctcacggaagcacggtgcaaggacatcagctctgcacttcgagtcaaccctgcactggcagagctcaacctgcgcagcaacgagctgggcgatgtcggcgtgcattgcgtgctccagggcctgcagaccccctcctgcaagatccagaagctgagcctccagaactgctgcctgacgggggccggctgcggggtcctgtccagcacactacgcaccctgcccaccctgcaggagctgcacctcagcgacaacctcttgggggatgcgggcctgcagctgctctgcgaaggactcctggacccccagtgccgcctggaaaagctgcagctggagtattgcagcctctcggctgccagctgcgagcccctggcctccgtgctcagggccaagccggacttcaaggagctcacggttagcaacaacgacatcaatgaggctggcgtccgtgtgctgtgccagggcctg

SEQ ID NO: 176277 - DNA, 1829 bp, Homo sapiens
  Payload ID: 14611
  Gene Symbol: RNH1
  Gene Name: ribonuclease/angiogenin inhibitor 1
  Uniprot ID: P13489
  ENST ID: ENST00000533410
  CDS Start-End: 299-1684
cgggtggggttgtcgacacgttcaacccgttctgctggctcgagaacgaagtaggccgtctcgctctgggtctccaggcccgcgaccgtccgccagtcgtcccgaggcatgaagaactcttgactgacagaaacggagggtgtgtccaaagttttgaggacggccgagcggcgctccaaaacccgtcctcacagcctcgccccgttcgcctcagctacaacaaatcatcgtcaacctgttccaccttctccagtctggtagcaaaaaggggtgtctcaggccactcttcacctccaccatgagcctggacatccagagcctggacatccagtgtgaggagctgagcgacgctagatgggccgagctcctccctctgctccagcagtgccaagtggtcaggctggacgactgtggcctcacggaagcacggtgcaaggacatcagctctgcacttcgagtcaaccctgcactggcagagctcaacctgcgcagcaacgagctgggcgatgtcggcgtgcattgcgtgctccagggcctgcagaccccctcctgcaagatccagaagctgagcctccagaactgctgcctgacgggggccggctgcggggtcctgtccagcacactacgcaccctgcccaccctgcaggagctgcacctcagcgacaacctcttgggggatgcgggcctgcagctgctctgcgaaggactcctggacccccagtgccgcctggaaaagctgcagctggagtattgcagcctctcggctgccagctgcgagcccctggcctccgtgctcagggccaagccggacttcaaggagctcacggttagcaacaacgacatcaatgaggctggcgtccgtgtgctgtgccagggcctgaaggactccccctgccagctggaggcgctcaagctggagagctgcggtgtgacatcagacaactgccgggacctgtgcggcattgtggcctccaaggcctcgctgcgggagctggccctgggcagcaacaagctgggtgatgtgggcatggcggagctgtgcccagggctgctccaccccagctccaggctcaggaccctgtggatctgggagtgtggcatcactgccaagggctgcggggatctgtgccgtgtcctcagggccaaggagagcctgaaggagctcagcctggccggcaacgagctgggggatgagggtgcccgactgctgtgtgagaccctgctggaacctggctgccagctggagtcgctgtgggtgaagtcctgcagcttcacagccgcctgctgctcccacttcagctcagtgctggcccagaacaggtttctcctggagctacagataagcaacaacaggctggaggatgcgggcgtgcgggagctgtgccagggcctgggccagcctggctctgtgctgcgggtgctctggttggccgactgcgatgtgagtgacagcagctgcagcagcctcgccgcaaccctgttggccaaccacagcctgcgtgagctggacctcagcaacaactgcctgggggacgccggcatcctgcagctggtggagagcgtccggcagccgggctgcctcctggagcagctggtcctgtacgacatttactggtctgaggagatggaggaccggctgcaggccctggagaaggacaagccatccctgagggtcatctcctgaggctcttcctgctgctgctctccctggacgaccggcctcgaggcaaccctggggcccaccagcccctgccatgctctcaccctgcatatcctaggtttgaagagaaacgctcagatccgcttatttctgccagtatattttggac

SEQ ID NO: 176278 - DNA, 873 bp, Homo sapiens
  Payload ID: 14611
  Gene Symbol: RNH1
  Gene Name: ribonuclease/angiogenin inhibitor 1
  ENST ID: ENST00000527485
  CDS Start-End: 276-873
acgtggccgtcaagccctctagtgccttagattccagcgagctacgcaagcaatcctggcccagccgagcttgcttccccaaatcccgtaatccttgaccttattcccccaaagaagcggcctcccgggaaggagcgccctggcggagaagactcgaacggctcccacagccgggcgttgggggaaagaatctccggcctgtgaaactgtgaggggattcggccaagacgtcctcttccctctgcctcccacccaggccactcttcacctccaccatgagcctggacatccagagcctggacatccagtgtgaggagctgagcgacgctagatgggccgagctcctccctctgctccagcagtgccaagtggtcaggctggacgactgtggcctcacggaagcacggtgcaaggacatcagctctgcacttcgagtcaaccctgcactggcagagctcaacctgcgcagcaacgagctgggcgatgtcggcgtgcattgcgtgctccagggcctgcagaccccctcctgcaagatccagaagctgagcctccagaactgctgcctgacgggggccggctgcggggtcctgtccagcacactacgcaccctgcccaccctgcaggagctgcacctcagcgacaacctcttgggggatgcgggcctgcagctgctctgcgaaggactcctggacccccagtgccgcctggaaaagctgcagctggagtattgcagcctctcggctgccagctgcgagcccctggcctccgtgctcagggccaagccggacttcaaggagctcacggttagcaacaacgacatcaatgaggctggcgtccgtgtgctgtgccagggcctgaaggactccccctgcc

SEQ ID NO: 176279 - DNA, 709 bp, Homo sapiens
  Payload ID: 14611
  Gene Symbol: RNH1
  Gene Name: ribonuclease/angiogenin inhibitor 1
  ENST ID: ENST00000531149
  CDS Start-End: 167-709
cgcccacgagccggctcgaacacgcccgcgccgctgactggcgggtggggttgtcgacacgttcaacccgttctgctggctcgagaacgaagtaggccgtctcgctctgggtctccaggcccgcgaccgtccgccagtcgtcccgaggccactcttcacctccaccatgagcctggacatccagagcctggacatccagtgtgaggagctgagcgacgctagatgggccgagctcctccctctgctccagcagtgccaagtggtcaggctggacgactgtggcctcacggaagcacggtgcaaggacatcagctctgcacttcgagtcaaccctgcactggcagagctcaacctgcgcagcaacgagctgggcgatgtcggcgtgcattgcgtgctccagggcctgcagaccccctcctgcaagatccagaagctgagcctccagaactgctgcctgacgggggccggctgcggggtcctgtccagcacactacgcaccctgcccaccctgcaggagctgcacctcagcgacaacctcttgggggatgcgggcctgcagctgctctgcgaaggactcctggacccccagtgccgcctggaaaagctgcattgtcctttgcaaggcacagctgccccaggacccgacggtgggaacagatgcctggccgtgagtcaggttccactcaccgcctcagtgtgtgtgggggac

SEQ ID NO: 176280 - DNA, 1794 bp, Homo sapiens
  Payload ID: 14611
  Gene Symbol: RNH1
  Gene Name: ribonuclease/angiogenin inhibitor 1
  ENST ID: ENST00000525701
  CDS Start-End: 233-340
cccacgagccggctcgaacacgcccgcgccgctgactggcgggtggggttgtcgacacgttcaacccgttctgctggctcgagaacgaagtaggccgtctcgctctgggtctccaggcccgcgaccgtccgccagtcgtcccgagaatctccggcctgtgaaactgtgaggggattcggccaagacgtcctcttccctctgcctcccacccaggccactcttcacctccaccatgagcctggacatccagagcctggacatccagtgtgaggagctgagcgacgctagatgggccgagctcctccctctgctccagcagtgccaagtggtcaggttgtaacctgcacgtggggtggtggtggaggctgaggccagtgctgtctgcgtggtccacatgaccctggggtctgctcacaggctggacgactgtggcctcacggaagcacggtgcaaggacatcagctctgcacttcgagtcaaccctgcactggcagagctcaacctgcgcagcaacgagctgggcgatgtcggcgtgcattgcgtgctccagggcctgcagaccccctcctgcaagatccagaagctgaggagctgcacctcagcgacaacctcttgggggatgcgggcctgcagctgctctgcgaaggactcctggacccccagtgccgcctggaaaagctgcagctggagtattgcagcctctcggctgccagctgcgagcccctggcctccgtgctcagggccaagccggacttcaaggagctcacggttagcaacaacgacatcaatgaggctggcgtccgtgtgctgtgccagggcctgaaggactccccctgccagctggaggcgctcaagctggagagctgcggtgtgacatcagacaactgccgggacctgtgcggcattgtggcctccaaggcctcgctgcgggagctggccctgggcagcaacaagctgggtgatgtgggcatggcggagctgtgcccagggctgctccaccccagctccaggctcaggaccctgtggatctgggagtgtggcatcactgccaagggctgcggggatctgtgccgtgtcctcagggccaaggagagcctgaaggagctcagcctggccggcaacgagctgggggatgagggtgcccgactgctgtgtgagaccctgctggaacctggctgccagctggagtcgctgtgggtgaagtcctgcagcttcacagccgcctgctgctcccacttcagctcagtgctggcccagaacaggtttctcctggagctacagataagcaacaacaggctggaggatgcgggcgtgcgggagctgtgccagggcctgggccagcctggctctgtgctgcgggtgctctggttggccgactgcgatgtgagtgacagcagctgcagcagcctcgccgcaaccctgttggccaaccacagcctgcgtgagctggacctcagcaacaactgcctgggggacgccggcatcctgcagctggtggagagcgtccggcagccgggctgcctcctggagcagctggtcctgtacgacatttactggtctgaggagatggaggaccggctgcaggccctggagaaggacaagccatccctgagggtcatctcctgaggctcttcctgctgctgctctccctggacgaccggcctcgaggcaaccctggggcccaccagcccctgccatgctctcaccctgcatatcctaggtttgaagagaaacgctcagatccgcttatttctgccagtatattttggacactttataatcattaaagcactt

SEQ ID NO: 176281 - DNA, 1864 bp, Homo sapiens; identical to SEQ ID NO: 176266
  Payload ID: 14611
  Gene Symbol: RNH1
  Gene Name: ribonuclease/angiogenin inhibitor 1
  Uniprot ID: P13489
  ENST ID: ENST00000618184
  CDS Start-End: 301-1686

SEQ ID NO: 176282 - DNA, 1894 bp, Homo sapiens; identical to SEQ ID NO: 176263
  Payload ID: 14611
  Gene Symbol: RNH1
  Gene Name: ribonuclease/angiogenin inhibitor 1
  Uniprot ID: P13489
  ENST ID: ENST00000612988
  CDS Start-End: 370-1755

SEQ ID NO: 176283 - DNA, 2014 bp, Homo sapiens; identical to SEQ ID NO: 176267
  Payload ID: 14611
  Gene Symbol: RNH1
  Gene Name: ribonuclease/angiogenin inhibitor 1
  Uniprot ID: P13489
  ENST ID: ENST00000619599
  CDS Start-End: 453-1838

SEQ ID NO: 176284 - DNA, 2973 bp, Homo sapiens; identical to SEQ ID NO: 176273
  Payload ID: 14611
  Gene Symbol: RNH1
  Gene Name: ribonuclease/angiogenin inhibitor 1
  Uniprot ID: P13489
  ENST ID: ENST00000621211
  CDS Start-End: 1409-2794

SEQ ID NO: 176285 - DNA, 1791 bp, Homo sapiens; identical to SEQ ID NO: 176264
  Payload ID: 14611
  Gene Symbol: RNH1
  Gene Name: ribonuclease/angiogenin inhibitor 1
  Uniprot ID: P13489
  ENST ID: ENST00000617351
  CDS Start-End: 276-1661

SEQ ID NO: 176286 - DNA, 870 bp, Homo sapiens; identical to SEQ ID NO: 176274
  Payload ID: 14611
  Gene Symbol: RNH1
  Gene Name: ribonuclease/angiogenin inhibitor 1
  ENST ID: ENST00000633732
  CDS Start-End: 304-870

SEQ ID NO: 176287 - DNA, 1722 bp, Homo sapiens; identical to SEQ ID NO: 176265
  Payload ID: 14611
  Gene Symbol: RNH1
  Gene Name: ribonuclease/angiogenin inhibitor 1
  Uniprot ID: P13489
  ENST ID: ENST00000632954
  CDS Start-End: 161-1546

SEQ ID NO: 176288 - DNA, 1829 bp, Homo sapiens; identical to SEQ ID NO: 176277
  Payload ID: 14611
  Gene Symbol: RNH1
  Gene Name: ribonuclease/angiogenin inhibitor 1
  Uniprot ID: P13489
  ENST ID: ENST00000632527
  CDS Start-End: 299-1684

SEQ ID NO: 176289 - DNA, 727 bp, Homo sapiens; identical to SEQ ID NO: 176276
  Payload ID: 14611
  Gene Symbol: RNH1
  Gene Name: ribonuclease/angiogenin inhibitor 1
  ENST ID: ENST00000631468
  CDS Start-End: 146-727

SEQ ID NO: 176290 - DNA, 624 bp, Homo sapiens; identical to SEQ ID NO: 176269
  Payload ID: 14611
  Gene Symbol: RNH1
  Gene Name: ribonuclease/angiogenin inhibitor 1
  ENST ID: ENST00000634214
  CDS Start-End: 135-368

SEQ ID NO: 176291 - DNA, 480 bp, Homo sapiens; identical to SEQ ID NO: 176271
  Payload ID: 14611
  Gene Symbol: RNH1
  Gene Name: ribonuclease/angiogenin inhibitor 1
  ENST ID: ENST00000631828
  CDS Start-End: 455-480

SEQ ID NO: 176292 - DNA, 704 bp, Homo sapiens; identical to SEQ ID NO: 176275
  Payload ID: 14611
  Gene Symbol: RNH1
  Gene Name: ribonuclease/angiogenin inhibitor 1
  ENST ID: ENST00000633418
  CDS Start-End: 584-704

SEQ ID NO: 176293 - DNA, 1019 bp, Homo sapiens; identical to SEQ ID NO: 176270
  Payload ID: 14611
  Gene Symbol: RNH1
  Gene Name: ribonuclease/angiogenin inhibitor 1
  ENST ID: ENST00000631652
  CDS Start-End: 1-858

SEQ ID NO: 176294 - DNA, 873 bp, Homo sapiens; identical to SEQ ID NO: 176278
  Payload ID: 14611
  Gene Symbol: RNH1
  Gene Name: ribonuclease/angiogenin inhibitor 1
  ENST ID: ENST00000633464
  CDS Start-End: 276-873

SEQ ID NO: 176295 - DNA, 1725 bp, Homo sapiens; identical to SEQ ID NO: 176268
  Payload ID: 14611
  Gene Symbol: RNH1
  Gene Name: ribonuclease/angiogenin inhibitor 1
  Uniprot ID: P13489
  ENST ID: ENST00000633287
  CDS Start-End: 197-1582

SEQ ID NO: 176296 - DNA, 1794 bp, Homo sapiens; identical to SEQ ID NO: 176280
  Payload ID: 14611
  Gene Symbol: RNH1
  Gene Name: ribonuclease/angiogenin inhibitor 1
  ENST ID: ENST00000631544
  CDS Start-End: 233-340

SEQ ID NO: 176297 - DNA, 2362 bp, Homo sapiens
  Payload ID: 14612
  Gene Symbol: RAE1
  Gene Name: ribonucleic acid export 1
  Uniprot ID: P78406
  ENST ID: ENST00000371242
  CDS Start-End: 144-1250
cgcaggaagtggctccagggcgcacgcgcgttgtttccgcggtagtcagggcagtttctaccgcaggcttaaggaggcttcgggctcctgggatttctgtccgcgctcctggccctcgtccttcgcgccagagcaggttcaaaatgagcctgtttggaacaacctcaggttttggaaccagtgggaccagcatgtttggcagtgcaactacagacaatcacaatcccatgaaggatattgaagtaacatcatctcctgatgatagcattggttgtctgtcttttagcccaccaaccttgccggggaactttcttattgcaggatcatgggctaatgatgttcgctgctgggaagttcaagacagtggacagaccattccaaaagcccagcagatgcacactgggcctgtgcttgatgtctgctggagtgacgatgggagcaaagtgtttacggcatcgtgtgataaaactgccaaaatgtgggacctcagcagtaaccaagcgatacagatcgcacagcatgatgctcctgttaaaaccatccattggatcaaagctccaaactacagctgtgtgatgactgggagctgggataagactttaaagttttgggatactcgatcgtcaaatcctatgatggttttgcaactccctgaaaggtgttactgtgctgacgtgatataccccatggctgtggtggcaactgcagagaggggcctgattgtctatcagctagagaatcaaccttctgaattcaggaggatagaatctccactgaaacatcagcatcggtgtgtggctatttttaaagacaaacagaacaagcctactggttttgccctgggaagtatcgaggggagagttgctattcactatatcaaccccccgaaccccgccaaagataacttcacctttaaatgtcatcgatctaatggaaccaacacttcagctcctcaggacatttatgcggtaaatggaatcgcgttccatcctgttcatggcacccttgcaactgtgggatctgatggtagattcagcttctgggacaaagatgccagaacaaaactaaaaacttcggaacagttagatcagcccatctcagcttgctgtttcaatcacaatggaaacatatttgcatacgcttccagctacgactggtcaaagggacatgaattttataatccccagaaaaaaaattacattttcctgcgtaatgcagccgaagagctaaagcccaggaataagaagtagtggctggagactctggctcagccagagttgtttctctccactctgcctcatctctgtacgaatttgggtcccagccttgttgggttgtcagccatggacatggatttcaacccctggagaaaacgatgtcattgttcagcagctgagagcccaggcgtccgcggcgacttgccgtctctccattccactgcctgttgcagagtttttctgtaactaagggggttgaggttattgtagacgttagattgcgggcaccgccagggattttgcagcgcttcagtgtacgtgttagagaatattggaaaagcgtctgtgagccccgtgctgtattttgtaataaagtcttttgcagattgcttcccgagcttcctttgtccttttctccccttgcccaccccgtaacctcaggaacatgcgtcctgcccagcatcagcgtggggttttgagttgagatttcagacaccctctgggaaatgcggcaaccttaggggaaagggagtccccagctgcgctcacttctgctgcgcggaacggcagcctctgtgagccctggtgggcagagtttgaatgtgtttttccttgcttccctcattcccatcttcaaaatccccagtgctttctggccttgctgctcagatttccgagtgactcaaatggggactgttacttgtgctgggtgacaggccatttgtgggtaacctcctaaggcccaagtgggtgacacttgcgtgactttcaagttagaacccaagccccctgcatgggaattgccctgaactcttacccaccccggtcccctgcatgggaattgccctgaaccctcagtagtggttgtttggctgttcttttgtattttgtgtaatttaaaattcctggttggtaagtattcaaaatgaaattcagctgggctgagaaaaagtgtgacttttgggtctgtcactgtatttctcacctgtgatctcaaatgcttcttaggcctttctgtttggactaatgtgtgaagtctgacttgctgagtgtaaaattctagtatcgatagtgttgtaagatgtgtttgcctactcataaaaaacaatgaaaataaaattttctactggaagagaccacctgca

SEQ ID NO: 176298 - DNA, 2602 bp, Homo sapiens
  Payload ID: 14612
  Gene Symbol: RAE1
  Gene Name: ribonucleic acid export 1
  Uniprot ID: P78406
  ENST ID: ENST00000395840
  CDS Start-End: 384-1490
gcttcgttactgggccctggaagcgaggtcagagctggaaatggccttaggggtcacctagggcctaatccatcgtttctcttgtgggggaactgagcctctgggaagggtcacattgcgttaatgcagtgtgtgtcgcctctgtccctcccccttacacgtctggcgtctcgtcagatacatgtcagctcctgggagaagctttccctggccgctttgcagaagggcgtccccttttagcctcttccacgtcaacctgctccatttctttcgtagcagttaccagtctctgaaactaagtctgtttctgtcttagcccgccaagtatttattgtatacgtatataggtgccaccgtacaggcagtacttctccaggttcaaaatgagcctgtttggaacaacctcaggttttggaaccagtgggaccagcatgtttggcagtgcaactacagacaatcacaatcccatgaaggatattgaagtaacatcatctcctgatgatagcattggttgtctgtcttttagcccaccaaccttgccggggaactttcttattgcaggatcatgggctaatgatgttcgctgctgggaagttcaagacagtggacagaccattccaaaagcccagcagatgcacactgggcctgtgcttgatgtctgctggagtgacgatgggagcaaagtgtttacggcatcgtgtgataaaactgccaaaatgtgggacctcagcagtaaccaagcgatacagatcgcacagcatgatgctcctgttaaaaccatccattggatcaaagctccaaactacagctgtgtgatgactgggagctgggataagactttaaagttttgggatactcgatcgtcaaatcctatgatggttttgcaactccctgaaaggtgttactgtgctgacgtgatataccccatggctgtggtggcaactgcagagaggggcctgattgtctatcagctagagaatcaaccttctgaattcaggaggatagaatctccactgaaacatcagcatcggtgtgtggctatttttaaagacaaacagaacaagcctactggttttgccctgggaagtatcgaggggagagttgctattcactatatcaaccccccgaaccccgccaaagataacttcacctttaaatgtcatcgatctaatggaaccaacacttcagctcctcaggacatttatgcggtaaatggaatcgcgttccatcctgttcatggcacccttgcaactgtgggatctgatggtagattcagcttctgggacaaagatgccagaacaaaactaaaaacttcggaacagttagatcagcccatctcagcttgctgtttcaatcacaatggaaacatatttgcatacgcttccagctacgactggtcaaagggacatgaattttataatccccagaaaaaaaattacattttcctgcgtaatgcagccgaagagctaaagcccaggaataagaagtagtggctggagactctggctcagccagagttgtttctctccactctgcctcatctctgtacgaatttgggtcccagccttgttgggttgtcagccatggacatggatttcaacccctggagaaaacgatgtcattgttcagcagctgagagcccaggcgtccgcggcgacttgccgtctctccattccactgcctgttgcagagtttttctgtaactaagggggttgaggttattgtagacgttagattgcgggcaccgccagggattttgcagcgcttcagtgtacgtgttagagaatattggaaaagcgtctgtgagccccgtgctgtattttgtaataaagtcttttgcagattgcttcccgagcttcctttgtccttttctccccttgcccaccccgtaacctcaggaacatgcgtcctgcccagcatcagcgtggggttttgagttgagatttcagacaccctctgggaaatgcggcaaccttaggggaaagggagtccccagctgcgctcacttctgctgcgcggaacggcagcctctgtgagccctggtgggcagagtttgaatgtgtttttccttgcttccctcattcccatcttcaaaatccccagtgctttctggccttgctgctcagatttccgagtgactcaaatggggactgttacttgtgctgggtgacaggccatttgtgggtaacctcctaaggcccaagtgggtgacacttgcgtgactttcaagttagaacccaagccccctgcatgggaattgccctgaactcttacccaccccggtcccctgcatgggaattgccctgaaccctcagtagtggttgtttggctgttcttttgtattttgtgtaatttaaaattcctggttggtaagtattcaaaatgaaattcagctgggctgagaaaaagtgtgacttttgggtctgtcactgtatttctcacctgtgatctcaaatgcttcttaggcctttctgtttggactaatgtgtgaagtctgacttgctgagtgtaaaattctagtatcgatagtgttgtaagatgtgtttgcctactcataaaaaacaatgaaaataaaattttctactggaagagaccacctgca

SEQ ID NO: 176299 - DNA, 2639 bp, Homo sapiens
  Payload ID: 14612
  Gene Symbol: RAE1
  Gene Name: ribonucleic acid export 1
  Uniprot ID: P78406
  ENST ID: ENST00000395841
  CDS Start-End: 421-1527
gatcagcccgcctcggcctcccaaagtgctgggattacaggcgtgagccaccgcgcctggccagttgcggatttataaaagcagtcgcttagtaacttgcagcggctacatcaactttggaccaattcgcaaactgctggtgtaaagcgtttttgcgcatgtgctgtcgccttgcgggaaaaggagcctttttcttcgacgatttccgggcgacgcaggaagtggctccagggcgcacgcgcgttgtttccgcggtagtcagggcagtttctaccgcaggcttaaggaggcttcgggctcctgggatttctgtccgcgctcctggccctcgtccttcgcgccagagcaggttcgcaaactcctcagacccttctgctcccggccgccgctttccgccggggcgagacccccaggttcaaaatgagcctgtttggaacaacctcaggttttggaaccagtgggaccagcatgtttggcagtgcaactacagacaatcacaatcccatgaaggatattgaagtaacatcatctcctgatgatagcattggttgtctgtcttttagcccaccaaccttgccggggaactttcttattgcaggatcatgggctaatgatgttcgctgctgggaagttcaagacagtggacagaccattccaaaagcccagcagatgcacactgggcctgtgcttgatgtctgctggagtgacgatgggagcaaagtgtttacggcatcgtgtgataaaactgccaaaatgtgggacctcagcagtaaccaagcgatacagatcgcacagcatgatgctcctgttaaaaccatccattggatcaaagctccaaactacagctgtgtgatgactgggagctgggataagactttaaagttttgggatactcgatcgtcaaatcctatgatggttttgcaactccctgaaaggtgttactgtgctgacgtgatataccccatggctgtggtggcaactgcagagaggggcctgattgtctatcagctagagaatcaaccttctgaattcaggaggatagaatctccactgaaacatcagcatcggtgtgtggctatttttaaagacaaacagaacaagcctactggttttgccctgggaagtatcgaggggagagttgctattcactatatcaaccccccgaaccccgccaaagataacttcacctttaaatgtcatcgatctaatggaaccaacacttcagctcctcaggacatttatgcggtaaatggaatcgcgttccatcctgttcatggcacccttgcaactgtgggatctgatggtagattcagcttctgggacaaagatgccagaacaaaactaaaaacttcggaacagttagatcagcccatctcagcttgctgtttcaatcacaatggaaacatatttgcatacgcttccagctacgactggtcaaagggacatgaattttataatccccagaaaaaaaattacattttcctgcgtaatgcagccgaagagctaaagcccaggaataagaagtagtggctggagactctggctcagccagagttgtttctctccactctgcctcatctctgtacgaatttgggtcccagccttgttgggttgtcagccatggacatggatttcaacccctggagaaaacgatgtcattgttcagcagctgagagcccaggcgtccgcggcgacttgccgtctctccattccactgcctgttgcagagtttttctgtaactaagggggttgaggttattgtagacgttagattgcgggcaccgccagggattttgcagcgcttcagtgtacgtgttagagaatattggaaaagcgtctgtgagccccgtgctgtattttgtaataaagtcttttgcagattgcttcccgagcttcctttgtccttttctccccttgcccaccccgtaacctcaggaacatgcgtcctgcccagcatcagcgtggggttttgagttgagatttcagacaccctctgggaaatgcggcaaccttaggggaaagggagtccccagctgcgctcacttctgctgcgcggaacggcagcctctgtgagccctggtgggcagagtttgaatgtgtttttccttgcttccctcattcccatcttcaaaatccccagtgctttctggccttgctgctcagatttccgagtgactcaaatggggactgttacttgtgctgggtgacaggccatttgtgggtaacctcctaaggcccaagtgggtgacacttgcgtgactttcaagttagaacccaagccccctgcatgggaattgccctgaactcttacccaccccggtcccctgcatgggaattgccctgaaccctcagtagtggttgtttggctgttcttttgtattttgtgtaatttaaaattcctggttggtaagtattcaaaatgaaattcagctgggctgagaaaaagtgtgacttttgggtctgtcactgtatttctcacctgtgatctcaaatgcttcttaggcctttctgtttggactaatgtgtgaagtctgacttgctgagtgtaaaattctagtatcgatagtgttgtaagatgtgtttgcctactcataaaaaacaatgaaaataaaattttctactggaagagaccacctgca

SEQ ID NO: 176300 - DNA, 588 bp, Homo sapiens
  Payload ID: 14612
  Gene Symbol: RAE1
  Gene Name: ribonucleic acid export 1
  ENST ID: ENST00000411894
  CDS Start-End: 177-588
gggatgctggggcgcgagcgggactgttgactaagcttcgttactgggccctggaagcgaggtgccaccgtacaggcagtacttctccaggcaagtagtattaaacaccagccgccctgggccaggcattgtactgtgggacccagtatgcattaagggaagaatccaggttcaaaatgagcctgtttggaacaacctcaggttttggaaccagtgggaccagcatgtttggcagtgcaactacagacaatcacaatcccatgaaggatattgaagtaacatcatctcctgatgatagcattggttgtctgtcttttagcccaccaaccttgccggggaactttcttattgcaggatcatgggctaatgatgttcgctgctgggaagttcaagacagtggacagaccattccaaaagcccagcagatgcacactgggcctgtgcttgatgtctgctggagtgacgatgggagcaaagtgtttacggcatcgtgtgataaaactgccaaaatgtgggacctcagcagtaaccaagcgatacagatcgcacagcatgatgctcctgttaaaaccatccattggatcaaag

SEQ ID NO: 176301 - DNA, 480 bp, Homo sapiens
  Payload ID: 14612
  Gene Symbol: RAE1
  Gene Name: ribonucleic acid export 1
  ENST ID: ENST00000429339
  CDS Start-End: 69-480
gggatgctggggcgcgagcgggactgttgactaagcttcgttactgggccctggaagcgaggttcaaaatgagcctgtttggaacaacctcaggttttggaaccagtgggaccagcatgtttggcagtgcaactacagacaatcacaatcccatgaaggatattgaagtaacatcatctcctgatgatagcattggttgtctgtcttttagcccaccaaccttgccggggaactttcttattgcaggatcatgggctaatgatgttcgctgctgggaagttcaagacagtggacagaccattccaaaagcccagcagatgcacactgggcctgtgcttgatgtctgctggagtgacgatgggagcaaagtgtttacggcatcgtgtgataaaactgccaaaatgtgggacctcagcagtaaccaagcgatacagatcgcacagcatgatgctcctgttaaaaccatccattggatcaaag

SEQ ID NO: 176302 - DNA, 691 bp, Homo sapiens
  Payload ID: 14612
  Gene Symbol: RAE1
  Gene Name: ribonucleic acid export 1
  ENST ID: ENST00000452119
  CDS Start-End: 430-691
gctggaaatggccttaggggtcacctagggcctaatccatcgtttctcttgtgggggaactgagcctctgggaagggtcacattgcgttaatgcagtgtgtgtcgcctctgtccctcccccttacacgtctggcgtctcgtcagatacatgtcagctcctgggagaagctttccctggccgctttgcagaagggcgtccccttttagcctcttccacgtcaacctgctccatttctttcgtagcagttaccagtctctgaaactaagtctgtttctgtcttagcccgccaagtatttattgtatacgtatataggtgccaccgtacaggcagtacttctccaggcaagtagtattaaacaccagccgccctgggccaggcattgtactgtgggacccagtatgcattaagggaagaatccaggttcaaaatgagcctgtttggaacaacctcaggttttggaaccagtgggaccagcatgtttggcagtgcaactacagacaatcacaatcccatgaaggatattgaagtaacatcatctcctgatgatagcattggttgtctgtcttttagcccaccaaccttgccggggaactttcttattgcaggatcatgggctaatgatgttcgctgctgggaagttcaagacagtggacagaccattccaaaagcccagcagatgcacactgggc

SEQ ID NO: 176303 - DNA, 1503 bp, Homo sapiens
  Payload ID: 14612
  Gene Symbol: RAE1
  Gene Name: ribonucleic acid export 1
  ENST ID: ENST00000527947
  CDS Start-End: 179-1492
gttgtttccgcggtagtcagggcagtttctaccgcaggcttaaggaggcttcgggctcctgggatttctgtccgcgctcctggccctcgtccttcgcgccagagcaggttcgcaaactcctcagacccttctgctcccggccgccgctttccgccggggcgagacccccaggttcaaaatgagcctgtttggaacaacctcaggttttggaaccagtgggaccagcatgtttggcagtgcaactacagacaatcacaatcccatgaaggatattgaagtaacatcatctcctgatgatagcattggttgtctgtcttttagcccaccaaccttgccggggaactttcttattgcaggatcatgggctaatgatgttcgctgctgggaagttcaagacagtggacagaccattccaaaagcccagcagatgcacactgggcctgtgcttgatgtctgctggagtgacgatgggagcaaagtgtttacggcatcgtgtgataaaactgccaaaatgtgggacctcagcagtaaccaagcgatacagatcgcacagcatgatgctcctgttaaaaccatccattggatcaaagctccaaactacagctgtgtgatgactgggagctgggataagactttaaagttttgggatactcgatcgtcaaatcctatgatggttttgcaactccctgaaaggtgttactgtgctgacgtgatataccccatggctgtggtggcaactgcagagaggggcctgattgtctatcagctagagaatcaaccttctgaattcaggaggatagaatctccactgaaacatcagcatcggtgtgtggctatttttaaagacaaacagaacaagcctactggttttgccctgggaagtatcgaggggagagttgctattcactatatcaaccccccgaaccccgccaaagataacttcacctttaaatgtcatcgatctaatggaaccaacacttcagctcctcaggacatttatgcggtaaatggaatcgcgttccatcctgttcatggcacccttgcaactgtgggatctgatggtagattcagcttctgggacaaagatgccagaacaaaactaaaaacttcggaacagttagatcagcccatctcagcttgctgtttcaatcacaatggaaacatatttgcatacgcttccagctacgactggtcaaaggtgagaactcccgggcctgctctgggtgctccaaggcagcagagccaggctctgggttcagaaggcctaggcctgagttgtgactcttctcaggactcacgtgtgtccttgggcaggtcaccgtcccctccctgtaaggggaaattgcaggacttcctcaaatggttgtggggattcagtacagcctttggccagaacccagcacacaggaagtgctcggccagtgtgagccattacgggctgctctgttcctgggcacagaagcacaggcaagccgggggctgcactttatgaagggggtggca

SEQ ID NO: 176304 - DNA, 1156 bp, Homo sapiens
  Payload ID: 14612
  Gene Symbol: RAE1
  Gene Name: ribonucleic acid export 1
  ENST ID: ENST00000492498
  CDS Start-End: 157-810
cagtttctaccgcaggcttaaggaggcttcgggctcctgggatttctgtccgcgctcctggccctcgtccttcgcgccagagcaggttcgcaaactcctcagacccttctgctcccggccgccgctttccgccggggcgagacccccaggttcaaaatgagcctgtttggaacaacctcaggttttggaaccagtgggaccagcatgtttggcagtgcaactacagacaatcacaatcccatgaaggatattgaagtaacatcatctcctgatgatagcattggttgtctgtcttttagcccaccaaccttgccggggaactttcttattgcaggatcatgggctaatgatgttcgctgctgggaagttcaagacagtggacagaccattccaaaagcccagcagatgcacactgggcctgtgcttgatgtctgctggagtgacgatgggagcaaagtgtttacggcatcgtgtgataaaactgccaaaatgtgggacctcagcagtaaccaagcgatacagatcgcacagcatgatgctcctgttaaaaccatccattggatcaaagctccaaactacagctgtgtgatgactgggagctgggataagactttaaagttttgggatactcgatcgtcaaatcctatgatggttttgcaactccctgaaaggtgttactgtgctgacgtgatataccccatggctgtggtggcaactgcagagaggggcctgattgtctatcagctagagaatcaaccttctgaattcaggaggatagaatctccactgaaacatcagcgccaaagataacttcacctttaaatgtcatcgatctaatggaaccaacacttcagctcctcaggacatttatgcggtaaatggaatcgcgttccatcctgttcatggcacccttgcaactgtgggatctgatggtagattcagcttctgggacaaagatgccagaacaaaactaaaaacttcggaacagttagatcagcccatctcagcttgctgtttcaatcacaatggaaacatatttgcatacgcttccagctacgactggtcaaagggacatgaattttataatccccagaaaaaaaattacattttcctgcgtaatgcagccgaagagctaaagcccaggaataagaagtag

SEQ ID NO: 176305 - DNA, 3595 bp, Homo sapiens
  Payload ID: 14613
  Gene Symbol: RAVER1
  Gene Name: ribonucleoprotein, PTB-binding 1
  ENST ID: ENST00000293677
  CDS Start-End: 83-2353
gcttagccaacggggcaaggggggcgggaaggaggtggggtttctcccagccaatcgacgggcgcgccctcgttgccgctctatgccgctccgccccggctcgctggtcccagaaggcgccgggtttcccaagatggcggcggacgtgtccgttactcaccggcccccgctgagccctaagtctggggccgaagtcgaagccggcgatgccgcggagcgccgggcgccggaagaagagctgccgcctctagatccagaagagatccggaaacgcctggaacacaccgagcgccagttccgtaaccgccgcaagatactgatccggggcctcccgggggacgtgaccaaccaggaagtacatgacctgctcagtgactatgagctcaaatactgttttgtggacaaatacaaagggacagccttcgtgaccctgctgaatggggagcaggccgaggccgcaatcaatgctttccaccagagccgcctgcgggagcgtgaactgtcggtgcagctgcagcccacggatgccctgctgtgtgtggccaacctgccccccagcctcacacagcagcagttcgaggagctggtgcggcccttcggcagcctggagcgctgcttcctggtctacagtgagcgcactggccaatccaagggctatggctttgctgagtacatgaagaaggactcggctgcccgtgccaagtcggacctgctgggcaagccgctgggaccacgcaccctctacgtgcactggacggatgccgggcaactgacgcctgcccttctccactcccgctgcctctgtgtggaccgcctgccacctggcttcaacgatgtggacgctctgtgccgggcgctgtcagctgtccacagccccaccttctgccagctggcgtgcggccaggatgggcagctgaagggcttcgcggtgctggagtatgagacggctgagatggcggaggaggcacagcagcaggcggacggcctgtccctggggggcagccacctgcgagtctccttctgcgcccctgggccccccggccgcagtatgctggccgctctcatcgctgcccaggccacggccctcaatcgggggaagggactcctccccgagcccaacatcctgcagctgctcaacaacctgggcccatccgcgtccctccagctgctgctcaaccccctgctccatggcagtgcgggggggaagcagggcctcctgggtgcccccccagccatgccgctgctcaatgggccagccctgtccacggcgctgttgcagctcgccctgcagacccagggccagaagaagcccggcatcctgggagactcacccctgggcgccctccagcctggggcccagccagccaaccccctcctcggggagctgcctgcaggagggggcctgcccccggagctgccgccccggcgagggaagccaccacccctgctgccatccgtgcttggccctgctgggggtgaccgggaggccctgggcttgggtcccccagcggcccagctcactcctccccccgcccctgtggggctccgaggctctggcctcagaggcctccagaaagacagtgggcctctgccgacgccccctggggtctcactgctgggggagccccccaaggactaccggattcccctgaatccctacctgaacctacacagcctgctcccggccagcaacctggcgggtaaggaggcccggggctggggaggcgccgggagaagccgccgcccagctgagggccccccaactaaccccccagcccctggaggtggcagcagcagcagcaaagccttccagctcaagtcccgcctgctcagccccctcagcagcgcccgcctgccccccgaaccaggactgtctgacagctacagcttcgactacccctcggacatgggacctcggcggctcttctcccacccacgggaaccagcccttgggcctcacggacccagccgacacaagatgtcccccccgcccagtggcttcggcgaacggagcagcggtgggagtggcgggggccccctgtctcacttctattcaggctcgcccacttcctacttcaccagcggcctgcaggctggcctcaagcagagccacctcagtaaggcaatcggctcttccccgctggggtccggagaagggctcctgggcctcagccccgggcctaatggtcacagccacctgctgaagaccccactgggcggccagaaacgcagctttgcccacctgctgccctcgcccgagcccagcccagaaggcagctatgtgggccagcactcccagggcctcggcggccactacgcggactcctacctgaagcggaagaggattttctaagtggctggcaccagagataactcaagggcctgcaccaaatcgcttttgggttttctgatgttttgttttgtgttttttttaaaccattttctctctttcggtaatagaaaaatctctgaaagactttactgaccaatcagccggagccccaggagcccaaggggtgtgggggagtctggaggcctcattatgtctctggcttgctccccacgctgaaaccctgcagccttaagagagaggggccccggcctgctctccctccctccccccatctcctcctccgctgtgcccgtctctccggagccctcctgcctcattgctcctgtaattttggcctttcgagtgccttggaggtttccctgacctcccgtgaagatacagagactgtctcctttttttttaactttgacaactgacttctgtttccttttctaagttttatttttcaaaccaccccggacagcccccagctctgattccttcaaggcccggcctgtccgggccaccattccacaccttgcggtttgaaacagctgtttttcccacatttgctgcaggcatggctgtctcctgcccctgcctgcccatctggcctataccccagccgtggggcccggggtccctgccgcagccccctccccttctgatgccttaaaagctgggccccaggccctgctggccagagccacagatgccaagctctgggagcttgactatggaccaaacagctctggcctagggattgggccaccctacccaggatctccaccctggggacagtagaaggggaaagccttcatcttggcgaaccggccccaccaccccctcctacccgggcctccgtgcagagatgggctttctctgccagtcccctgctgtctgtctgtgggagtcggacattgtgcccatctcccggagcctctgctgtcactcgcttgttgaagatgaattcttgaattctgcctgcccacccccggccagatccctggagctggcctccttccagcccagtgccagaaaccagcactccatgaagataaactctgggcccgcccaccagcaggacctgtcgacctgaggtgaccctgggccttgcccccagccaactgggccaccagcttccctcccttgactctgggggtccacatccactccaaggggactattcccccgaccccaccccagtctccccacacggacctttgctgaattaaagtttgtaagtaaatggttttaaagaaa

SEQ ID NO: 176306 - DNA, 742 bp, Homo sapiens
  Payload ID: 14613
  Gene Symbol: RAVER1
  Gene Name: ribonucleoprotein, PTB-binding 1
  ENST ID: ENST00000591969
  CDS Start-End: 1-290
ccgttactcaccggcccccgctgagccctaagtctggggccgaagtcgaagccggcgatgccgcggagcgccgggcgccggaagaagagctgccgcctctagatccagaagagatccggaaacgcctggaacacaccgagcgccagttccgtaaccgccgcaagatactgatccggggcctcccgggggacgtgaccaaccaggaagtacatgacctgctcagtgactatgagctcaaatactgttttgtggacaaatacaaagggacagagccgcctgcgggagcgtgaactgtcggtgcagctgcagcccacggatgccctgctgtgtgtggccaacctgccccccagcctcacacagcagcagttcgaggagctggtgcggcccttcggcagcctggagcgctgcttcctggtctacagtgagcgcactggccaatccaagggctatggctttgctgagtacatgaagaaggactcggctgcccgtgccaagtcggacctgctgggcaagccgctgggaccacgcaccctctacgtgcactggacggatgccgggcaactgacgcctgcccttctccactcccgctgcctctgtgtggaccgcctgccacctggcttcaacgatgtggacgctctgtgccgggcgctgtcagctgtccacagccccaccttctgccagctggcgtgcggccaggatgggcagctgaagggcttcgcggtgctggagtatgagacggctg

SEQ ID NO: 176307 - DNA, 500 bp, Homo sapiens
  Payload ID: 14613
  Gene Symbol: RAVER1
  Gene Name: ribonucleoprotein, PTB-binding 1
  ENST ID: ENST00000593136
  CDS Start-End: 1-393
ggggggaagcagggcctcctgggtgcccccccagccatgccgctgctcaatgggccagccctgtccacggcgctgttgcagctcgccctgcagacccagggccagaagaagcccggcatcctgggagactcacccctgggcgccctccagcctggggcccagccagccaaccccctcctcggggagctgcctgcaggtctcactgctgggggagccccccaaggactaccggattcccctgaatccctacctgaacctacacagcctgctcccggccagcaacctggcggcccctggaggtggcagcagcagcagcaaagccttccagctcaagtcccgcctgctcagccccctcagcagcgcccgcctgccccccgaaccaggactgtctgacagctacagcttcgactacccctcggacatgggacctcggcggctcttctcccacccacgggaaccagcccttgggcctcacggacccagccgacacaagatgtccc

SEQ ID NO: 176308 - DNA, 1952 bp, Homo sapiens
  Payload ID: 14613
  Gene Symbol: RAVER1
  Gene Name: ribonucleoprotein, PTB-binding 1
  Uniprot ID: Q8IY67
  ENST ID: ENST00000615032
  CDS Start-End: 132-1952
ttagccaacggggcaaggggggcgggaaggaggtggggtttctcccagccaatcgacgggcgcgccctcgttgccgctctatgccgctccgccccggctcgctggtcccagaaggcgccgggtttcccaagatggcggcggacgtgtccgttactcaccggcccccgctgagccctaagtctggggccgaagtcgaagccggcgatgccgcggagcgccgggcgccggaagaagagctgccgcctctagatccagaagagatccggaaacgcctggaacacaccgagcgccagttccgtaaccgccgcaagatactgatccggggcctcccgggggacgtgaccaaccaggaagtacatgacctgctcagtgactatgagctcaaatactgttttgtggacaaatacaaagggacagccttcgtgaccctgctgaatggggagcaggccgaggccgcaatcaatgctttccaccagagccgcctgcgggagcgtgaactgtcggtgcagctgcagcccacggatgccctgctgtgtgtggccaacctgccccccagcctcacacagcagcagttcgaggagctggtgcggcccttcggcagcctggagcgctgcttcctggtctacagtgagcgcactggccaatccaagggctatggctttgctgagtacatgaagaaggactcggctgcccgtgccaagtcggacctgctgggcaagccgctgggaccacgcaccctctacgtgcactggacggatgccgggcaactgacgcctgcccttctccactcccgctgcctctgtgtggaccgcctgccacctggcttcaacgatgtggacgctctgtgccgggcgctgtcagctgtccacagccccaccttctgccagctggcgtgcggccaggatgggcagctgaagggcttcgcggtgctggagtatgagacggctgagatggcggaggaggcacagcagcaggcggacggcctgtccctggggggcagccacctgcgagtctccttctgcgcccctgggccccccggccgcagtatgctggccgctctcatcgctgcccaggccacggccctcaatcgggggaagggactcctccccgagcccaacatcctgcagctgctcaacaacctgggcccatccgcgtccctccagctgctgctcaaccccctgctccatggcagtgcgggggggaagcagggcctcctgggtgcccccccagccatgccgctgctcaatgggccagccctgtccacggcgctgttgcagctcgccctgcagacccagggccagaagaagcccggcatcctgggagactcacccctgggcgccctccagcctggggcccagccagccaaccccctcctcggggagctgcctgcaggagggggcctgcccccggagctgccgccccggcgagggaagccaccacccctgctgccatccgtgcttggccctgctgggggtgaccgggaggccctgggcttgggtcccccagcggcccagctcactcctccccccgcccctgtggggctccgaggctctggcctcagaggccccctgtctcacttctattcaggctcgcccacttcctacttcaccagcggcctgcaggctggcctcaagcagagccacctcagtaaggcaatcggctcttccccgctggggtccggagaagggctcctgggcctcagccccgggcctaatggtcacagccacctgctgaaggtacgggcagggggtggggacatgcagggctgggaagccccggccccccagcggcccctgacccgccccgccctgccctctgtctccagaccccactgggcggccagaaacgcagctttgcccacctgctgccctcgcccgagcccagcccagaaggcagctatgtgggccagcactcccagggcctcggcggccactacgcggactcctacctga

SEQ ID NO: 176309 - DNA, 3501 bp, Homo sapiens
  Payload ID: 14613
  Gene Symbol: RAVER1
  Gene Name: ribonucleoprotein, PTB-binding 1
  ENST ID: ENST00000617231
  CDS Start-End: 40-2259
cccggctcgctggtcccagaaggcgccgggtttcccaagatggcggcggacgtgtccgttactcaccggcccccgctgagccctaagtctggggccgaagtcgaagccggcgatgccgcggagcgccgggcgccggaagaagagctgccgcctctagatccagaagagatccggaaacgcctggaacacaccgagcgccagttccgtaaccgccgcaagatactgatccggggcctcccgggggacgtgaccaaccaggaagtacatgacctgctcagtgactatgagctcaaatactgttttgtggacaaatacaaagggacagccttcgtgaccctgctgaatggggagcaggccgaggccgcaatcaatgctttccaccagagccgcctgcgggagcgtgaactgtcggtgcagctgcagcccacggatgccctgctgtgtgtggccaacctgccccccagcctcacacagcagcagttcgaggagctggtgcggcccttcggcagcctggagcgctgcttcctggtctacagtgagcgcactggccaatccaagggctatggctttgctgagtacatgaagaaggactcggctgcccgtgccaagtcggacctgctgggcaagccgctgggaccacgcaccctctacgtgcactggacggatgccgggcaactgacgcctgcccttctccactcccgctgcctctgtgtggaccgcctgccacctggcttcaacgatgtggacgctctgtgccgggcgctgtcagctgtccacagccccaccttctgccagctggcgtgcggccaggatgggcagctgaagggcttcgcggtgctggagtatgagacggctgagatggcggaggaggcacagcagcaggcggacggcctgtccctggggggcagccacctgcgagtctccttctgcgcccctgggccccccggccgcagtatgctggccgctctcatcgctgcccaggccacggccctcaatcgggggaagggactcctccccgagcccaacatcctgcagctgctcaacaacctgggcccatccgcgtccctccagctgctgctcaaccccctgctccatggcagtgcgggggggaagcagggcctcctgggtgcccccccagccatgccgctgctcaatgggccagccctgtccacggcgctgttgcagctcgccctgcagacccagggccagaagaagcccggcatcctgggagactcacccctgggcgccctccagcctggggcccagccagccaaccccctcctcggggagctgcctgcaggagggggcctgcccccggagctgccgccccggcgagggaagccaccacccctgctgccatccgtgcttggccctgctgggggtgaccgggaggccctgggcttgggtcccccagcggcccagctcactcctccccccgcccctgtggggctccgaggctctggcctcagaggcctccagaaagacagtgggcctctgccgacgccccctggggtctcactgctgggggagccccccaaggactaccggattcccctgaatccctacctgaacctacacagcctgctcccggccagcaacctggcgggtaaggaggcccggggctggggaggcgccgggagaagccgccgcccagctgagggccccccaactaaccccccagcccctggaggtggcagcagcagcagcaaagccttccagctcaagtcccgcctgctcagccccctcagcagcgcccgcctgccccccgaaccaggactgtctgacagctacagcttcgactacccctcggacatgggacctcggcggctcttctcccacccacgggaaccagcccttgggcctcacggacccagccgacacaagatgtcccccccgcccagtggcttcggcgaacggagcagcggtgggagtggcgggggccccctgtctcacttctattcaggctcgcccacttcctacttcaccagcggcctgcaggctggcctcaagcagagccacctcagtaaggcaatcggctcttccccgctggggtccggagaagggctcctgggcctcagccccgggcctaatggtcacagccacctgctgaagaccccactgggcggccagaaacgcagctttgcccacctgctgccctcgcccgagcccagcccagaaggcagctatgtgggccagcactcccagggcctcggcggccactacgcggactcctacctgaagcggaagaggattttctaagtggctggcaccagagataactcaagggcctgcaccaaatcgcttttgggttttctgatgttttgttttgtgttttttttaaaccattttctctctttcggtaatagaaaaatctctgaaagactttactgaccaatcagccggagccccaggagcccaaggggtgtgggggagtctggaggcctcattatgtctctggcttgctccccacgctgaaaccctgcagccttaagagagaggggccccggcctgctctccctccctccccccatctcctcctccgctgtgcccgtctctccggagccctcctgcctcattgctcctgtaattttggcctttcgagtgccttggaggtttccctgacctcccgtgaagatacagagactgtctcctttttttttaactttgacaactgacttctgtttccttttctaagttttatttttcaaaccaccccggacagcccccagctctgattccttcaaggcccggcctgtccgggccaccattccacaccttgcggtttgaaacagctgtttttcccacatttgctgcaggcatggctgtctcctgcccctgcctgcccatctggcctataccccagccgtggggcccggggtccctgccgcagccccctccccttctgatgccttaaaagctgggccccaggccctgctggccagagccacagatgccaagctctgggagcttgactatggaccaaacagctctggcctagggattgggccaccctacccaggatctccaccctggggacagtagaaggggaaagccttcatcttggcgaaccggccccaccaccccctcctacccgggcctccgtgcagagatgggctttctctgccagtcccctgctgtctgtctgtgggagtcggacattgtgcccatctcccggagcctctgctgtcactcgcttgttgaagatgaattcttgaattctgcctgcccacccccggccagatccctggagctggcctccttccagcccagtgccagaaaccagcactccatgaagataaactctgggcccgcccaccagcaggacctgtcgacctgaggtgaccctgggccttgcccccagccaactgggccaccagcttccctcccttgactctgggggtccacatccactccaaggggactattcccccgaccccaccccagtctccccacacggacctttgctgaattaaagtttgtaagtaaatggttttaaagaaa

SEQ ID NO: 176310 - DNA, 3586 bp, Homo sapiens
  Payload ID: 14613
  Gene Symbol: RAVER1
  Gene Name: ribonucleoprotein, PTB-binding 1
  ENST ID: ENST00000611074
  CDS Start-End: 81-2351
ttagccaacggggcaaggggggcgggaaggaggtggggtttctcccagccaatcgacgggcgcgccctcgttgccgctctatgccgctccgccccggctcgctggtcccagaaggcgccgggtttcccaagatggcggcggacgtgtccgttactcaccggcccccgctgagccctaagtctggggccgaagtcgaagccggcgatgccgcggagcgccgggcgccggaagaagagctgccgcctctagatccagaagagatccggaaacgcctggaacacaccgagcgccagttccgtaaccgccgcaagatactgatccggggcctcccgggggacgtgaccaaccaggaagtacatgacctgctcagtgactatgagctcaaatactgttttgtggacaaatacaaagggacagccttcgtgaccctgctgaatggggagcaggccgaggccgcaatcaatgctttccaccagagccgcctgcgggagcgtgaactgtcggtgcagctgcagcccacggatgccctgctgtgtgtggccaacctgccccccagcctcacacagcagcagttcgaggagctggtgcggcccttcggcagcctggagcgctgcttcctggtctacagtgagcgcactggccaatccaagggctatggctttgctgagtacatgaagaaggactcggctgcccgtgccaagtcggacctgctgggcaagccgctgggaccacgcaccctctacgtgcactggacggatgccgggcaactgacgcctgcccttctccactcccgctgcctctgtgtggaccgcctgccacctggcttcaacgatgtggacgctctgtgccgggcgctgtcagctgtccacagccccaccttctgccagctggcgtgcggccaggatgggcagctgaagggcttcgcggtgctggagtatgagacggctgagatggcggaggaggcacagcagcaggcggacggcctgtccctggggggcagccacctgcgagtctccttctgcgcccctgggccccccggccgcagtatgctggccgctctcatcgctgcccaggccacggccctcaatcgggggaagggactcctccccgagcccaacatcctgcagctgctcaacaacctgggcccatccgcgtccctccagctgctgctcaaccccctgctccatggcagtgcgggggggaagcagggcctcctgggtgcccccccagccatgccgctgctcaatgggccagccctgtccacggcgctgttgcagctcgccctgcagacccagggccagaagaagcccggcatcctgggagactcacccctgggcgccctccagcctggggcccagccagccaaccccctcctcggggagctgcctgcaggagggggcctgcccccggagctgccgccccggcgagggaagccaccacccctgctgccatccgtgcttggccctgctgggggtgaccgggaggccctgggcttgggtcccccagcggcccagctcactcctccccccgcccctgtggggctccgaggctctggcctcagaggcctccagaaagacagtgggcctctgccgacgccccctggggtctcactgctgggggagccccccaaggactaccggattcccctgaatccctacctgaacctacacagcctgctcccggccagcaacctggcgggtaaggaggcccggggctggggaggcgccgggagaagccgccgcccagctgagggccccccaactaaccccccagcccctggaggtggcagcagcagcagcaaagccttccagctcaagtcccgcctgctcagccccctcagcagcgcccgcctgccccccgaaccaggactgtctgacagctacagcttcgactacccctcggacatgggacctcggcggctcttctcccacccacgggaaccagcccttgggcctcacggacccagccgacacaagatgtcccccccgcccagtggcttcggcgaacggagcagcggtgggagtggcgggggccccctgtctcacttctattcaggctcgcccacttcctacttcaccagcggcctgcaggctggcctcaagcagagccacctcagtaaggcaatcggctcttccccgctggggtccggagaagggctcctgggcctcagccccgggcctaatggtcacagccacctgctgaagaccccactgggcggccagaaacgcagctttgcccacctgctgccctcgcccgagcccagcccagaaggcagctatgtgggccagcactcccagggcctcggcggccactacgcggactcctacctgaagcggaagaggattttctaagtggctggcaccagagataactcaagggcctgcaccaaatcgcttttgggttttctgatgttttgttttgtgttttttttaaaccattttctctctttcggtaatagaaaaatctctgaaagactttactgaccaatcagccggagccccaggagcccaaggggtgtgggggagtctggaggcctcattatgtctctggcttgctccccacgctgaaaccctgcagccttaagagagaggggccccggcctgctctccctccctccccccatctcctcctccgctgtgcccgtctctccggagccctcctgcctcattgctcctgtaattttggcctttcgagtgccttggaggtttccctgacctcccgtgaagatacagagactgtctcctttttttttaactttgacaactgacttctgtttccttttctaagttttatttttcaaaccaccccggacagcccccagctctgattccttcaaggcccggcctgtccgggccaccattccacaccttgcggtttgaaacagctgtttttcccacatttgctgcaggcatggctgtctcctgcccctgcctgcccatctggcctataccccagccgtggggcccggggtccctgccgcagccccctccccttctgatgccttaaaagctgggccccaggccctgctggccagagccacagatgccaagctctgggagcttgactatggaccaaacagctctggcctagggattgggccaccctacccaggatctccaccctggggacagtagaaggggaaagccttcatcttggcgaaccggccccaccaccccctcctacccgggcctccgtgcagagatgggctttctctgccagtcccctgctgtctgtctgtgggagtcggacattgtgcccatctcccggagcctctgctgtcactcgcttgttgaagatgaattcttgaattctgcctgcccacccccggccagatccctggagctggcctccttccagcccagtgccagaaaccagcactccatgaagataaactctgggcccgcccaccagcaggacctgtcgacctgaggtgaccctgggccttgcccccagccaactgggccaccagcttccctcccttgactctgggggtccacatccactccaaggggactattcccccgaccccaccccagtctccccacacggacctttgctgaattaaagtttgtaagtaaatggtttt

SEQ ID NO: 176311 - DNA, 4398 bp, Homo sapiens
  Payload ID: 14614
  Gene Symbol: RAVER2
  Gene Name: ribonucleoprotein, PTB-binding 2
  Uniprot ID: Q9HCJ3
  ENST ID: ENST00000294428
  CDS Start-End: 79-2154
cccgggcctcctcccgctttctctctccgcttcccctggagcctccgaggagtccgcagccgctgggcgcccgggaagatggcggcggcggcgggagacggcggcggcgaggggggcgcgggcctgggcagcgcggcggggctggggccggggccggggctgcgcgggcagggcccctcagccgaagcgcacgagggcgccccggacccgatgcccgccgcgctgcaccctgaggaggtcgccgcgcgactgcagcggatgcagcgggagctgagcaaccgcaggaaaatcctggtgaaaaacctgccccaggacagcaactgccaggaagttcatgatttgttaaaagactatgacttaaaatattgttatgtggacagaaataaacgaacagcttttgttaccttattgaatggggaacaagcccagaacgcaattcagatgtttcatcaatattcttttagaggaaaagacttaatagtccagcttcagccaacagatgctttgttgtgtattaccaacgtgcccatttcttttacatcagaagagtttgaagaacttgttcgtgcttatggaaatattgagagatgttttctggtctatagtgaagttactggccattccaaaggctatggatttgtggaatacatgaaaaaggactttgctgcaaaggctagactggagctattgggtagacagttgggagcatcagcactctttgcacaatggatggatgttaatctattggcttcagagctcattcattctaagtgcctttgtattgataaactccccagtgactacagggattcagaagagctgttgcaaattttttccagtgtccataaacctgtgttttgccagcttgcacaggatgaaggtagttacgttggtggctttgcagtggttgaatatagcactgcggagcaggctgaagaggtccagcaggcagcagacggtatgaccatcaagggcagcaaagtccaggtttccttctgtgctcctggagcgccagggcgaagtacattagcagcattgatagcggctcaacgtgtgatgcacagtaatcaaaagggcttacttccagagccaaatccagtacaaattatgaaaagtttaaacaaccctgccatgttgcaagttcttctacagccccagttatgtggacgagctgttaaaccagccgttcttggaacacctcacagcttgccacatctgatgaatccatccatctctcctgcatttttacatttgaataaagcacatcagagctcagttatgggtaatacttctaatttattccttcagaatctttctcatataccactggcacaacaacaattaatgaagtttgagaatattcatactaataataaacccggcttacttggagagcccccagctgtggtacttcagactgcactagggatagggtcagtgcttccattgaaaaaggagttgggacatcatcatggagaagcacataaaacatctagcctgattccaactcaaacaacgataacagctggaatgggcatgttaccattctttccaaatcagcacattgctggacaggctgggccagggcacagtaatactcaggagaaacagccagccacggtgggaatggcagaaggaaatttctcagggtcgcagccttatcttcagagctttccaaaccttgctgctggaagcttgctggtgggacaccataagcagcagcaaagccagccaaaaggcacagagataagttcaggggctgcctctaagaatcaaacttcactcttgggagaaccaccaaaagaaattcggctcagtaaaaatccatacttgaatttggcaagtgtgttgcccagtgtgtgcttatcatcccctgcaagtaaaaccactcttcataagactggaattgcaagcagcattctggatgcaatctctcagggaagtgaatcacaacacgcattggaaaagtgcattgcttattctccaccttttggtgattatgcacaggtgtcatctttaagaaatgaaaagcgaggctcatcatatctcatctctgccccagaaggtggttcagtggaatgtgttgaccagcattctcagggcacaggagcatattacatggaaacttacttaaaaaagaagcgagtatactgagttaagctctctcctaataaccccctaaggttctctgcagtatctctgctgttcatcgctgccttaacttcattcaaactagccatatcctttaaatacgggtttatagtttcccagaaggaactgtgttgtgcagcaggcagaaatgccaaataaaaaatagcaataagaagagacatcaattgaggacattttccactagagtcagatgcatcttaatcagtgtgctaacttacaatccattggagaaactaacaatgttccaatattccttgatttaggactgggaataattctgacaccatatataaaagaagtttgaagcaataaatgggaaacagtgttgtttcctgagccttagaagaatgagtttcttataagccaatgtgcatttcaatttactttccctagaagtaattgcatttatagatttttaggacttttcctagaactacaagggtgcaagtaccaaatgtgctgatggtaatattataaagatgctctacatgcacactcaattacgcccacaccagccatgcaaaattaaacccggtaagagagtgacagtgatatccaaggtatccactactaccgatgctttaagatgttgtttaccatttataccttctgtgaaaaatagaaggtattttaagaaaagtaactttggtgatctaataaaagggtttggcaaactacaccctgggtccacatttggtctaccacccgcttttgtgctgcctgcaagctaagactaatgtttacatttttaaatggttggaggaaaaaagaaaacttatgacatgaaatttatatgaaattcagatttcagtgtccataaataaacttttattgggacgttgccatgctcattcatttacgtgttgtctgtggcactcttacgctacaagggcagaactgattagcttcaacagagactgtatggcctacaaagaccatatggcctaaaatttcaagtatctggccatttatatatagtttgctgatccctgatctaatagcactaattctaatagcaactattcctttcaattcacctaaagacagacctttagcctttagacagacttgtaagtggaaaggaacatgggtttctgtgctcatttcatagcgtagactagtaatgatctaatgactagaatggggcctattttgatcactaaatgccctattatttccacaatatagtatagtaaagcagtcaatactgcactttctgatggagtcttaaggagtcacagtatttataaccattttgagctaataagctatacctcactctctgctttctctctcactctttttgatagtgtgttagggtgaaaaatcagttatttaacccaatttacttgtgaaagaagttttatctttatggactatgatgacttttgacatcaccatttcttgaagaccttggtattaaatgcatgagaaaccttttgccatctagaaatttctaagtttgtttatgttataagactgtaattaattgatagggaatttgggatctcaatccggggctttttgaaatcagatcattaaatatctcgtcactttggggacttgttatttttaactatgatgtggatatcctgttttaattatgaagtctagaattggtacatatgttgtatgctttgtaaagaatttcacttggtctaatttattgcatatactagcttctgttggaaaatgactgacagctagaaagtttaaggtaatttctaagtatactacctataagtaactgataagaattaggcatcattcagtgatatagcagatgactaatgggtttttcaggccctgcacttctctttcccattttcctgttgcattcagcctcttcaatgcttagtcacacctccactatagtacaaacaaacaaacaaacagaagaaaggaaagatggtgaattttgcaacagagctgcaaaaagtcagtcagtcaaagcaggaagaggttgaaggaactaaaacaaacaaacaaaggtgtctggactacagcacagtggacatgccatccatactggcctgtgccccgttatcaatcactgggcacaacagtgaagaagtgcaaatcaagtggtgtttgtttgtttgttagtagtaaggaccgtaacccaccccttcctccccccaaaactatactgttatttttctatgtaagcaaattgtttgaaatgctttgaaaatgaaatcttaatattaaaaggcatatgcatgt

SEQ ID NO: 176312 - DNA, 4362 bp, Homo sapiens
  Payload ID: 14614
  Gene Symbol: RAVER2
  Gene Name: ribonucleoprotein, PTB-binding 2
  Uniprot ID: Q9HCJ3
  ENST ID: ENST00000371072
  CDS Start-End: 79-2115
cccgggcctcctcccgctttctctctccgcttcccctggagcctccgaggagtccgcagccgctgggcgcccgggaagatggcggcggcggcgggagacggcggcggcgaggggggcgcgggcctgggcagcgcggcggggctggggccggggccggggctgcgcgggcagggcccctcagccgaagcgcacgagggcgccccggacccgatgcccgccgcgctgcaccctgaggaggtcgccgcgcgactgcagcggatgcagcgggagctgagcaaccgcaggaaaatcctggtgaaaaacctgccccaggacagcaactgccaggaagttcatgatttgttaaaagactatgacttaaaatattgttatgtggacagaaataaacgaacagcttttgttaccttattgaatggggaacaagcccagaacgcaattcagatgtttcatcaatattcttttagaggaaaagacttaatagtccagcttcagccaacagatgctttgttgtgtattaccaacgtgcccatttcttttacatcagaagagtttgaagaacttgttcgtgcttatggaaatattgagagatgttttctggtctatagtgaagttactggccattccaaaggctatggatttgtggaatacatgaaaaaggactttgctgcaaaggctagactggagctattgggtagacagttgggagcatcagcactctttgcacaatggatggatgttaatctattggcttcagagctcattcattctaagtgcctttgtattgataaactccccagtgactacagggattcagaagagctgttgcaaattttttccagtgtccataaacctgtgttttgccagcttgcacaggatgaaggtagttacgttggtggctttgcagtggttgaatatagcactgcggagcaggctgaagaggtccagcaggcagcagacggtatgaccatcaagggcagcaaagtccaggtttccttctgtgctcctggagcgccagggcgaagtacattagcagcattgatagcggctcaacgtgtgatgcacagtaatcaaaagggcttacttccagagccaaatccagtacaaattatgaaaagtttaaacaaccctgccatgttgcaagttcttctacagccccagttatgtggacgagctgttaaaccagccgttcttggaacacctcacagcttgccacatctgatgaatccatccatctctcctgcatttttacatttgaataaagcacatcagaatctttctcatataccactggcacaacaacaattaatgaagtttgagaatattcatactaataataaacccggcttacttggagagcccccagctgtggtacttcagactgcactagggatagggtcagtgcttccattgaaaaaggagttgggacatcatcatggagaagcacataaaacatctagcctgattccaactcaaacaacgataacagctggaatgggcatgttaccattctttccaaatcagcacattgctggacaggctgggccagggcacagtaatactcaggagaaacagccagccacggtgggaatggcagaaggaaatttctcagggtcgcagccttatcttcagagctttccaaaccttgctgctggaagcttgctggtgggacaccataagcagcagcaaagccagccaaaaggcacagagataagttcaggggctgcctctaagaatcaaacttcactcttgggagaaccaccaaaagaaattcggctcagtaaaaatccatacttgaatttggcaagtgtgttgcccagtgtgtgcttatcatcccctgcaagtaaaaccactcttcataagactggaattgcaagcagcattctggatgcaatctctcagggaagtgaatcacaacacgcattggaaaagtgcattgcttattctccaccttttggtgattatgcacaggtgtcatctttaagaaatgaaaagcgaggctcatcatatctcatctctgccccagaaggtggttcagtggaatgtgttgaccagcattctcagggcacaggagcatattacatggaaacttacttaaaaaagaagcgagtatactgagttaagctctctcctaataaccccctaaggttctctgcagtatctctgctgttcatcgctgccttaacttcattcaaactagccatatcctttaaatacgggtttatagtttcccagaaggaactgtgttgtgcagcaggcagaaatgccaaataaaaaatagcaataagaagagacatcaattgaggacattttccactagagtcagatgcatcttaatcagtgtgctaacttacaatccattggagaaactaacaatgttccaatattccttgatttaggactgggaataattctgacaccatatataaaagaagtttgaagcaataaatgggaaacagtgttgtttcctgagccttagaagaatgagtttcttataagccaatgtgcatttcaatttactttccctagaagtaattgcatttatagatttttaggacttttcctagaactacaagggtgcaagtaccaaatgtgctgatggtaatattataaagatgctctacatgcacactcaattacgcccacaccagccatgcaaaattaaacccggtaagagagtgacagtgatatccaaggtatccactactaccgatgctttaagatgttgtttaccatttataccttctgtgaaaaatagaaggtattttaagaaaagtaactttggtgatctaataaaagggtttggcaaactacaccctgggtccacatttggtctaccacccgcttttgtgctgcctgcaagctaagactaatgtttacatttttaaatggttggaggaaaaaagaaaacttatgacatgaaatttatatgaaattcagatttcagtgtccataaataaacttttattgggacgttgccatgctcattcatttacgtgttgtctgtggcactcttacgctacaagggcagaactgattagcttcaacagagactgtatggcctacaaagaccatatggcctaaaatttcaagtatctggccatttatatatagtttgctgatccctgatctaatagcactaattctaatagcaactattcctttcaattcacctaaagacagacctttagcctttagacagacttgtaagtggaaaggaacatgggtttctgtgctcatttcatagcgtagactagtaatgatctaatgactagaatggggcctattttgatcactaaatgccctattatttccacaatatagtatagtaaagcagtcaatactgcactttctgatggagtcttaaggagtcacagtatttataaccattttgagctaataagctatacctcactctctgctttctctctcactctttttgatagtgtgttagggtgaaaaatcagttatttaacccaatttacttgtgaaagaagttttatctttatggactatgatgacttttgacatcaccatttcttgaagaccttggtattaaatgcatgagaaaccttttgccatctagaaatttctaagtttgtttatgttataagactgtaattaattgatagggaatttgggatctcaatccggggctttttgaaatcagatcattaaatatctcgtcactttggggacttgttatttttaactatgatgtggatatcctgttttaattatgaagtctagaattggtacatatgttgtatgctttgtaaagaatttcacttggtctaatttattgcatatactagcttctgttggaaaatgactgacagctagaaagtttaaggtaatttctaagtatactacctataagtaactgataagaattaggcatcattcagtgatatagcagatgactaatgggtttttcaggccctgcacttctctttcccattttcctgttgcattcagcctcttcaatgcttagtcacacctccactatagtacaaacaaacaaacaaacagaagaaaggaaagatggtgaattttgcaacagagctgcaaaaagtcagtcagtcaaagcaggaagaggttgaaggaactaaaacaaacaaacaaaggtgtctggactacagcacagtggacatgccatccatactggcctgtgccccgttatcaatcactgggcacaacagtgaagaagtgcaaatcaagtggtgtttgtttgtttgttagtagtaaggaccgtaacccaccccttcctccccccaaaactatactgttatttttctatgtaagcaaattgtttgaaatgctttgaaaatgaaatcttaatattaaaaggcatatgcatgtaaa

SEQ ID NO: 176313 - DNA, 2531 bp, Homo sapiens
  Payload ID: 14614
  Gene Symbol: RAVER2
  Gene Name: ribonucleoprotein, PTB-binding 2
  ENST ID: ENST00000418058
  CDS Start-End: 124-624
agtgtccataaacctgtgttttgccagcttgcacaggatgaaggtagttacgttggtggctttgcagtggttgaatatagcactgcggagcaggctgaagaggtccagcaggcagcagacggtatgaccatcaagggcagcaaagtccaggtttccttctgtgctcctggagcgccagggcgaagtacattagcagcattgatagcggctcaacgtgtgatgcacagtaatcaaaagggcttacttccagagccaaatccagtacaaattatgaaaagtttaaacaaccctgccatgttgcaagttcttctacagccccagttatgtggacgagctgttaaaccagccgttcttggaacacctcacagcttgccacatctgatgaatccatccatctctcctgcatttttacatttgaataaagcacatcagaatctttctcatataccactggcacaacaacaattaatgaagtttgagaatattcatactaataataaacccggcttacttggagagcccccagctgtggtacttcagactgcactagggatagggtcagtgcttccattgaaaaaggagttgggacatcatcatggagaagcacataaaagctgcctctaagaatcaaacttcactcttgggagaaccaccaaaagaaattcggctcagtaaaaatccatacttgaatttggcaagtgtgttgcccagtgtgtgcttatcatcccctgcaagtaaaaccactcttcataagactggaattgcaagcagcattctggatgcaatctctcagggaagtgaatcacaacacgcattggaaaagtgcattgcttattctccaccttttggtgattatgcacaggtaaataattcccaggttctgatgatactcagaaaaattggttcaactatatattgagttcactgaatatgaaattgtgatttctatattattaacgtaggcaaatcaaattgcactgatctatgtatttcttactcatcatttgaaatttgggaatgtgttcaagacattatttagtatcattttgcactagatatttacctctcactgtttacctagtggttggcaaactacagcccatagaacaaatctagcccaccacctggttttgtaaataaatttgtattgtaatacagccatgtccattcattaacatattgtctatggtgctgtcatgctataataaaagagttgagtgatgacagtagagactatgtggcctgcaagattaaatatttactatctggttctttatagaaaaatgctgctaacctctggtttgcactagtgtagacctaagaaacccaagggaatgcctctgttcttctccactgattgtagatggagaaagatgatcatatttacagacactactgtgctaacttctaaaccagccaatcaataacataaaaatattatgttcataagatgtcctgtgtcattacttaaatatttcagttttgctttggcccttcttcagcttactcttagtggtgtaagctgaatatatatcatgttagccctgtgtgattatggaatcataagagtccacaagagtcttataattatcagttctgactcttactttcctagaacagccagcttcttctcagatctatcctgttcgttggagtcttgtctccactttgatttccctggagcagctttgtgtttgcctgacccatccctaataaacttagaaaagaaaaccacttagaacaattgacgcctgattataagagtactagaaacagcccaagttctgtaaaaatggtgcagctggatattagtgaaatatttgccatctcttatatacctgggacaagacggaaaaatatgggttgggtagatgatgtaattaggtgacagtatatctatatttagagaacagtgatcacaaattgctgcagtctgaaggcattctcttatattgattcataagagtcatcttcagtcctttattagataacatttgaagtaatgacttagataaagacattaattgtaaaatttacaagatatagtcctgtacaattccaatttgtttcttttcaagaaacaaactttttataaacaggagaagcacaataaattttttaaaaattcattaaatacatatttaagctttaaaaattttttgaacttttatttctttttaaatttgcctttttcttagcagttttgcttattagattactgtgatttattgtatacttatatccatggaaagactttctcattcacacatggagaaattctgtgataatgatgccttttgcattactgtatgtcttctgcctccacacttgcttgcccagagatatggtggggaaatgaatcctccctgcactgttcagtgtctcctttgacagtccctgcttctagcgcacgcttgttcataaaatgggatttgttctctctctcgtgttctttcttccttataaacttaattaaatgttactaatggaacattaaagtacatggaattaaactaatggaatactaaaat

SEQ ID NO: 176314 - DNA, 3076 bp, Homo sapiens
  Payload ID: 14615
  Gene Symbol: RRM1
  Gene Name: ribonucleotide reductase M1
  Uniprot ID: P23921
  ENST ID: ENST00000300738
  CDS Start-End: 205-2583
gtcacgggtggcgggcgcgggaaggggatttggattgttgcgcctctgctctgaagaaagtgctgtctggctccaactccagttctttcccctgagcagcgcctggaacctaacccttcccactctgtcaccttctcgatcccgccggcgctttagagccgcagtccagtcttggatccttcagagcctcagccactagctgcgatgcatgtgatcaagcgagatggccgccaagaacgagtcatgtttgacaaaattacatctcgaatccagaagctttgttatggactcaatatggattttgttgatcctgctcagatcaccatgaaagtaatccaaggcttgtacagtggggtcaccacagtggaactagatactttggctgctgaaacagctgcaaccttgactactaagcaccctgactatgctatcctggcagccaggatcgctgtctctaacttgcacaaagaaacaaagaaagtgttcagtgatgtgatggaagacctctataactacataaatccacataatggcaaacactctcccatggtggccaagtcaacattggatattgttctggccaataaagatcgcctgaattctgctattatctatgaccgagatttctcttacaattacttcggctttaagacgctagagcggtcttatttgttgaagatcaatggaaaagtggctgaaagaccacaacatatgttgatgagagtatctgttgggatccacaaagaagacattgatgcagcaattgaaacatataatcttctttctgagaggtggtttactcatgcttcgcccactctcttcaatgctggtaccaaccgcccacaactttctagctgttttcttctgagtatgaaagatgacagcattgaaggcatttatgacactctaaagcaatgtgcattgatttctaagtctgctggaggaattggtgttgctgtgagttgtattcgggctactggcagctacattgctgggactaatggcaattccaatggccttgtaccgatgctgagagtatataacaacacagctcgatatgtggatcaaggtgggaacaagcgtcctggggcatttgctatttacctggagccttggcatttagacatctttgaattccttgatttaaagaagaacacaggaaaggaagagcagcgtgccagagatcttttctttgctctttggattccggatctcttcatgaaacgagtggagactaatcaggactggtctttgatgtgtccaaatgagtgtcctggtctggatgaggtttggggagaggaatttgagaaactatatgcaagttatgagaaacaaggtcgtgtccgcaaagttgtaaaagctcagcagctttggtatgccatcattgagtctcagacggaaacaggcaccccgtatatgctctacaaagattcctgtaatcgaaagagcaaccagcagaacctgggaaccatcaaatgcagcaacctgtgcacagaaatagtggagtacaccagcaaagatgaggttgctgtttgtaatttggcttccctggccctgaatatgtatgtcacatcagaacacacatacgactttaagaagttggctgaagtcactaaagtcgttgtccgaaacttgaataaaattattgatataaactactatcctgtaccagaggcatgcctatcaaataaacgccatcgccccattggaattggggtacaaggtctggcagatgcttttatcctgatgagatacccttttgagagtgcagaagcccagttactgaataagcagatctttgaaactatttattatggtgctctggaagccagctgtgaccttgccaaggagcagggcccatacgaaacctatgagggctctccagttagcaaaggaattcttcagtatgatatgtggaatgttactcctacagacctatgggactggaaggttctcaaggagaagattgcaaagtatggtataagaaacagtttacttattgccccgatgcctacagcttccactgctcagatcctggggaataatgagtccattgaaccttacaccagcaacatctatactcgcagagtcttgtcaggagaatttcagattgtaaatcctcacttattgaaagatcttaccgagcggggcctatggcatgaagagatgaaaaaccagattattgcatgcaatggctctattcagagcataccagaaattcctgatgacctgaagcaactttataaaactgtgtgggaaatctctcagaaaactgttctcaagatggcagctgagagaggtgctttcattgatcaaagccaatctttgaacatccacattgctgagcctaactatggcaaactcactagtatgcacttctacggctggaagcagggtttgaagactgggatgtattatttaaggacaagaccagcggctaatccaatccagttcactctaaataaggagaagctaaaagataaagaaaaggtatcaaaagaggaagaagagaaggagaggaacacagcagccatggtgtgctctttggagaatagagatgaatgtctgatgtgtggatcctgaggaaagacttggaagagaccagcatgtcttcagtagccaaactacttcttgagcatagataggtatagtgggtttgcttgaggtggtaaggctttgctggaccctgttgcaggcaaaaggagtaattgatttaaagtactgttaatgatgataatgattttttttttaaactcatatattgggattttcaccaaaataatgcttttgaaaaaaagaaaaaaaaaacggatatattgagaatcaaagtagaagttttaggaatgcaaaataagtcatcttgcatacagggagtggttaagtaaggtttcatcacccctttagcactgcttttctgaagacttcagttttgttaaggagatttagttttactgctttgactggtgggtctctagaagcaaaactgagtgataactcatgagaagtactgataggacctttatctggatatggtcctataggttattctgaaataaagataaacatttctaagtga

SEQ ID NO: 176315 - DNA, 2075 bp, Homo sapiens
  Payload ID: 14615
  Gene Symbol: RRM1
  Gene Name: ribonucleotide reductase M1
  ENST ID: ENST00000534285
  CDS Start-End: 300-2012
agggaagtctcgctgtgccaaaggtgcagcgtgcttttatggatgctgggtgaggagtggtcagggtaggggcagggtcggttgagtttcacgcttctgagtgtgacacgccctagtgggcatgtgcgttagtcggggtggcaggaacaggaaaggtgaacccggaaatgctgagtcagggtgtccgaggtggcgatcgccatcttggagtcttcaccggagtccaatcactgtgaaccaaaaacgaagtcaaataacaagtttcacactttgggaggccaagctgttttcttctgagtatgaaagatgacagcattgaaggcatttatgacactctaaagcaatgtgcattgatttctaagtctgctggaggaattggtgttgctgtgagttgtattcgggctactggcagctacattgctgggactaatggcaattccaatggccttgtaccgatgctgagagtatataacaacacagctcgatatgtggatcaaggtgggaacaagcgtcctggggcatttgctatttacctggagccttggcatttagacatctttgaattccttgatttaaagaagaacacaggaaaggaagagcagcgtgccagagatcttttctttgctctttggattccggatctcttcatgaaacgagtggagactaatcaggactggtctttgatgtgtccaaatgagtgtcctggtctggatgaggtttggggagaggaatttgagaaactatatgcaagttatgagaaacaaggtcgtgtccgcaaagttgtaaaagctcagcagctttggtatgccatcattgagtctcagacggaaacaggcaccccgtatatgctctacaaagattcctgtaatcgaaagagcaaccagcagaacctgggaaccatcaaatgcagcaacctgtgcacagaaatagtggagtacaccagcaaagatgaggttgctgtttgtaatttggcttccctggccctgaatatgtatgtcacatcagaacacacatacgactttaagaagttggctgaagtcactaaagtcgttgtccgaaacttgaataaaattattgatataaactactatcctgtaccagaggcatgcctatcaaataaacgccatcgccccattggaattggggtacaaggtctggcagatgcttttatcctgatgagatacccttttgagagtgcagaagcccagttactgaataagcagatctttgaaactatttattatggtgctctggaagccagctgtgaccttgccaaggagcagggcccatacgaaacctatgagggctctccagttagcaaaggaattcttcagtatgatatgtggaatgttactcctacagacctatgggactggaaggttctcaaggagaagattgcaaagtatggtataagaaacagtttacttattgccccgatgcctacagcttccactgctcagatcctggggaataatgagtccattgaaccttacaccagcaacatctatactcgcagagtcttgtcaggagaatttcagattgtaaatcctcacttattgaaagatcttaccgagcggggcctatggcatgaagagatgaaaaaccagattattgcatgcaatggctctattcagagcataccagaaattcctgatgacctgaagcaactttataaaactgtgtgggaaatctctcagaaaactgttctcaagatggcagctgagagaggtgctttcattgatcaaagccaatctttgaacatccacattgctgagcctaactatggcaaactcactagtatgcacttctacggctggaagcagggtttgaagactgggatgtattatttaaggacaagaccagcggctaatccaatccagttcactctaaataaggagaagctaaaagataaagaaaaggtatcaaaagaggaagaagagaaggagaggaacacagcagccatggtgtgctctttggagaatagagatgaatgtctgatgtgtggatcctgaggaaagacttggaagagaccagcatgtcttcagtagccaaactacttcttgagcatagatagg

SEQ ID NO: 176316 - DNA, 783 bp, Homo sapiens
  Payload ID: 14615
  Gene Symbol: RRM1
  Gene Name: ribonucleotide reductase M1
  ENST ID: ENST00000528442
  CDS Start-End: 1-392
aaacatataatcttctttctgagaggtggtttactcatgcttcgcccactctcttcaatgctggtaccaaccgcccacaactttctagctgttttcttctgagtatgaaagatgacagcattgaaggcatttatgacactctaaagcaatgtgcattgatttctaagtctgctggaggaattggtgttgctgtgagttgtattcgggctactggcagctacattgctgggactaatggcaattccaatggccttgtaccgatgctgagagtatataacaacacagctcgatatgtggatcaaggtgggaacaagagaattatgatttatttaccactagcgtcctggggcatttgctatttacctggagccttggcatttagacatctttgaattccttgatttaaagaagaacacaggaaaggaagagcagcgtgccagagatcttttctttgctctttggattccggatctcttcatgaaacgagtggagactaatcaggactggtctttgatgtgtccaaatgagtgtcctggtctggatgaggtttggggagaggaatttgagaaactatatgcaagttatgagaaacaaggtcgtgtccgcaaagttgtaaaagctcagcagctttggtatgccatcattgagtctcagacggaaacaggcaccccgtatatgctctacaaagattcctgtaatcgaaagagcaaccagcagaacctgggaaccatcaaatgcagcaacctgtgcacagaaatagtggagtacaccagcaaagatgag

SEQ ID NO: 176317 - DNA, 2863 bp, Homo sapiens
  Payload ID: 14615
  Gene Symbol: RRM1
  Gene Name: ribonucleotide reductase M1
  ENST ID: ENST00000533349
  CDS Start-End: 171-284
ttgttgcgcctctgctctgaagaaagtgctgtctggctccaactccagttctttcccctgagcagcgcctggaacctaacccttcccactctgtcaccttctcgatcccgccggcgctttagagccgcagtccagtcttggatccttcagagcctcagccactagctgcgatgcatgtgatcaagcgagatggccgccaagaacgagtcatgtttgacaaaattacatctcgaatccagaagctttgttatggactcaatatggattttgttgatcctatgtgatggaagacctctataactacataaatccacataatggcaaacactctcccatggtggccaagtcaacattggatattgttctggccaataaagatcgcctgaattctgctattatctatgaccgagatttctcttacaattacttcggctttaagacgctagagcggtcttatttgttgaagatcaatggaaaagtggctgaaagaccacaacatatgttgatgagagtatctgttgggatccacaaagaagacattgatgcagcaattgaaacatataatcttctttctgagaggtggtttactcatgcttcgcccactctcttcaatgctggtaccaaccgcccacaactttctagctgttttcttctgagtatgaaagatgacagcattgaaggcatttatgacactctaaagcaatgtgcattgatttctaagtctgctggaggaattggtgttgctgtgagttgtattcgggctactggcagctacattgctgggactaatggcaattccaatggccttgtaccgatgctgagagtatataacaacacagctcgatatgtggatcaaggtgggaacaagcgtcctggggcatttgctatttacctggagccttggcatttagacatctttgaattccttgatttaaagaagaacacaggaaaggaagagcagcgtgccagagatcttttctttgctctttggattccggatctcttcatgaaacgagtggagactaatcaggactggtctttgatgtgtccaaatgagtgtcctggtctggatgaggtttggggagaggaatttgagaaactatatgcaagttatgagaaacaaggtcgtgtccgcaaagttgtaaaagctcagcagctttggtatgccatcattgagtctcagacggaaacaggcaccccgtatatgctctacaaagattcctgtaatcgaaagagcaaccagcagaacctgggaaccatcaaatgcagcaacctgtgcacagaaatagtggagtacaccagcaaagatgaggttgctgtttgtaatttggcttccctggccctgaatatgtatgtcacatcagaacacacatacgactttaagaagttggctgaagtcactaaagtcgttgtccgaaacttgaataaaattattgatataaactactatcctgtaccagaggcatgcctatcaaataaacgccatcgccccattggaattggggtacaaggtctggcagatgcttttatcctgatgagatacccttttgagagtgcagaagcccagttactgaataagcagatctttgaaactatttattatggtgctctggaagccagctgtgaccttgccaaggagcagggcccatacgaaacctatgagggctctccagttagcaaaggaattcttcagtatgatatgtggaatgttactcctacagacctatgggactggaaggttctcaaggagaagattgcaaagtatggtataagaaacagtttacttattgccccgatgcctacagcttccactgctcagatcctggggaataatgagtccattgaaccttacaccagcaacatctatactcgcagagtcttgtcaggagaatttcagattgtaaatcctcacttattgaaagatcttaccgagcggggcctatggcatgaagagatgaaaaaccagattattgcatgcaatggctctattcagagcataccagaaattcctgatgacctgaagcaactttataaaactgtgtgggaaatctctcagaaaactgttctcaagatggcagctgagagaggtgctttcattgatcaaagccaatctttgaacatccacattgctgagcctaactatggcaaactcactagtatgcacttctacggctggaagcagggtttgaagactgggatgtattatttaaggacaagaccagcggctaatccaatccagttcactctaaataaggagaagctaaaagataaagaaaaggtatcaaaagaggaagaagagaaggagaggaacacagcagccatggtgtgctctttggagaatagagatgaatgtctgatgtgtggatcctgaggaaagacttggaagagaccagcatgtcttcagtagccaaactacttcttgagcatagataggtatagtgggtttgcttgaggtggtaaggctttgctggaccctgttgcaggcaaaaggagtaattgatttaaagtactgttaatgatgataatgattttttttttaaactcatatattgggattttcaccaaaataatgcttttgaaaaaaagaaaaaaaaaacggatatattgagaatcaaagtagaagttttaggaatgcaaaataagtcatcttgcatacagggagtggttaagtaaggtttcatcacccctttagcactgcttttctgaagacttcagttttgttaaggagatttagttttactgctttgactggtgggtctctagaagcaaaactgagtgataactcatgagaagtactgataggacctttatctggatatggtcctataggttattctgaaataaagataaacatttctaagtg

SEQ ID NO: 176318 - DNA, 3166 bp, Homo sapiens
  Payload ID: 14615
  Gene Symbol: RRM1
  Gene Name: ribonucleotide reductase M1
  ENST ID: ENST00000532170
  CDS Start-End: 215-424
ccctttgtgcgtcacgggtggcgggcgcgggaaggggatttggattgttgcgcctctgctctgaagaaagtgctgtctggctccaactccagttctttcccctgagcagcgcctggaacctaacccttcccactctgtcaccttctcgatcccgccggcgctttagagccgcagtccagtcttggatccttcagagcctcagccactagctgcgatgcatgtgatcaagcgagatggccgccaagaacgagtcatgtttgacaaaattacatctcgaatccagaagctttgttatggactcaatatggattttgttgatcctggtctcactctgccacccaggctggagtgcagtggcataatcacagctcattgcagcctcagcttcccgagtagctgggatcacaggctcagatcaccatgaaagtaatccaaggcttgtacagtggggtcaccacagtggaactagatactttggctgctgaaacagctgcaaccttgactactaagcaccctgactatgctatcctggcagccaggatcgctgtctctaacttgcacaaagaaacaaagaaagtgttcagtgatgtgatggaagacctctataactacataaatccacataatggcaaacactctcccatggtggccaagtcaacattggatattgttctggccaataaagatcgcctgaattctgctattatctatgaccgagatttctcttacaattacttcggctttaagacgctagagcggtcttatttgttgaagatcaatggaaaagtggctgaaagaccacaacatatgttgatgagagtatctgttgggatccacaaagaagacattgatgcagcaattgaaacatataatcttctttctgagaggtggtttactcatgcttcgcccactctcttcaatgctggtaccaaccgcccacaactttctagctgttttcttctgagtatgaaagatgacagcattgaaggcatttatgacactctaaagcaatgtgcattgatttctaagtctgctggaggaattggtgttgctgtgagttgtattcgggctactggcagctacattgctgggactaatggcaattccaatggccttgtaccgatgctgagagtatataacaacacagctcgatatgtggatcaaggtgggaacaagcgtcctggggcatttgctatttacctggagccttggcatttagacatctttgaattccttgatttaaagaagaacacaggaaaggaagagcagcgtgccagagatcttttctttgctctttggattccggatctcttcatgaaacgagtggagactaatcaggactggtctttgatgtgtccaaatgagtgtcctggtctggatgaggtttggggagaggaatttgagaaactatatgcaagttatgagaaacaaggtcgtgtccgcaaagttgtaaaagctcagcagctttggtatgccatcattgagtctcagacggaaacaggcaccccgtatatgctctacaaagattcctgtaatcgaaagagcaaccagcagaacctgggaaccatcaaatgcagcaacctgtgcacagaaatagtggagtacaccagcaaagatgaggttgctgtttgtaatttggcttccctggccctgaatatgtatgtcacatcagaacacacatacgactttaagaagttggctgaagtcactaaagtcgttgtccgaaacttgaataaaattattgatataaactactatcctgtaccagaggcatgcctatcaaataaacgccatcgccccattggaattggggtacaaggtctggcagatgcttttatcctgatgagatacccttttgagagtgcagaagcccagttactgaataagcagatctttgaaactatttattatggtgctctggaagccagctgtgaccttgccaaggagcagggcccatacgaaacctatgagggctctccagttagcaaaggaattcttcagtatgatatgtggaatgttactcctacagacctatgggactggaaggttctcaaggagaagattgcaaagtatggtataagaaacagtttacttattgccccgatgcctacagcttccactgctcagatcctggggaataatgagtccattgaaccttacaccagcaacatctatactcgcagagtcttgtcaggagaatttcagattgtaaatcctcacttattgaaagatcttaccgagcggggcctatggcatgaagagatgaaaaaccagattattgcatgcaatggctctattcagagcataccagaaattcctgatgacctgaagcaactttataaaactgtgtgggaaatctctcagaaaactgttctcaagatggcagctgagagaggtgctttcattgatcaaagccaatctttgaacatccacattgctgagcctaactatggcaaactcactagtatgcacttctacggctggaagcagggtttgaagactgggatgtattatttaaggacaagaccagcggctaatccaatccagttcactctaaataaggagaagctaaaagataaagaaaaggtatcaaaagaggaagaagagaaggagaggaacacagcagccatggtgtgctctttggagaatagagatgaatgtctgatgtgtggatcctgaggaaagacttggaagagaccagcatgtcttcagtagccaaactacttcttgagcatagataggtatagtgggtttgcttgaggtggtaaggctttgctggaccctgttgcaggcaaaaggagtaattgatttaaagtactgttaatgatgataatgattttttttttaaactcatatattgggattttcaccaaaataatgcttttgaaaaaaagaaaaaaaaaacggatatattgagaatcaaagtagaagttttaggaatgcaaaataagtcatcttgcatacagggagtggttaagtaaggtttcatcacccctttagcactgcttttctgaagacttcagttttgttaaggagatttagttttactgctttgactggtgggtctctagaagcaaaactgagtgataactcatgagaagtactgataggacctttatctggatatggtcctataggttattctgaaataaagataaacatttct

SEQ ID NO: 176319 - DNA, 2381 bp, Homo sapiens
  Payload ID: 14615
  Gene Symbol: RRM1
  Gene Name: ribonucleotide reductase M1
  ENST ID: ENST00000533495
  CDS Start-End: 135-362
aaatgctgagtcagggtgtccgaggtggcgatcgccatcttggagtcttcaccggagtccaatcactgtgaaccaaaaacgaagtcaaataacaagtttcacactttgggaggccaagctgttttcttctgagtatgaaagatgacagcattgaaggcatttatgacactctaaagcaatgtgcattgatttctaagtctgctggaggaattggtgttgctgtgagttgtattcgggctactggcagctacattgctgggactaatggcaattccaatggccttgtaccgatgctgagagtatataacaacacagctcgatatgtggatcaaggtgggaacaaggtatgctccatgaattgaaagtactggaaatcagaactaaagcgtcctggggcatttgctatttacctggagccttggcatttagacatctttgaattccttgatttaaagaagaacacaggaaaggaagagcagcgtgccagagatcttttctttgctctttggattccggatctcttcatgaaacgagtggagactaatcaggactggtctttgatgtgtccaaatgagtgtcctggtctggatgaggtttggggagaggaatttgagaaactatatgcaagttatgagaaacaaggtcgtgtccgcaaagttgtaaaagctcagcagctttggtatgccatcattgagtctcagacggaaacaggcaccccgtatatgctctacaaagattcctgtaatcgaaagagcaaccagcagaacctgggaaccatcaaatgcagcaacctgtgcacagaaatagtggagtacaccagcaaagatgaggttgctgtttgtaatttggcttccctggccctgaatatgtatgtcacatcagaacacacatacgactttaagaagttggctgaagtcactaaagtcgttgtccgaaacttgaataaaattattgatataaactactatcctgtaccagaggcatgcctatcaaataaacgccatcgccccattggaattggggtacaaggtctggcagatgcttttatcctgatgagatacccttttgagagtgcagaagcccagttactgaataagcagatctttgaaactatttattatggtgctctggaagccagctgtgaccttgccaaggagcagggcccatacgaaacctatgagggctctccagttagcaaaggaattcttcagtatgatatgtggaatgttactcctacagacctatgggactggaaggttctcaaggagaagattgcaaagtatggtataagaaacagtttacttattgccccgatgcctacagcttccactgctcagatcctggggaataatgagtccattgaaccttacaccagcaacatctatactcgcagagtcttgtcaggagaatttcagattgtaaatcctcacttattgaaagatcttaccgagcggggcctatggcatgaagagatgaaaaaccagattattgcatgcaatggctctattcagagcataccagaaattcctgatgacctgaagcaactttataaaactgtgtgggaaatctctcagaaaactgttctcaagatggcagctgagagaggtgctttcattgatcaaagccaatctttgaacatccacattgctgagcctaactatggcaaactcactagtatgcacttctacggctggaagcagggtttgaagactgggatgtattatttaaggacaagaccagcggctaatccaatccagttcactctaaataaggagaagctaaaagataaagaaaaggtatcaaaagaggaagaagagaaggagaggaacacagcagccatggtgtgctctttggagaatagagatgaatgtctgatgtgtggatcctgaggaaagacttggaagagaccagcatgtcttcagtagccaaactacttcttgagcatagataggtatagtgggtttgcttgaggtggtaaggctttgctggaccctgttgcaggcaaaaggagtaattgatttaaagtactgttaatgatgataatgattttttttttaaactcatatattgggattttcaccaaaataatgcttttgaaaaaaagaaaaaaaaaacggatatattgagaatcaaagtagaagttttaggaatgcaaaataagtcatcttgcatacagggagtggttaagtaaggtttcatcacccctttagcactgcttttctgaagacttcagttttgttaaggagatttagttttactgctttgactggtgggtctctagaagcaaaactgagtgataactcatgagaagtactgataggacctttatctggatatggtcctataggttattctgaaataaagataaacatttctaagtg

SEQ ID NO: 176320 - DNA, 3271 bp, Homo sapiens
  Payload ID: 14616
  Gene Symbol: RRM2
  Gene Name: ribonucleotide reductase M2
  Uniprot ID: P31350
  ENST ID: ENST00000304567
  CDS Start-End: 70-1239
gggtcgcccgtgcaccctgtcccagccgtcctgtcctggctgctcgctctgcttcgctgcgcctccactatgctctccctccgtgtcccgctcgcgcccatcacggacccgcagcagctgcagctctcgccgctgaaggggctcagcttggtcgacaaggagaacacgccgccggccctgagcgggacccgcgtcctggccagcaagaccgcgaggaggatcttccaggagcccacggagccgaaaactaaagcagctgcccccggcgtggaggatgagccgctgctgagagaaaacccccgccgctttgtcatcttccccatcgagtaccatgatatctggcagatgtataagaaggcagaggcttccttttggaccgccgaggaggtggacctctccaaggacattcagcactgggaatccctgaaacccgaggagagatattttatatcccatgttctggctttctttgcagcaagcgatggcatagtaaatgaaaacttggtggagcgatttagccaagaagttcagattacagaagcccgctgtttctatggcttccaaattgccatggaaaacatacattctgaaatgtatagtcttcttattgacacttacataaaagatcccaaagaaagggaatttctcttcaatgccattgaaacgatgccttgtgtcaagaagaaggcagactgggccttgcgctggattggggacaaagaggctacctatggtgaacgtgttgtagcctttgctgcagtggaaggcattttcttttccggttcttttgcgtcgatattctggctcaagaaacgaggactgatgcctggcctcacattttctaatgaacttattagcagagatgagggtttacactgtgattttgcttgcctgatgttcaaacacctggtacacaaaccatcggaggagagagtaagagaaataattatcaatgctgttcggatagaacaggagttcctcactgaggccttgcctgtgaagctcattgggatgaattgcactctaatgaagcaatacattgagtttgtggcagacagacttatgctggaactgggttttagcaaggttttcagagtagagaacccatttgactttatggagaatatttcactggaaggaaagactaacttctttgagaagagagtaggcgagtatcagaggatgggagtgatgtcaagtccaacagagaattcttttaccttggatgctgacttctaaatgaactgaagatgtgcccttacttggctgattttttttttccatctcataagaaaaatcagctgaagtgttaccaactagccacaccatgaattgtccgtaatgttcattaacagcatctttaaaactgtgtagctacctcacaaccagtcctgtctgtttatagtgctggtagtatcaccttttgccagaaggcctggctggctgtgacttaccatagcagtgacaatggcagtcttggctttaaagtgaggggtgaccctttagtgagcttagcacagcgggattaaacagtcctttaaccagcacagccagttaaaagatgcagcctcactgcttcaacgcagattttaatgtttacttaaatataaacctggcactttacaaacaaataaacattgtttgtactcacaaggcgataatagcttgatttatttggtttctacaccaaatacattctcctgaccactaatgggagccaattcacaattcactaagtgactaaagtaagttaaacttgtgtagactaagcatgtaatttttaagttttattttaatgaattaaaatatttgttaaccaactttaaagtcagtcctgtgtatacctagatattagtcagttggtgccagatagaagacaggttgtgtttttatcctgtggcttgtgtagtgtcctgggattctctgccccctctgagtagagtgttgtgggataaaggaatctctcagggcaaggagcttcttaagttaaatcactagaaatttaggggtgatctgggccttcatatgtgtgagaagccgtttcattttatttctcactgtattttcctcaacgtctggttgatgagaaaaaattcttgaagagttttcatatgtgggagctaaggtagtattgtaaaatttcaagtcatccttaaacaaaatgatccacctaagatcttgcccctgttaagtggtgaaatcaactagaggtggttcctacaagttgttcattctagttttgtttggtgtaagtaggttgtgtgagttaattcatttatatttactatgtctgttaaatcagaaattttttattatctatgttcttctagattttacctgtagttcatacttcagtcacccagtgtcttattctggcattgtctaaatctgagcattgtctagggggatcttaaactttagtaggaaaccatgagctgttaatacagtttccattcaaatattaatttcagaatgaaacataatttttttttttttttttgagatggagtctcgctctgttgcccaggctggagtgcagtggcgcgattttggctcactgtaacctccatctcctgggttcaagcaattctcctgtctcagcctccctagtagctgggactgcaggtatgtgctaccacacctggctaatttttgtatttttagtagagatggagtttcaccatattggtcaggctggtcttgaactcctgacctcaggtgatccacccacctcggcctcccaaagtgctgggattgcaggcgtgataaacaaatattcttaatagggctactttgaattaatctgcctttatgtttgggagaagaaagctgagacattgcatgaaagatgatgagagataaatgttgatcttttggccccatttgttaattgtattcagtatttgaacgtcgtcctgtttattgttagttttcttcatcatttattgtatagacaatttttaaatctctgtaatatgatacattttcctatcttttaagttattgttacctaaagttaatccagattatatggtccttatatgtgtacaacattaaaatgaaaggctttgtcttgcattgtgaggtacaggcggaagttggaatcaggttttaggattctgtctctcattagctgaataatgtgaggattaacttctgccagctcagaccatttcctaatcagttgaaagggaaacaagtatttcagtctcaaaattgaataatgcacaagtcttaagtgattaaaataaaactgttcttatgtcagttt

SEQ ID NO: 176321 - DNA, 3673 bp, Homo sapiens
  Payload ID: 14616
  Gene Symbol: RRM2
  Gene Name: ribonucleotide reductase M2
  Uniprot ID: P31350
  ENST ID: ENST00000360566
  CDS Start-End: 292-1641
gctcctcacgcaatcctaaacggttcccgggcgaaccggggcccgcgcgcgccaaggccgccgagaccctcaggggctgcggccctggtcccgcgggacctgtgggggcctgggcggcggcgcccccgacccagccagcggacgggccggggggggaaccgggaggtcccggggggcgtccacgggggtgtccccgggggtctccggaaggcgccggcggaggctcccgcgctgcgcttgaaaatcgcgcgcggccccgcggccagcctgggtaggggcaaggcgcagccaatgggaagggtcggaggcatggcacagccaatgggaagggccggggcaccaaagccaatgggaagggccgggagcgcgcggcgcgggagatttaaaggctgctggagtgaggggtcgcccgtgcaccctgtcccagccgtcctgtcctggctgctcgctctgcttcgctgcgcctccactatgctctccctccgtgtcccgctcgcgcccatcacggacccgcagcagctgcagctctcgccgctgaaggggctcagcttggtcgacaaggagaacacgccgccggccctgagcgggacccgcgtcctggccagcaagaccgcgaggaggatcttccaggagcccacggagccgaaaactaaagcagctgcccccggcgtggaggatgagccgctgctgagagaaaacccccgccgctttgtcatcttccccatcgagtaccatgatatctggcagatgtataagaaggcagaggcttccttttggaccgccgaggaggtggacctctccaaggacattcagcactgggaatccctgaaacccgaggagagatattttatatcccatgttctggctttctttgcagcaagcgatggcatagtaaatgaaaacttggtggagcgatttagccaagaagttcagattacagaagcccgctgtttctatggcttccaaattgccatggaaaacatacattctgaaatgtatagtcttcttattgacacttacataaaagatcccaaagaaagggaatttctcttcaatgccattgaaacgatgccttgtgtcaagaagaaggcagactgggccttgcgctggattggggacaaagaggctacctatggtgaacgtgttgtagcctttgctgcagtggaaggcattttcttttccggttcttttgcgtcgatattctggctcaagaaacgaggactgatgcctggcctcacattttctaatgaacttattagcagagatgagggtttacactgtgattttgcttgcctgatgttcaaacacctggtacacaaaccatcggaggagagagtaagagaaataattatcaatgctgttcggatagaacaggagttcctcactgaggccttgcctgtgaagctcattgggatgaattgcactctaatgaagcaatacattgagtttgtggcagacagacttatgctggaactgggttttagcaaggttttcagagtagagaacccatttgactttatggagaatatttcactggaaggaaagactaacttctttgagaagagagtaggcgagtatcagaggatgggagtgatgtcaagtccaacagagaattcttttaccttggatgctgacttctaaatgaactgaagatgtgcccttacttggctgattttttttttccatctcataagaaaaatcagctgaagtgttaccaactagccacaccatgaattgtccgtaatgttcattaacagcatctttaaaactgtgtagctacctcacaaccagtcctgtctgtttatagtgctggtagtatcaccttttgccagaaggcctggctggctgtgacttaccatagcagtgacaatggcagtcttggctttaaagtgaggggtgaccctttagtgagcttagcacagcgggattaaacagtcctttaaccagcacagccagttaaaagatgcagcctcactgcttcaacgcagattttaatgtttacttaaatataaacctggcactttacaaacaaataaacattgtttgtactcacaaggcgataatagcttgatttatttggtttctacaccaaatacattctcctgaccactaatgggagccaattcacaattcactaagtgactaaagtaagttaaacttgtgtagactaagcatgtaatttttaagttttattttaatgaattaaaatatttgttaaccaactttaaagtcagtcctgtgtatacctagatattagtcagttggtgccagatagaagacaggttgtgtttttatcctgtggcttgtgtagtgtcctgggattctctgccccctctgagtagagtgttgtgggataaaggaatctctcagggcaaggagcttcttaagttaaatcactagaaatttaggggtgatctgggccttcatatgtgtgagaagccgtttcattttatttctcactgtattttcctcaacgtctggttgatgagaaaaaattcttgaagagttttcatatgtgggagctaaggtagtattgtaaaatttcaagtcatccttaaacaaaatgatccacctaagatcttgcccctgttaagtggtgaaatcaactagaggtggttcctacaagttgttcattctagttttgtttggtgtaagtaggttgtgtgagttaattcatttatatttactatgtctgttaaatcagaaattttttattatctatgttcttctagattttacctgtagttcatacttcagtcacccagtgtcttattctggcattgtctaaatctgagcattgtctagggggatcttaaactttagtaggaaaccatgagctgttaatacagtttccattcaaatattaatttcagaatgaaacataatttttttttttttttttgagatggagtctcgctctgttgcccaggctggagtgcagtggcgcgattttggctcactgtaacctccatctcctgggttcaagcaattctcctgtctcagcctccctagtagctgggactgcaggtatgtgctaccacacctggctaatttttgtatttttagtagagatggagtttcaccatattggtcaggctggtcttgaactcctgacctcaggtgatccacccacctcggcctcccaaagtgctgggattgcaggcgtgataaacaaatattcttaatagggctactttgaattaatctgcctttatgtttgggagaagaaagctgagacattgcatgaaagatgatgagagataaatgttgatcttttggccccatttgttaattgtattcagtatttgaacgtcgtcctgtttattgttagttttcttcatcatttattgtatagacaatttttaaatctctgtaatatgatacattttcctatcttttaagttattgttacctaaagttaatccagattatatggtccttatatgtgtacaacattaaaatgaaaggctttgtcttgcattgtgaggtacaggcggaagttggaatcaggttttaggattctgtctctcattagctgaataatgtgaggattaacttctgccagctcagaccatttcctaatcagttgaaagggaaacaagtatttcagtctcaaaattgaataatgcacaagtcttaagtgattaaaataaaactgttcttatgtcagttt

SEQ ID NO: 176322 - DNA, 1060 bp, Homo sapiens
  Payload ID: 14616
  Gene Symbol: RRM2
  Gene Name: ribonucleotide reductase M2
  ENST ID: ENST00000474701
  CDS Start-End: 193-1060
ggcggcccctccccagggctgcctcccgcgcccctcggcccatttcccggttcgggcgtgcgctcctctgctgcgacccacggagtgcgacgggacagccacgttttcacatcgggccccgtgaaattgccgccaatggaaaggacttggtccagaaaaacgttagtttcatatggttcgcccggtacttaaatgttttattttctcccccaacagaaaactaaagcagctgcccccggcgtggaggatgagccgctgctgagagaaaacccccgccgctttgtcatcttccccatcgagtaccatgatatctggcagatgtataagaaggcagaggcttccttttggaccgccgaggaggtggacctctccaaggacattcagcactgggaatccctgaaacccgaggagagatattttatatcccatgttctggctttctttgcagcaagcgatggcatagtaaatgaaaacttggtggagcgatttagccaagaagttcagattacagaagcccgctgtttctatggcttccaaattgccatggaaaacatacattctgaaatgtatagtcttcttattgacacttacataaaagatcccaaagaaagggaatttctcttcaatgccattgaaacgatgccttgtgtcaagaagaaggcagactgggccttgcgctggattggggacaaagaggctacctatggtgaacgtgttgtagcctttgctgcagtggaaggcattttcttttccggttcttttgcgtcgatattctggctcaagaaacgaggactgatgcctggcctcacattttctaatgaacttattagcagagatgagggtttacactgtgattttgcttgcctgatgttcaaacacctggtacacaaaccatcggaggagagagtaagagaaataattatcaatgctgttcggatagaacaggagttcctcactgaggccttgcctgtgaagctcattgggatgaattgcactctaatgaagcaatacattgagtttgtggcagacagacttatgctggaactgggttttagcaagg

SEQ ID NO: 176323 - DNA, 3434 bp, Homo sapiens
  Payload ID: 14616
  Gene Symbol: RRM2
  Gene Name: ribonucleotide reductase M2
  Uniprot ID: P31350
  ENST ID: ENST00000615152
  CDS Start-End: 52-1401
aaaatcgcgcgcggccccgcggccagcctgggtaggggcaaggcgcagccaatgggaagggtcggaggcatggcacagccaatgggaagggccggggcaccaaagccaatgggaagggccgggagcgcgcggcgcgggagatttaaaggctgctggagtgaggggtcgcccgtgcaccctgtcccagccgtcctgtcctggctgctcgctctgcttcgctgcgcctccactatgctctccctccgtgtcccgctcgcgcccatcacggacccgcagcagctgcagctctcgccgctgaaggggctcagcttggtcgacaaggagaacacgccgccggccctgagcgggacccgcgtcctggccagcaagaccgcgaggaggatcttccaggagcccacggagccgaaaactaaagcagctgcccccggcgtggaggatgagccgctgctgagagaaaacccccgccgctttgtcatcttccccatcgagtaccatgatatctggcagatgtataagaaggcagaggcttccttttggaccgccgaggaggtggacctctccaaggacattcagcactgggaatccctgaaacccgaggagagatattttatatcccatgttctggctttctttgcagcaagcgatggcatagtaaatgaaaacttggtggagcgatttagccaagaagttcagattacagaagcccgctgtttctatggcttccaaattgccatggaaaacatacattctgaaatgtatagtcttcttattgacacttacataaaagatcccaaagaaagggaatttctcttcaatgccattgaaacgatgccttgtgtcaagaagaaggcagactgggccttgcgctggattggggacaaagaggctacctatggtgaacgtgttgtagcctttgctgcagtggaaggcattttcttttccggttcttttgcgtcgatattctggctcaagaaacgaggactgatgcctggcctcacattttctaatgaacttattagcagagatgagggtttacactgtgattttgcttgcctgatgttcaaacacctggtacacaaaccatcggaggagagagtaagagaaataattatcaatgctgttcggatagaacaggagttcctcactgaggccttgcctgtgaagctcattgggatgaattgcactctaatgaagcaatacattgagtttgtggcagacagacttatgctggaactgggttttagcaaggttttcagagtagagaacccatttgactttatggagaatatttcactggaaggaaagactaacttctttgagaagagagtaggcgagtatcagaggatgggagtgatgtcaagtccaacagagaattcttttaccttggatgctgacttctaaatgaactgaagatgtgcccttacttggctgattttttttttccatctcataagaaaaatcagctgaagtgttaccaactagccacaccatgaattgtccgtaatgttcattaacagcatctttaaaactgtgtagctacctcacaaccagtcctgtctgtttatagtgctggtagtatcaccttttgccagaaggcctggctggctgtgacttaccatagcagtgacaatggcagtcttggctttaaagtgaggggtgaccctttagtgagcttagcacagcgggattaaacagtcctttaaccagcacagccagttaaaagatgcagcctcactgcttcaacgcagattttaatgtttacttaaatataaacctggcactttacaaacaaataaacattgtttgtactcacaaggcgataatagcttgatttatttggtttctacaccaaatacattctcctgaccactaatgggagccaattcacaattcactaagtgactaaagtaagttaaacttgtgtagactaagcatgtaatttttaagttttattttaatgaattaaaatatttgttaaccaactttaaagtcagtcctgtgtatacctagatattagtcagttggtgccagatagaagacaggttgtgtttttatcctgtggcttgtgtagtgtcctgggattctctgccccctctgagtagagtgttgtgggataaaggaatctctcagggcaaggagcttcttaagttaaatcactagaaatttaggggtgatctgggccttcatatgtgtgagaagccgtttcattttatttctcactgtattttcctcaacgtctggttgatgagaaaaaattcttgaagagttttcatatgtgggagctaaggtagtattgtaaaatttcaagtcatccttaaacaaaatgatccacctaagatcttgcccctgttaagtggtgaaatcaactagaggtggttcctacaagttgttcattctagttttgtttggtgtaagtaggttgtgtgagttaattcatttatatttactatgtctgttaaatcagaaattttttattatctatgttcttctagattttacctgtagttcatacttcagtcacccagtgtcttattctggcattgtctaaatctgagcattgtctagggggatcttaaactttagtaggaaaccatgagctgttaatacagtttccattcaaatattaatttcagaatgaaacataatttttttttttttttttgagatggagtctcgctctgttgcccaggctggagtgcagtggcgcgattttggctcactgtaacctccatctcctgggttcaagcaattctcctgtctcagcctccctagtagctgggactgcaggtatgtgctaccacacctggctaatttttgtatttttagtagagatggagtttcaccatattggtcaggctggtcttgaactcctgacctcaggtgatccacccacctcggcctcccaaagtgctgggattgcaggcgtgataaacaaatattcttaatagggctactttgaattaatctgcctttatgtttgggagaagaaagctgagacattgcatgaaagatgatgagagataaatgttgatcttttggccccatttgttaattgtattcagtatttgaacgtcgtcctgtttattgttagttttcttcatcatttattgtatagacaatttttaaatctctgtaatatgatacattttcctatcttttaagttattgttacctaaagttaatccagattatatggtccttatatgtgtacaacattaaaatgaaaggctttgtcttgcattgtgaggtacaggcggaagttggaatcaggttttaggattctgtctctcattagctgaataatgtgaggattaacttctgccagctcagaccatttcctaatcagttgaaagggaaacaagtatttcagtctcaaaattgaataatgcacaagtcttaagtgattaaaataaaactgttcttatgtcagtttc

SEQ ID NO: 176324 - DNA, 4931 bp, Homo sapiens
  Payload ID: 14617
  Gene Symbol: RRM2B
  Gene Name: ribonucleotide reductase M2 B (TP53 inducible)
  Uniprot ID: Q7LG56
  ENST ID: ENST00000251810
  CDS Start-End: 245-1300
ggctggccgaagttaggcggagccccgaggcgggggaggcggggccgggccggcgcagggagagtcactcaatggacaggcgagaaagcaggaccggcgcggcggggcggggccggccgagtccctagagctgggggcggggcggacccagcggaccagcggaccacctgggtgctgtcgtagttggaggtggcctgaggagctcagttccctcagcgcccgtagcttcggcggagtctgcgcgatgggcgacccggaaaggccggaagcggccgggctggatcaggatgagagatcatcttcagacaccaacgaaagtgaaataaagtcaaatgaagagccactcctaagaaagagttctcgccggtttgtcatctttccaatccagtaccctgatatttggaaaatgtataaacaggcacaggcttccttctggacagcagaagaggtcgacttatcaaaggatctccctcactggaacaagcttaaagcagatgagaagtacttcatctctcacatcttagccttttttgcagccagtgatggaattgtaaatgaaaatttggtggagcgctttagtcaggaggtgcaggttccagaggctcgctgtttctatggctttcaaattctcatcgagaatgttcactcagagatgtacagtttgctgatagacacttacatcagagatcccaagaaaagggaatttttatttaatgcaattgaaaccatgccctatgttaagaaaaaagcagattgggccttgcgatggatagcagatagaaaatctacttttggggaaagagtggtggcctttgctgctgtagaaggagttttcttctcaggatcttttgctgctatattctggctaaagaagagaggtcttatgccaggactcactttttccaatgaactcatcagcagagatgaaggacttcactgtgactttgcttgcctgatgttccaatacttagtaaataagccttcagaagaaagggtcagggagatcattgttgatgctgtcaaaattgagcaggagtttttaacagaagccttgccagttggcctcattggaatgaattgcattttgatgaaacagtacattgagtttgtagctgacagattacttgtggaacttggattctcaaaggtttttcaggcagaaaatccttttgattttatggaaaacatttctttagaaggaaaaacaaatttctttgagaaacgagtttcagagtatcagcgttttgcagttatggcagaaaccacagataacgtcttcaccttggatgcagatttttaaaaaacctctcgttttaaaactctataaacttgtcattggtaaatagtagtctattttcctctgcttaaaaaaaattttaagtatatcctttaaaggactgggggtttgctcaaaaggaaatccaaaacctattctaaacaatttgcatttatataattttcctgtttaacaacaagagtgtgacctaaatgcttttgtcttgtcactgaaataaaagatggcattatgtggttaagagcatggggcgaggggtcagacatgagtctaaggttctgcccttactccagtgtgtgacccttggcaagtcagttaatcttggtaaacctcggtgtacttatctttaaaatgggagtaatagtaggtcctaaattcatagagtggatattaggattaggatgcaaaaataaatgcttaaccaacactactactgttagcaccactactaattatcattcattgataatattaattgcaatgatgttgtaataaaatactctcatttccttaaaataattgtgattctaggtcctaggatctagaattagatctttgtatttttaatgcttaggggaagaatataagtatctccttaaaaagaacataattctcattcacgcaagaataagttctttgaattccttagtatgtagtgaagaaaatttagttgttagttgctttgggaagcctacttatggagtggaaaccaggaggttatcatggtagttgaccttataagaaaaatgattcttcttcagaaattaaaaacataactattgccagatttagctctggaatgtttagaatcaggctagaatagcattttccaaagaatattctaagagctattagctcctctagatatttttttgggggaaaaaggggattctgtggtcagatgagtttgggaaatgctgaacacttcattcttctttagcaagtacagtcagtacatcaaagactgagcagttcagtggtacataaatttatctcgccctgcatattcccaacatacttaacacagatgttttttacctgttaacatctcacccagctagtgttcctcagaacaaagattggaaaaagctggccgagaaccatttatacatagaggaagggcttatggactgagaaagggagaacatggtagggattattgaatcatttcaaatttataccagcctgaatagtgtaccagcaattgacttaggctgtgtttctttatggttttaaaactcttgagctgttataagagatagttcttttaatgtgactatgcaacatgatagccaatggtgagggaaaaggaggtttctctagaagagtctgatgaaaggccgggaaccaaggtttttgagaagtctgcccctatttatttttagtaagtatcaagaggtagcctgagcctagttagagttagacctgtctttggatgaagaagtcttaatactgaaatactgaatttttaatacattattatttggtattctgtataccccttcaagcagttgtttcccattcccaacaaactgtactttatacaattctggatgctaaaacttagagattttctctttgcataaattttggctccattctttccataacaatctaatcaaaactgggagttctcaagtgaatgcaaaaggagcaggccataactttatttgttagatacactgtcagaaacttgagatcttttggcctatgataataccattaatttttgcattgcttcagtttgccaagtgtttttacatcatctcatttgatctcaaaacagcttgacagagcaactgttattgaaatattacagatggaaagaatgaggctcagggaagttaaatgacttggccaagatctgctcatcgtcactgtctgtacagtatttttttttagaggttgtaatgtctcagatttagtcctttaccatctatgttgatttgcttttgtctatttcctcattaattgaatatactttaaatatatatattaaagtatcaaaatatagagagacatttgaactgtattcaggtaatatgtttaaagatatttatatattgccatacaaaaacttaacatttaaaactgataatatctgtaatgacatcagaatgaaagaaaaaaaattgtacagtgtatattcctttgttttgaatccaaatctttttcataggtaatgacagatgccttaatgtgaagcttatttataatagcaataaacctaactggatttggatgaagaagtcttaatactgacatactggatttttaatgcactggtttgttatttggtattctatctctttttccaggcctccaggttgcacatttatttattatgttcaatactttggttcttagttcttaaagaatcaagaagttgtgtaatcttttaaaaatattatcttgcagataaagaaaaaaattaagagtgtgtttacaactgttttctcttttttacagtacatgtatttaaatcattgctataataaagttaagttcattaggaatataaaaacttgcagttctatgatagattgcatttattaaaaatgtttcattgtatcacatagaaatatggccaggaaggacttgagaagacagtttgatccattgcttttagacaggactgggttttgctgtccaattatatacaataatagtttttcttacaactaagctggccccagccttgtcttgatattaatacatgaaatttttataattgtctcattgtctcatttagaaacatccatatttttctgctttttctattgccattttttatttgtgcatgaattgattattgagaaaatgtagcagtttgcatatttaaaaattaatcattttgcattttacatttaaatatgctaacatcactgtcatagaattcccaaatttcatttgtagatactgaactaagggctaatgtcaggagctgatttttaatgataaagctgcagatgggctaaataaaagccaaattaatcctacaatcaggtattatgtttttaaaccaagttgagtgaattggtagtggacttgggaaatcttccccagcagaatctggatgaatggcacagaattgaaatctctttgtttcccaccatttccctttaagtgctctgctcctttgtaaaaagttaaagatttgaaagagaatctcatattcccgaggcattaggaagaaaggatttaatcccttcaatttggggcttaatcttgtttaaaaaaatgtaagtgaagatggaaggctggagagaatgattgctttttgtacagttaaataaggtcacaatattcttacatactttgttttacaactgtgttttcattttttcaaatgtctggccatttagcaaagttatttactatttactgtgtacatagaaagctttattatgtgtggtgtatctaaattttttttgctgaaatacattatggtcaatcaagccaagcctgcatgtacagaatttgtttttttttcaaataaattagttgttttcttatttttttggcttagtatgttgaaataaactatggtatcttcatcattttgtacatttcctttttgaggaaggtttctttataagtgcaagggctaccctaataaaggaatgtatatacttac

SEQ ID NO: 176325 - DNA, 900 bp, Homo sapiens
  Payload ID: 14617
  Gene Symbol: RRM2B
  Gene Name: ribonucleotide reductase M2 B (TP53 inducible)
  Uniprot ID: Q7LG56
  ENST ID: ENST00000395912
  CDS Start-End: 1-900
atgggcgacccggaaaggccggaagcggccgggctggatcaggatgaggtcgacttatcaaaggatctccctcactggaacaagcttaaagcagatgagaagtacttcatctctcacatcttagccttttttgcagccagtgatggaattgtaaatgaaaatttggtggagcgctttagtcaggaggtgcaggttccagaggctcgctgtttctatggctttcaaattctcatcgagaatgttcactcagagatgtacagtttgctgatagacacttacatcagagatcccaagaaaagggaatttttatttaatgcaattgaaaccatgccctatgttaagaaaaaagcagattgggccttgcgatggatagcagatagaaaatctacttttggggaaagagtggtggcctttgctgctgtagaaggagttttcttctcaggatcttttgctgctatattctggctaaagaagagaggtcttatgccaggactcactttttccaatgaactcatcagcagagatgaaggacttcactgtgactttgcttgcctgatgttccaatacttagtaaataagccttcagaagaaagggtcagggagatcattgttgatgctgtcaaaattgagcaggagtttttaacagaagccttgccagttggcctcattggaatgaattgcattttgatgaaacagtacattgagtttgtagctgacagattacttgtggaacttggattctcaaaggtttttcaggcagaaaatccttttgattttatggaaaacatttctttagaaggaaaaacaaatttctttgagaaacgagtttcagagtatcagcgttttgcagttatggcagaaaccacagataacgtcttcaccttggatgcagatttttaa

SEQ ID NO: 176326 - DNA, 603 bp, Homo sapiens
  Payload ID: 14617
  Gene Symbol: RRM2B
  Gene Name: ribonucleotide reductase M2 B (TP53 inducible)
  ENST ID: ENST00000523957
  CDS Start-End: 66-263
gtagttggaggtggcctgaggagctcagttccctcagcgcccgtagcttcggcggagtctgcgcgatgggcgacccggaaaggccggaagcggccgggctggatcaggatgagatggagtcttgctctgtcaccaggcctgagtgcagtggcgtgatctcagctcactgcaatctctgccttctgggttcaagtgattctcctgcctcagcctcccgagtagctgggactacagagatcatcttcagacaccaacgaaagtgaaataaagtcaaatgaagagccactcctaagaaagagttctcgccggtttgtcatctttccaatccagtaccctgatatttggaaaatgtataaacaggcacaggcttccttctggacagcagaagaggtcgacttatcaaaggatctccctcactggaacaagcttaaagcagatgagaagtacttcatctctcacatcttagccttttttgcagccagtgatggaattgtaaatgaaaatttggtggagcgctttagtcaggaggtgcaggttccagaggctcgctgtttctatggctttcaaattctcatcgagaatgttcactcagagatgtacagt

SEQ ID NO: 176327 - DNA, 1613 bp, Homo sapiens
  Payload ID: 14617
  Gene Symbol: RRM2B
  Gene Name: ribonucleotide reductase M2 B (TP53 inducible)
  ENST ID: ENST00000522368
  CDS Start-End: 1-1225
agattgcaagttgcaggaccgctgtaggaaatgttattcgccgcggtcaggacaggcctgtccgcccgccctcgccgcagcctggcttcgtcgttgcgagcgccggggaggccgtccccggggagggcggaggaaggagctgactttgggtttgcgtcccgctcgctgctctgccccggggccagccaaggacgacgcttggaggcctcaggccgggagatcatcttcagacaccaacgaaagtgaaataaagtcaaatgaagagccactcctaagaaagagttctcgccggtttgtcatctttccaatccagtaccctgatatttggaaaatgtataaacaggcacaggcttccttctggacagcagaagaggtcgacttatcaaaggatctccctcactggaacaagcttaaagcagatgagaagtacttcatctctcacatcttagccttttttgcagccagtgatggaattgtaaatgaaaatttggtggagcgctttagtcaggaggtgcaggttccagaggctcgctgtttctatggctttcaaattctcatcgagaatgttcactcagagatgtacagtttgctgatagacacttacatcagagatcccaagaaaagggaatttttatttaatgcaattgaaaccatgccctatgttaagaaaaaagcagattgggccttgcgatggatagcagatagaaaatctacttttggggaaagagtggtggcctttgctgctgtagaaggagttttcttctcaggatcttttgctgctatattctggctaaagaagagaggtcttatgccaggactcactttttccaatgaactcatcagcagagatgaaggacttcactgtgactttgcttgcctgatgttccaatacttagtaaataagccttcagaagaaagggtcagggagatcattgttgatgctgtcaaaattgagcaggagtttttaacagaagccttgccagttggcctcattggaatgaattgcattttgatgaaacagtacattgagtttgtagctgacagattacttgtggaacttggattctcaaaggtttttcaggcagaaaatccttttgattttatggaaaacatttctttagaaggaaaaacaaatttctttgagaaacgagtttcagagtatcagcgttttgcagttatggcagaaaccacagataacgtcttcaccttggatgcagatttttaaaaaacctctcgttttaaaactctataaacttgtcattggtaaatagtagtctattttcctctgcttaaaaaaaattttaagtatatcctttaaaggactgggggtttgctcaaaaggaaatccaaaacctattctaaacaatttgcatttatataattttcctgtttaacaacaagagtgtgacctaaatgcttttgtcttgtcactgaaataaaagatggcattatgtggttaagagcatggggcgaggggtcagacatgagtctaaggttctgcccttactccagtgtgtgacccttggcaagtcagttaatcttggtaaacctcggtgtacttatctttaaaatgggagtaatagtaggtcctaaattcatagagtggatattag

SEQ ID NO: 176328 - DNA, 201 bp, Homo sapiens
  Payload ID: 14617
  Gene Symbol: RRM2B
  Gene Name: ribonucleotide reductase M2 B (TP53 inducible)
  Uniprot ID: Q7LG56
  ENST ID: ENST00000519962
  CDS Start-End: 1-201
atgggcgacccggaaaggccggaagcggccgggctggatcaggatgaggtttttcaggcagaaaatccttttgattttatggaaaacatttctttagaaggaaaaacaaatttctttgagaaacgagtttcagagtatcagcgttttgcagttatggcagaaaccacagataacgtcttcaccttggatgcagatttttaa

SEQ ID NO: 176329 - DNA, 389 bp, Homo sapiens
  Payload ID: 14617
  Gene Symbol: RRM2B
  Gene Name: ribonucleotide reductase M2 B (TP53 inducible)
  Uniprot ID: Q7LG56
  ENST ID: ENST00000522394
  CDS Start-End: 1-132
atgggcgacccggaaaggccggaagcggccgggctggatcaggatgagagatcatcttcagacaccaacgaaagtgaaataaagtcaaatgaagagccactcctaagaaagagttctcgccggagtttttaacagaagccttgccagttggcctcattggaatgaattgcattttgatgaaacagtacattgagtttgtagctgacagattacttgtggaacttggattctcaaaggtttttcaggcagaaaatccttttgattttatggaaaacatttctttagaaggaaaaacaaatttctttgagaaacgagtttcagagtatcagcgttttgcagttatggcagaaaccacagataacgtcttcaccttggatgcagatttttaa

SEQ ID NO: 176330 - DNA, 420 bp, Homo sapiens
  Payload ID: 14617
  Gene Symbol: RRM2B
  Gene Name: ribonucleotide reductase M2 B (TP53 inducible)
  Uniprot ID: Q7LG56
  ENST ID: ENST00000519317
  CDS Start-End: 1-420
atgggcgacccggaaaggccggaagcggccgggctggatcaggatgagggacttcactgtgactttgcttgcctgatgttccaatacttagtaaataagccttcagaagaaagggtcagggagatcattgttgatgctgtcaaaattgagcaggagtttttaacagaagccttgccagttggcctcattggaatgaattgcattttgatgaaacagtacattgagtttgtagctgacagattacttgtggaacttggattctcaaaggtttttcaggcagaaaatccttttgattttatggaaaacatttctttagaaggaaaaacaaatttctttgagaaacgagtttcagagtatcagcgttttgcagttatggcagaaaccacagataacgtcttcaccttggatgcagatttttaa

SEQ ID NO: 176331 - DNA, 3483 bp, Homo sapiens
  Payload ID: 14617
  Gene Symbol: RRM2B
  Gene Name: ribonucleotide reductase M2 B (TP53 inducible)
  ENST ID: ENST00000621845
  CDS Start-End: 332-1225
agattgcaagttgcaggaccgctgtaggaaatgttattcgccgcggtcaggacaggcctgtccgcccgccctcgccgcagcctggcttcgtcgttgcgagcgccggggaggccgtccccggggagggcggaggaaggagctgactttgggtttgcgtcccgctcgctgctctgccccggggccagccaaggacgacgcttggaggcctcaggccgggagatcatcttcagacaccaacgaaagtgaaataaagtcaaatgaagagccactcctaagaaagagttctcgccggtttgtcatctttccaatccagtaccctgatatttggaaaatgtataaacaggcacaggcttccttctggacagcagaagaggtcgacttatcaaaggatctccctcactggaacaagcttaaagcagatgagaagtacttcatctctcacatcttagccttttttgcagccagtgatggaattgtaaatgaaaatttggtggagcgctttagtcaggaggtgcaggttccagaggctcgctgtttctatggctttcaaattctcatcgagaatgttcactcagagatgtacagtttgctgatagacacttacatcagagatcccaagaaaagggaatttttatttaatgcaattgaaaccatgccctatgttaagaaaaaagcagattgggccttgcgatggatagcagatagaaaatctacttttggggaaagagtggtggcctttgctgctgtagaaggagttttcttctcaggatcttttgctgctatattctggctaaagaagagaggtcttatgccaggactcactttttccaatgaactcatcagcagagatgaaggacttcactgtgactttgcttgcctgatgttccaatacttagtaaataagccttcagaagaaagggtcagggagatcattgttgatgctgtcaaaattgagcaggagtttttaacagaagccttgccagttggcctcattggaatgaattgcattttgatgaaacagtacattgagtttgtagctgacagattacttgtggaacttggattctcaaaggtttttcaggcagaaaatccttttgattttatggaaaacatttctttagaaggaaaaacaaatttctttgagaaacgagtttcagagtatcagcgttttgcagttatggcagaaaccacagataacgtcttcaccttggatgcagatttttaaaaaacctctcgttttaaaactctataaacttgtcattggtaaatagtagtctattttcctctgcttaaaaaaaattttaagtatatcctttaaaggactgggggtttgctcaaaaggaaatccaaaacctattctaaacaatttgcatttatataattttcctgtttaacaacaagagtgtgacctaaatgcttttgtcttgtcactgaaataaaagatggcattatgtggttaagagcatggggcgaggggtcagacatgagtctaaggttctgcccttactccagtgtgtgacccttggcaagtcagttaatcttggtaaacctcggtgtacttatctttaaaatgggagtaatagtaggtcctaaattcatagagtggatattaggattaggatgcaaaaataaatgcttaaccaacactactactgttagcaccactactaattatcattcattgataatattaattgcaatgatgttgtaataaaatactctcatttccttaaaataattgtgattctaggtcctaggatctagaattagatctttgtatttttaatgcttaggggaagaatataagtatctccttaaaaagaacataattctcattcacgcaagaataagttctttgaattccttagtatgtagtgaagaaaatttagttgttagttgctttgggaagcctacttatggagtggaaaccaggaggttatcatggtagttgaccttataagaaaaatgattcttcttcagaaattaaaaacataactattgccagatttagctctggaatgtttagaatcagtacatcaaagactgagcagttcagtggtacataaatttatctcgccctgcatattcccaacatacttaacacagatgttttttacctgttaacatctcacccagctagtgttcctcagaacaaagattggaaaaagctggccgagaaccatttatacatagaggaagggcttatggactgagaaagggagaacatggtagggattattgaatcatttcaaatttataccagcctgaatagtgtaccagcaattgacttaggctgtgtttctttatggttttaaaactcttgagctgttataagagatagttcttttaatgtgactatgcaacatgatagccaatggtgagggaaaaggaggtttctctagaagagtctgatgaaaggccgggaaccaaggtttttgagaagtctgcccctatttatttttagtaagtatcaagaggtagcctgagcctagttagagttagacctgtctttggatgaagaagtcttaatactgaaatactgaatttttaatacattattatttggtattctgtataccccttcaagcagttgtttcccattcccaacaaactgtactttatacaattctggatgctaaaacttagagattttctctttgcataaattttggctccattctttccataacaatctaatcaaaactgggagttctcaagtgaatgcaaaaggagcaggccataactttatttgttagatacactgtcagaaacttgagatcttttggcctatgataataccattaatttttgcattgcttcagtttgccaagatctgctcatcgtcactgtctgtacagtatttttttttagaggttgtaatgtctcagatttagtcctttaccatctatgttgatttgcttttgtctatttcctcattaattgaatatactttaaatatatatattaaagtatcaaaatatagagagacatttgaactgtattcaggtaatatgtttaaagatatttatatattgccatacaaaaacttaacatttaaaactgataatatctgtaatgacatcagaatgaaagaaaaaaaattgtacagtgtatattcctttgttttgaatccaaatctttttcataggtaatgacagatgccttaatgtgaagcttatttataatagcaataaacctaactggatttggatgaagaagtcttaatactgacatactggatttttaatgcactggtttgttatttggtattctatctctttttccaggcctccaggttgcacatttatttattatgttcaatactttggttcttagttcttaaagaatcaagaagttgtgtaatcttttaaaaatattatcttgcagataaagaaaaaaattaagagtgtgtttacaactgttttctcttttttacagtacatgtatttaaatcattgctataataaagttaagttcattagg

SEQ ID NO: 176332 - DNA, 2314 bp, Homo sapiens
  Payload ID: 14618
  Gene Symbol: RPN1
  Gene Name: ribophorin I
  Uniprot ID: P04843
  ENST ID: ENST00000296255
  CDS Start-End: 50-1873
gctaccgcgcccgggccctacccgccctggcgcactgctcttcccggtcatggaggcgccagccgccggcttgtttctgctcctgttgcttgggacttgggccccggcgccgggcagcgcctcctccgaggcaccgccgctgatcaatgaggacgtgaagcgcacagtggacctaagcagccacctggctaaggtgacggccgaggtggtcctggcgcacctgggcggcggctccacgtcccgagctacctctttcctgctggctttggagcctgagctcgaggcccggctggcgcacctgggcgtgcaggtaaagggagaagatgaggaagagaacaatttggaagtacgtgaaaccaaaattaagggtaaaagtgggagattcttcacagtcaagctcccagttgctcttgatcctggggccaagatttcagtcattgtggaaacagtctacacccatgtgcttcatccgtatccaacccagatcacccagtcagagaaacagtttgtggtgtttgaggggaaccattatttctactctccctatccaacgaagacacaaaccatgcgtgtgaagcttgcctctcgaaatgtggagagctacaccaagctggggaaccccacgcgctctgaggacctactggattatgggcctttcagagatgtgcctgcctatagtcaggatacttttaaagtacattatgagaacaacagccctttcctgaccatcaccagcatgacccgagtcattgaagtctctcactggggtaatattgctgtggaagaaaatgtggacttaaagcacacaggagctgtgcttaaggggcctttctcacgctatgattaccagagacagccagatagtggaatatcctccatccgttcttttaagaccatccttcctgctgctgcccaggatgtttattaccgggatgagattggcaatgtttctaccagccacctccttattttggatgactctgtagagatggaaatccggcctcgcttccctctctttggcgggtggaagacccattacatcgttggctacaacctcccaagctatgagtacctctataatttgggtgaccagtatgcactgaagatgaggtttgtggaccatgtgtttgatgaacaagtgatagattctctgactgtgaagatcatcctgcctgaaggagccaagaacattgaaattgatagtccctatgaaatcagccgtgccccagatgagctgcactacacctatctggacacatttggccgccctgtgattgttgcctacaagaaaaatctggtagaacagcacattcaggacattgtggtccactacacgttcaacaaggtgctcatgctgcaggagcccctgctggtggtggcggccttctacatcctgttcttcaccgttatcatctatgttcggctggacttctccatcaccaaggatccagccgcagaagccaggatgaaggtagcctgcatcacagagcaggtcttgaccctggtcaacaagagaataggcctttaccgtcactttgacgagaccgtcaataggtacaagcaatcccgggacatctccaccctcaacagtggcaagaagagcctggagactgaacacaaggccttgaccagtgagattgcactgctgcagtccaggctgaagacagagggctctgatctgtgcgacagagtgagcgaaatgcagaagctggatgcacaggtcaaggagctggtgctgaagtcggcggtggaggctgagcgcctggtggctggcaagctcaagaaagacacgtacattgagaatgagaagctcatctcaggaaagcgccaggagctggtcaccaagatcgaccacatcctggatgccctgtagcccctgcccgcatcctccagggggcccagggtgcctgcactttgctgtggcaggcagattgggtggtagtgggaggttgtgcatggaggccagtgaaagctgacatctgtaaaaggccttcaaggaagagaaaccaggccctgcgtcaggcagtgtgagtttgccgtttgtccttaactttctttttttttttttttaaaaaaagaaaactttaaaaaaactcccattaaaaacaaaacatctttgtgttttgaacaaaggaattttcaatatttgattggtattctgttctgaagtctaagatatttttcagcctataaagccccctgttttatgcccttctaattctgatgtttgggtattgtgtgagtgcatgtgtttttttttttttttttaaagcgtgtgtgaacaaatggaaataaagcagggactgtgaacatt

SEQ ID NO: 176333 - DNA, 2137 bp, Homo sapiens
  Payload ID: 14618
  Gene Symbol: RPN1
  Gene Name: ribophorin I
  ENST ID: ENST00000497289
  CDS Start-End: 578-1885
catcttttacaagaaaccttcgctgcaaccgctgcgtcacatcaccgcgtctcccagggacaggaaagcctctccgtgtttggtgaagcttcaggggaagcagtcatcctgtcgtcgcatacggcaaaatcctccattgccgtagccgttcggctgacgtgacaagggaggtgcaggccaacacggcgactccgcgccctctggcggcagtgccggagcagcggcgctgtctttgacctatccggcattcggcttccgggaccgcttggcggctgtgaatgcagagctggggcgacgtggggctcgcttcctgggactgggtgtaaagggagaagatgaggaagagaacaatttggaagtacgtgaaaccaaaattaagggtaaaagtgggagattcttcacagtcaagctcccagttgctcttgatcctggggccaagatttcagtcattgtggaaacagtctacacccatgtgcttcatccgtatccaacccagatcacccagtcagagaaacagtttgtggtgtttgaggggaaccattatttctactctccctatccaacgaagacacaaaccatgcgtgtgaagcttgcctctcgaaatgtggagagctacaccaagctggggaaccccacgcgctctgaggacctactggattatgggcctttcagagatgtgcctgcctatagtcaggatacttttaaagtacattatgagaacaacagccctttcctgaccatcaccagcatgacccgagtcattgaagtctctcactggggtaatattgctgtggaagaaaatgtggacttaaagcacacaggagctgtgcttaaggggcctttctcacgctatgattaccagagacagccagatagtggaatatcctccatccgttcttttaagaccatccttcctgctgctgcccaggatgtttattaccgggatgagattggcaatgtttctaccagccacctccttattttggatgactctgtagagatggaaatccggcctcgcttccctctctttggcgggtggaagacccattacatcgttggctacaacctcccaagctatgagtacctctataatttgggtgaccagtatgcactgaagatgaggtttgtggaccatgtgtttgatgaacaagtgatagattctctgactgtgaagatcatcctgcctgaaggagccaagaacattgaaattgatagtccctatgaaatcagccgtgccccagatgagctgcactacacctatctggacacatttggccgccctgtgattgttgcctacaagaaaaatctggtagaacagcacattcaggacattgtggtccactacacgttcaacaaggtgctcatgctgcaggagcccctgctggtggtggcggccttctacatcctgttcttcaccgttatcatctatgttcggctggacttctccatcaccaaggatccagccgcagaagccaggatgaaggtagcctgcatcacagagcaggtcttgaccctggtcaacaagagaataggcctttaccgtcactttgacgagaccgtcaataggtacaagcaatcccgggacatctccaccctcaacagtggcaagaagagcctggagactgaacacaaggccttgaccagtgagattgcactgctgcagtccaggctgaagacagagggctctgatctgtgcgacagagtgagcgaaatgcagaagctggatgcacaggtcaaggagctggtgctgaagtcggcggtggaggctgagcgcctggtggctggcaagctcaagaaagacacgtacattgagaatgagaagctcatctcaggaaagcgccaggagctggtcaccaagatcgaccacatcctggatgccctgtagcccctgcccgcatcctccagggggcccagggtgcctgcactttgctgtggcaggcagattgggtggtagtgggaggttgtgcatggaggccagtgaaagctgacatctgtaaaaggccttcaaggaagagaaaccaggccctgcgtcaggcagtgtgagtttgccgtttgtccttaactttctttttttttttttttaaaaaaagaaaactttaaaaaaactcccattaaaaacaaaacatctttgtgtttt

SEQ ID NO: 176334 - DNA, 526 bp, Homo sapiens
  Payload ID: 14618
  Gene Symbol: RPN1
  Gene Name: ribophorin I
  ENST ID: ENST00000476931
  CDS Start-End: 21-386
gcgcactgctcttcccggtcatggaggcgccagccgccggcttgtttctgctcctgttgcttgggacttgggccccggcgccgggcagcgcctcctccgaggcaccgccgctgatcaatgaggacgtgaagcgcacagtggacctaagcagccacctggctaaggtgacggccgaggtggtcctggcgcacctgggcggcggctccacgtcccgagctacctctttcctgctggctttggagcctgagctcgaggcccggctggcgcacctgggcgtgcaggtaaagggagaagatgaggaagagaacaatttggaagtacgtgaaaccaaaattaagggtaaaagggtctgttgcccaggctccattactgtggtgccatgttgactcactgcaacctccacctccagggctcaaaccgtccttctccctcagcctcccaaataggtgggactagagtgggagattcttcacagtcaagctcccagttgctcttgatcctggggccaagatttcagtcattgtgg

SEQ ID NO: 176335 - DNA, 2515 bp, Homo sapiens
  Payload ID: 14619
  Gene Symbol: RPN2
  Gene Name: ribophorin II
  Uniprot ID: P04844
  ENST ID: ENST00000237530
  CDS Start-End: 312-2207
gcgtcccggtagctcccggaataggagcgttgcgagacggtcggttccaagtgggcctgggcgcgggggagaggcgggtctgtcctcgggaactgcaaggccctgtgagcgggaggactgggatcccggccgcggctgctggaagcgtcgaagctcagcggggccgcggacactgacctgtgcttagaactcatcctggcccgcagagcctgccgcgagtccctggcgtcccctgtggcgggctcttggagccactttcccgagcggaagtcagcccgcggctcggactccggcgggacctgctcggaggaatggcgccgccgggttcaagcactgtcttcctgttggccctgacaatcatagccagcacctgggctctgacgcccactcactacctcaccaagcatgacgtggagagactaaaagcctcgctggatcgccctttcacaaatttggaatctgccttctactccatcgtgggactcagcagccttggtgctcaggtgccagatgcaaagaaagcatgtacctacatcagatctaaccttgatcccagcaatgtggattccctcttctacgctgcccaggccagccaggccctctcaggatgtgagatctctatttcaaatgagaccaaagatctgcttctggcagctgtcagtgaggactcatctgttacccagatctaccatgcagttgcagctctaagtggctttggccttcccttggcatcccaagaagcactcagtgcccttactgctcgtctcagcaaggaggagactgtgctggcaacagtccaggctctgcagacagcatcccacctgtcccagcaggctgacctgaggagcatcgtggaggagattgaggaccttgttgctcgcctggatgaactcgggggcgtgtatctccagtttgaagaaggactggaaacaacagcgttatttgtggctgccacctacaagctcatggatcatgtggggactgagccatccattaaggaggatcaggtcatccagctgatgaacgcgatcttcagcaagaagaactttgagtccctctccgaagccttcagcgtggcctctgcagctgctgtgctctcgcataatcgctaccacgtgccagttgtggttgtgcctgagggctctgcttccgacactcatgaacaggctatcttgcggttgcaagtcaccaatgttctgtctcagcctctgactcaggccactgttaaactagaacatgctaaatctgttgcttccagagccactgtcctccagaagacatccttcacccctgtaggggatgtttttgaactaaatttcatgaacgtcaaattttccagtggttattatgacttccttgtcgaagttgaaggtgacaaccggtatattgcaaataccgtagagctcagagtcaagatctccactgaagttggcatcacaaatgttgatctttccaccgtggataaggatcagagcattgcacccaaaactacccgggtgacatacccagccaaagccaagggcacattcatcgcagacagccaccagaacttcgccttgttcttccagctggtagatgtgaacactggtgctgaactcactcctcaccagacatttgtccgactccataaccagaagactggccaggaagtggtgtttgttgccgagccagacaacaagaacgtgtacaagtttgaactggatacctctgaaagaaagattgaatttgactctgcctctggcacctacactctctacttaatcattggagatgccactttgaagaacccaatcctctggaatgtggctgatgtggtcatcaagttccctgaggaagaagctccctcgactgtcttgtcccagaaccttttcactccaaaacaggaaattcagcacctgttccgcgagcctgagaagaggccccccaccgtggtgtccaatacattcactgccctgatcctctcgccgttgcttctgctcttcgctctgtggatccggattggtgccaatgtctccaacttcacttttgctcctagcacgattatatttcacctgggacatgctgctatgctgggactcatgtatgtctactggactcagctcaacatgttccagaccttgaagtacctggccatcctgggcagtgtgacgtttctggctggcaatcggatgctggcccagcaggcagtcaagagaacagcacattagttccagaagaaagatggaaattctgaaaactgaatgtcaagaaaaggagtcaagaacaattcacagtatgagaagaaaaatggaaaaaaaaaactttatttaaaaaagaaaaaagtccagattgtagttatacttttgcttgtttttcagtttccccaacacacagcagatacctggtgagctcagatagtctctttctctgacactgtgtaagaagctgtgaatattcctaacttacccagatgttgcttttgaaaagttgaaatgtgtaattgttttggaataaagagggtaacaataggaacaaa

SEQ ID NO: 176336 - DNA, 2348 bp, Homo sapiens
  Payload ID: 14619
  Gene Symbol: RPN2
  Gene Name: ribophorin II
  Uniprot ID: P04844
  ENST ID: ENST00000373622
  CDS Start-End: 197-2044
gactgggatcccggccgcggctgctggaagcgtcgaagctcagcggggccgcggacactgacctgtgcttagaactcatcctggcccgcagagcctgccgcgagtccctggcgtcccctgtggcgggctcttggagccactttcccgagcggaagtcagcccgcggctcggactccggcgggacctgctcggaggaatggcgccgccgggttcaagcactgtcttcctgttggccctgacaatcatagccagcacctgggctctgacgcccactcactacctcaccaagcatgacgtggagagactaaaagcctcgctggatcgccctttcacaaatttggaatctgccttctactccatcgtgggactcagcagccttggtgctcaggtgccagatgcaaagatctctatttcaaatgagaccaaagatctgcttctggcagctgtcagtgaggactcatctgttacccagatctaccatgcagttgcagctctaagtggctttggccttcccttggcatcccaagaagcactcagtgcccttactgctcgtctcagcaaggaggagactgtgctggcaacagtccaggctctgcagacagcatcccacctgtcccagcaggctgacctgaggagcatcgtggaggagattgaggaccttgttgctcgcctggatgaactcgggggcgtgtatctccagtttgaagaaggactggaaacaacagcgttatttgtggctgccacctacaagctcatggatcatgtggggactgagccatccattaaggaggatcaggtcatccagctgatgaacgcgatcttcagcaagaagaactttgagtccctctccgaagccttcagcgtggcctctgcagctgctgtgctctcgcataatcgctaccacgtgccagttgtggttgtgcctgagggctctgcttccgacactcatgaacaggctatcttgcggttgcaagtcaccaatgttctgtctcagcctctgactcaggccactgttaaactagaacatgctaaatctgttgcttccagagccactgtcctccagaagacatccttcacccctgtaggggatgtttttgaactaaatttcatgaacgtcaaattttccagtggttattatgacttccttgtcgaagttgaaggtgacaaccggtatattgcaaataccgtagagctcagagtcaagatctccactgaagttggcatcacaaatgttgatctttccaccgtggataaggatcagagcattgcacccaaaactacccgggtgacatacccagccaaagccaagggcacattcatcgcagacagccaccagaacttcgccttgttcttccagctggtagatgtgaacactggtgctgaactcactcctcaccagacatttgtccgactccataaccagaagactggccaggaagtggtgtttgttgccgagccagacaacaagaacgtgtacaagtttgaactggatacctctgaaagaaagattgaatttgactctgcctctggcacctacactctctacttaatcattggagatgccactttgaagaacccaatcctctggaatgtggctgatgtggtcatcaagttccctgaggaagaagctccctcgactgtcttgtcccagaaccttttcactccaaaacaggaaattcagcacctgttccgcgagcctgagaagaggccccccaccgtggtgtccaatacattcactgccctgatcctctcgccgttgcttctgctcttcgctctgtggatccggattggtgccaatgtctccaacttcacttttgctcctagcacgattatatttcacctgggacatgctgctatgctgggactcatgtatgtctactggactcagctcaacatgttccagaccttgaagtacctggccatcctgggcagtgtgacgtttctggctggcaatcggatgctggcccagcaggcagtcaagaggatcgctgcagagcagagcagtagattggcaaaatataggacactacgaacagcacattagttccagaagaaagatggaaattctgaaaactgaatgtcaagaaaaggagtcaagaacaattcacagtatgagaagaaaaatggaaaaaaaaaactttatttaaaaaagaaaaaagtccagattgtagttatacttttgcttgtttttcagtttccccaacacacagcagatacctggtgagctcagatagtctctttctctgacactgtgtaagaagctgtgaatattcctaacttacccagatgttgcttttgaaaagttgaaatgtgtaattgttttggaataaagagggtaacaataggaa

SEQ ID NO: 176337 - DNA, 1073 bp, Homo sapiens
  Payload ID: 14619
  Gene Symbol: RPN2
  Gene Name: ribophorin II
  ENST ID: ENST00000373632
  CDS Start-End: 40-1073
agcccgcggctcggactccggcgggacctgctcggaggaatggcgccgccgggttcaagcactgtcttcctgttggccctgacaatcatagccagcacctgggctctgacgcccactcactacctcaccaagcatgacgtggagagactaaaagcctcgctggatcgccctttcacaaatttggaatctgccttctactccatcgtgggactcagcagccttggtgctcaggtgccagatgcaaagaaagcatgtacctacatcagatctaaccttgatcccagcaatgtggattccctcttctacgctgcccaggccagccaggccctctcaggatgtgagatctctatttcaaatgagaccaaagatctgcttctggcagctgtcagtgaggactcatctgttacccagatctaccatgcagttgcagctctaagtggctttggccttcccttggcatcccaagaagcactcagtgcccttactgctcgtctcagcaaggaggagactgtgctggcgagggtgtggagcaccgttctggaatcccgttcgttgtttagcaagagaacagtccaggctctgcagacagcatcccacctgtcccagcaggctgacctgaggagcatcgtggaggagattgaggaccttgttgctcgcctggatgaactcgggggcgtgtatctccagtttgaagaaggactggaaacaacagcgttatttgtggctgccacctacaagctcatggatcatgtggggactgagccatccattaaggaggatcaggtcatccagctgatgaacgcgatcttcagcaagaagaactttgagtccctctccgaagccttcagcgtggcctctgcagctgctgtgctctcgcataatcgctaccacgtgccagttgtggttgtgcctgagggctctgcttccgacactcatgaacaggctatcttgcggttgcaagtcaccaatgttctgtctcagcctctgactcaggccactgttaaactagaacatgctaaatctgttgcttccagagccactgtcctccagaagacatccttcacccctgtagg

SEQ ID NO: 176338 - DNA, 791 bp, Homo sapiens
  Payload ID: 14619
  Gene Symbol: RPN2
  Gene Name: ribophorin II
  ENST ID: ENST00000456102
  CDS Start-End: 292-791
tgttcctggatgagccacctccatgttgagcctgtaaaactggcctaatatgttctctatgagtcactgcattgctctgcaaatcagataaaacgtcactcgtaggttcaagcactgtcttcctgttggccctgacaatcatagccagcacctgggctctgacgcccactcactacctcaccaagcatgacgtggagagactaaaagcctcgctggatcgccctttcacaaatttggaatctgccttctactccatcgtgggactcagcagccttggtgctcaggtgccagatgcaaagaacagtccaggctctgcagacagcatcccacctgtcccagcaggctgacctgaggagcatcgtggaggagattgaggaccttgttgctcgcctggatgaactcgggggcgtgtatctccagtttgaagaaggactggaaacaacagcgttatttgtggctgccacctacaagctcatggatcatgtggggactgagccatccattaaggaggatcaggtcatccagctgatgaacgcgatcttcagcaagaagaactttgagtccctctccgaagccttcagcgtggcctctgcagctgctgtgctctcgcataatcgctaccacgtgccagttgtggttgtgcctgagggctctgcttccgacactcatgaacaggctatcttgcggttgcaagtcaccaatgttctgtctcagcctctgactcaggccactgttaaactagaacatgctaaatctgttgcttccagagccactgtcctccagaagacatc

SEQ ID NO: 176339 - DNA, 453 bp, Homo sapiens
  Payload ID: 14619
  Gene Symbol: RPN2
  Gene Name: ribophorin II
  ENST ID: ENST00000456400
  CDS Start-End: 1-442
tggcacctacactctctacttaatcattggagatgccactttgaagaacccaatcctctggaatgtggctgatgtggtcatcaagttccctgaggaagaagctccctcgactgtcttgtcccagaaccttttcactccaaaacaggaaattcagcacctgttccgcgagcctgagaagaggccccccaccgtggtgtccaatacattcactgccctgatcctctcgccgttgcttctgctcttcgctctgtggatccggattggtgccaatgtctccaacttcacttttgctcctagcacgattatatttcacctgggacatgctgaacagcacattagttccagaagaaagatggaaattctgaaaactgaatgtcaagaaaaggagtcaagaacaattcacagtatgagaagaaaaatggaaaaaaaaaactttatttaaaaaagaaaaaa

SEQ ID NO: 176340 - DNA, 520 bp, Homo sapiens
  Payload ID: 14619
  Gene Symbol: RPN2
  Gene Name: ribophorin II
  ENST ID: ENST00000437329
  CDS Start-End: 1-417
gaactggatacctctgaaagaaagattgaatttgactctgcctctggcacctacactctctacttaatcattggagatgccactttgaagaacccaatcctctggaatgtggctgatgtggtcatcaagttccctgaggaagaagctccctcgactgtcttgtcccagaaccttttcactccaaaacaggaaattcagtggatccggattggtgccaatgtctccaacttcacttttgctcctagcacgattatatttcacctgggacatgctgctatgctgggactcatgtatgtctactggactcagctcaacatgttccagaccttgaagtacctggccatcctgggcagtgtgacgtttctggctggcaatcggatgctggcccagcaggcagtcaagagaacagcacattagttccagaagaaagatggaaattctgaaaactgaatgtcaagaaaaggagtcaagaacaattcacagtatgagaagaaaaatggaaaaaaaaaactttatttaa

SEQ ID NO: 176341 - DNA, 712 bp, Homo sapiens
  Payload ID: 14619
  Gene Symbol: RPN2
  Gene Name: ribophorin II
  ENST ID: ENST00000462163
  CDS Start-End: 227-712
ggactccggcgggacctgctcggaggaatggcgccgccgggttcaagcactgtcttcctgttggccctgacaatcatagccagcacctgggctctgacgcccactcactacctcaccaagcatgacgtggagagactaaaagcctcgctggatcgccctttcacaaatttggaatctgccttctactccatcgtgggactcagcagccttggtgctcaggtgccagatgcaaagaaagcatgtacctacatcagatctaaccttgatcccagcaatgtggattccctcttctacgctgcccaggccagccaggccctctcaggatgtgagaacagtccaggctctgcagacagcatcccacctgtcccagcaggctgacctgaggagcatcgtggaggagattgaggaccttgttgctcgcctggatgaactcgggggcgtgtatctccagtttgaagaaggactggaaacaacagcgttatttgtggctgccacctacaagctcatggatcatgtggggactgagccatccattaaggaggatcaggtcatccagctgatgaacgcgatcttcagcaagaagaactttgagtccctctccgaagccttcagcgtggcctctgcagctgctgtgctctcgcataatcgctaccacgtgccagttgtggttgtgcctgagggctctgcttccgacactcatgaacaggctatc

SEQ ID NO: 176342 - DNA, 1848 bp, Homo sapiens
  Payload ID: 14620
  Gene Symbol: RPIA
  Gene Name: ribose 5-phosphate isomerase A
  Uniprot ID: P49247
  ENST ID: ENST00000283646
  CDS Start-End: 56-991
atttccgggggagccgggggcgggacttcagcggaggccggagcgaggcgtcgggatgcagcgccccgggcccttcagcaccctctacgggcgggtcttggccccgctgcccgggagggccgggggcgcggcctccggcggaggagggaacagctgggacctcccgggttcccacgtgcggctgccggggcgtgcacagtctgggacccgtggcggtgctggcaacacaagcaccagctgcggggactccaacagcatctgcccggccccctccacgatgtccaaggccgaggaggccaagaagctggcgggccgcgcggctgtggagaaccacgtgaggaataaccaagtgctgggaattggaagtggttctacaattgtccatgctgtgcagcgaatagctgaaagggtgaagcaagagaatctgaacctcgtctgtattcccacttccttccaggcccgccagctcatcctgcagtatggcttgaccctcagtgatctggatcgacacccagagatcgaccttgccatcgatggtgctgatgaagtagatgctgatctcaatctcatcaagggtggcggaggctgcctgacccaggagaagattgtggctggctatgctagtcgcttcatcgtgatcgctgatttcaggaaagattcgaagaatctcggggatcagtggcacaagggaatccccatcgaggtcatcccaatggcctatgtcccagtgagccgagctgtgagccagaagtttgggggcgtggttgaacttcgaatggctgtcaacaaggctggtcctgtggtgacagataatgggaattttatcttggactggaagtttgaccgggtacacaaatggagtgaagtgaatacagctatcaaaatgatcccaggtgtggtggacacaggcctattcatcaacatggctgagagagtctactttgggatgcaggatggctcagtgaacatgagggagaagcctttctgttgaccctgcaaggagcagagtgtgttcaccttgagtctccagcccacagccaaggtggacgtacctctccaggagcctttgccttaatgtatctctgcctggacaacttgtggtggggggtggggggaagagtgggagggggagttaaatccagtcttatgaagtattgttattaaatgtctttttaaaaagagaaatataaacatatatttttactattaaaatattcagttttttaaatgaagtagaacttgagttcatgttttatatgaaatatttaccaaaaaaaaaaaatgaggtaaactgtatttaaaacctttgacttgagtctgctggtaaagcttctgaatattgagtttgctgagaaataaaaatcaaaacttctttaagctggtaaagtgaggggcccaccagcagtgatctcctgatgccttactggaaactttgtttacttgtctgctaccctctgatttgtttttagttagtttttattgtgagcacacatagtacctagttacatcttaagatcaggtttataaaactgtggagtggagcggtatggtatggaatgacttggaatgtaagctgtcagggagaaaatgttgttacacttttgctaagatctgggggtttcttcatattcctgctgttggaagcagttgaccagaaatgcttgccagtactgccaaagcactgctgtgaaatgtgaagtactttgtttttttatttttaatgattttctttttgttattaatatttttctctgttcctttgttattacttgcatggtttggcgtcagaagtccttacctctttatattgtttgcaggtttaaataaaacagtgtggtgccattttga

SEQ ID NO: 176343 - DNA, 1323 bp, Homo sapiens
  Payload ID: 14621
  Gene Symbol: RSL1D1
  Gene Name: ribosomal L1 domain containing 1
  ENST ID: ENST00000355674
  CDS Start-End: 33-1323
gcacacgcgcctcttcacgaggtggaaacaagatggaggattcggcctcggcctcgctgtcttctgcagccgctactggaacctccacctcgactccagcggccccgacagcacggaagcagctggataaagaacaggttagaaaggcagtggacgctctcttgacgcattgcaagtccaggaaaaacaattatgggttgcttttgaatgagaatgaaagtttatttttaatggtggtattatggaaaattccaagtaaagaactgagggtcagattgaccttgcctcatagtattcgatcagattcagaagatatctgtttatttacgaaggatgaacccaattcaactcctgaaaagacagaacagttttatagaaagcttttaaacaagcatggaattaaaaccgtttctcagattatctccctccaaactctaaagaaggaatataaatcctatgaagccaagctccgccttctgagcagttttgatttcttccttactgatgccagaattaggcggctcttaccctcactcattgggagacatttctatcaaagaaagaaagttccagtatctgtaaaccttctgtccaagaatttatcaagagagatcaatgactgtataggtggaacagtcttaaacatttctaaaagtggttcttgcagtgctatacgtattggtcacgttggaatgcaaattgagcacatcattgaaaacattgttgctgtcaccaaaggactttcagaaaaattgccagagtgggagagcgtgaaactcctgtttgtgaaaactgagaaatcggctgcacttcccatcttttcctcgtttgtcagcaattgggatgaagccaccaaaagatctttgcttaataagaagaaaaaagaggcaaggagaaaacgaagagaaagaaattttgaaaaacaaaaggagaggaagaagaagaggcagcaggctaggaagactgcatcagttcttagtaaagatgatgtggcacctgaaagtggtgatactacagtgaagaaacctgaatcaaagaaggaacagaccccagagcatgggaagaaaaaacgtggcagaggaaaagcccaagttaaagcaacaaatgaatccgaagacgaaatcccacagctggtaccaataggaaagaagactccagctaatgaaaaagtagagattcaaaaacatgccacaggaaagaagtctccagcaaagagtcctaatcccagcacacctcgtgggaagaaaagaaaggctttgccagcatctgagaccccaaaagctgcagagtctgagaccccagggaaaagcccagagaagaagc

SEQ ID NO: 176344 - DNA, 1470 bp, Homo sapiens
  Payload ID: 14621
  Gene Symbol: RSL1D1
  Gene Name: ribosomal L1 domain containing 1
  ENST ID: ENST00000396503
  CDS Start-End: 69-188
gctcgcgcgtgcgcaccagaagccagcagtggggttgcacacgcgcctcttcacgaggtggaaacaagatggaggattcggcctcggcctcgctgtcttctgcagccgctactggaacctccacctcgactccagcggccccgacagcacggaagcagctggataaagaacaggaccttgcctcatagtattcgatcagattcagaagatatctgtttatttacgaaggatgaacccaattcaactcctgaaaagacagaacagttttatagaaagcttttaaacaagcatggaattaaaaccgtttctcagattatctccctccaaactctaaagaaggaatataaatcctatgaagccaagctccgccttctgagcagttttgatttcttccttactgatgccagaattaggcggctcttaccctcactcattgggagacatttctatcaaagaaagaaagttccagtatctgtaaaccttctgtccaagaatttatcaagagagatcaatgactgtataggtggaacagtcttaaacatttctaaaagtggttcttgcagtgctatacgtattggtcacgttggaatgcaaattgagcacatcattgaaaacattgttgctgtcaccaaaggactttcagaaaaattgccagagaagtgggagagcgtgaaactcctgtttgtgaaaactgagaaatcggctgcacttcccatcttttcctcgtttgtcagcaattgggatgaagccaccaaaagatctttgcttaataagaagaaaaaagaggcaaggagaaaacgaagagaaagaaattttgaaaaacaaaaggagaggaagaagaagaggcagcaggctaggaagactgcatcagttcttagtaaagatgatgtggcacctgaaagtggtgatactacagtgaagaaacctgaatcaaagaaggaacagaccccagagcatgggaagaaaaaacgtggcagaggaaaagcccaagttaaagcaacaaatgaatccgaagacgaaatcccacagctggtaccaataggaaagaagactccagctaatgaaaaagtagagattcaaaaacatgccacaggaaagaagtctccagcaaagagtcctaatcccagcacacctcgtgggaagaaaagaaaggctttgccagcatctgagaccccaaaagctgcagagtctgagaccccagggaaaagcccagagaagaagccaaaaatcaaagaagaggcagtgaaggaaaaaagtccttcgctggggaaaaaagatgcgagacagactccaaaaaagccagaggccaagtttttcaccactcctagtaaatctgtgagaaaagcttcccacacccccaaaaaatggcccaaaaaacccaaagtaccccagtcgacctaaagtcagtgattcaactggaaggaaacctcaatgctgcctccagagctttttggaaatactcagatcctg

SEQ ID NO: 176345 - DNA, 759 bp, Homo sapiens
  Payload ID: 14621
  Gene Symbol: RSL1D1
  Gene Name: ribosomal L1 domain containing 1
  ENST ID: ENST00000572090
  CDS Start-End: 1-281
aggattcggcctcggcctcgctgtcttctgcagccgctactggaacctccacctcgactccagcggccccgacagcacggaagcagctggataaagaacaggttagaaaggcagtggacgctctcttgacgcattgcaagtccaggaaaaacaattatgggttgcttttgaatgagaatgaaagtttatttttaatggtggtattatggaaaattccaagtaaagaactgagggtcagattagacgagatcttgcgctgttgcccagctggagtacaatagtgagatctgtgttcactgcaacctcaacctccctgacctgactcaagtgatcctcccacctcagccttccaagtagctgggactacaggaccttgcctcatagtattcgatcagattcagaagatatctgtttatttacgaaggatgaacccaattcaactcctgaaaagacagaacagttttatagaaagcttttaaacaagcatggaattaaaaccgtttctcagattatctccctccaaactctaaagaaggaatataaatcctatgaagccaagctccgccttctgagcagttttgatttcttccttactgatgccagaattaggcggctcttaccctcactcattgggagacatttctatcaaagaaagaaagttccagtatctgtaaaccttctgtccaagaatttatcaagagagatcaatgactgtataggtggaacagtcttaaacatttctaaaagtggttcttgcag

SEQ ID NO: 176346 - DNA, 710 bp, Homo sapiens
  Payload ID: 14621
  Gene Symbol: RSL1D1
  Gene Name: ribosomal L1 domain containing 1
  ENST ID: ENST00000573618
  CDS Start-End: 7-150
aacaagatggaggattcggcctcggcctcgctgtcttctgcagccgctactggaacctccacctcgactccagcggccccgacagcacggaagcagctggataaagaacaggactttcagaaaaattgccagagaagtgggagagcgtgaaactcctgtttgtgaaaactgagaaatcggctgcacttcccatcttttcctcgtttgtcagcaattgggatgaagccaccaaaagatctttgcttaataagaagaaaaaagaggcaaggagaaaacgaagagaaagaaattttgaaaaacaaaaggagaggaagaagaagaggcagcaggctaggaagactgcatcagttcttagtaaagatgatgtggcacctgaaagtggtgatactacagtgaagaaacctgaatcaaagaaggaacagaccccagagcatgggaagaaaaaacgtggcagaggaaaagcccaagttaaagcaacaaatgaatccgaagacgaaatcccacagctggtaccaataggaaagaagactccagctaatgaaaaagtagagattcaaaaacatgccacaggaaagaagtctccagcaaagagtcctaatcccagcacacctcgtgggaagaaaagaaaggctttgccagcatctgagaccccaaaagctgcagagtctgagaccccagggaaaagcccagagaagaagccaaaaatcaaa

SEQ ID NO: 176347 - DNA, 520 bp, Homo sapiens
  Payload ID: 14621
  Gene Symbol: RSL1D1
  Gene Name: ribosomal L1 domain containing 1
  ENST ID: ENST00000573791
  CDS Start-End: 225-520
tttccctggtcctgcggcctggcgctagtgaattgggttgcaagtgtgctgtggagctagatgagatagacctggcgacctggcttagcttccctatcattagcgcttgaccgaatcgcttagttttgcaggttagaaaggcagtggacgctctcttgacgcattgcaagtccaggaaaaacaattatgggttgcttttgaatgagaatgaaagtttatttttaatggtggtattatggaaaattccaagtaaagaactgagggtcagattgaccttgcctcatagtattcgatcagattcagaagatatctgtttatttacgaaggatgaacccaattcaactcctgaaaagacagaacagttttatagaaagcttttaaacaagcatggaattaaaaccgtttctcagattatctccctccaaactctaaagaaggaatataaatcctatgaagccaagctccgccttctgagcagttttgatttcttccttactgatgccagaattaggcggctctt

SEQ ID NO: 176348 - DNA, 871 bp, Homo sapiens
  Payload ID: 14621
  Gene Symbol: RSL1D1
  Gene Name: ribosomal L1 domain containing 1
  ENST ID: ENST00000570767
  CDS Start-End: 31-162
acacgcgcctcttcacgaggtggaaacaagatggaggattcggcctcggcctcgctgtcttctgcagccgctactggaacctccacctcgactccagcggccccgacagcacggaagcagctggataaagaacaggtgaaaaggcagtggacgctctcttgacgcattgcaagtccaggaaaaacaattatgggttgcttttgaatgagaatgaaagtttatttttaatggtggtattatggaaaattccaagtaaagaactgagggtcagattgaccttgcctcatagtattcgatcagattcagaagatatctgtttatttacgaaggatgaacccaattcaactcctgaaaagacagaacagttttatagaaagcttttaaacaagcatggaattaaaaccgtttctcagattatctccctccaaactctaaagaaggaatataaatcctatgaagccaagctccgccttctgagcagttttgatttcttccttactgatgccagaattaggcggctcttaccctcactcattgggagacatttctatcaaagaaagaaagttccagtatctgtaaaccttctgtccaagaatttatcaagagagatcaatgactgtataggtggaacagtcttaaacatttctaaaagtggttcttgcagtgctatacgtattggtcacgttggaatgcaaattgagcacatcattgaaaacattgttgctgtcaccaaaggactttcagaaaaattgccagagaagtgggagagcgtgaaactcctgtttgtgaaaactgagaaatcggctgcacttcccatcttttcctcgtttgtcagcaattgggatgaagccaccaaaagatctttgcttaa

SEQ ID NO: 176349 - DNA, 509 bp, Homo sapiens
  Payload ID: 14621
  Gene Symbol: RSL1D1
  Gene Name: ribosomal L1 domain containing 1
  ENST ID: ENST00000571988
  CDS Start-End: 36-509
agaggtaatgagtgtaaagcgctttggcctggtacatggttagaaaggcagtggacgctctcttgacgcattgcaagtccaggaaaaacaattatgggttgcttttgaatgagaatgaaagtttatttttaatggtggtattatggaaaattccaagtaaagaactgagggtcagattgaccttgcctcatagtattcgatcagattcagaagatatctgtttatttacgaaggatgaacccaattcaactcctgaaaagacagaacagttttatagaaagcttttaaacaagcatggaattaaaaccgtttctcagattatctccctccaaactctaaagaaggaatataaatcctatgaagccaagctccgccttctgagcagttttgatttcttccttactgatgccagaattaggcggctcttaccctcactcattgggagacatttctatcaaagaaagaaagttccagtatctgtaaaccttctgtccaagaatttatcaaga

SEQ ID NO: 176350 - DNA, 894 bp, Homo sapiens
  Payload ID: 14621
  Gene Symbol: RSL1D1
  Gene Name: ribosomal L1 domain containing 1
  ENST ID: ENST00000573251
  CDS Start-End: 5-894
caagatggaggattcggcctcggcctcgctgtcttctgcagccgctactggaacctccacctcgactccagcggccccgacagcacggaagcagctggataaagaacaggttagaaaggcagtggacgctctcttgacgcattgcaagtccaggaaaaacaattatgggttgcttttgaatgagaatgaaagtttatttttaatggtggtattatggaaaattccaagtaaagaactgagggtcagattgaccttgcctcatagtattcgatcagattcagaagatatctgtttatttacgaaggatgaacccaattcaactcctgaaaagacagaacagttttatagaaagcttttaaacaagcatggaattaaaaccgtttctcagattatctccctccaaactctaaagaaggaatataaatcctatgaagccaagctccgccttctgagcagttttgatttcttccttactgatgccagaattaggcggctcttaccctcactcattgggagacatttctatcaaagaaagaatgctatacgtattggtcacgttggaatgcaaattgagcacatcattgaaaacattgttgctgtcaccaaaggactttcagaaaaattgccagagaagtgggagagcgtgaaactcctgtttgtgaaaactgagaaatcggctgcacttcccatcttttcctcgtttgtcagcaattgggatgaagccaccaaaagatctttgcttaataagaagaaaaaagaggcaaggagaaaacgaagagaaagaaattttgaaaaacaaaaggagaggaagaagaagaggcagcaggctaggaagactgcatcagttcttagtaaagatgatgtggcacctgaaagtggtgatactacagtgaa

SEQ ID NO: 176351 - DNA, 5483 bp, Homo sapiens
  Payload ID: 14621
  Gene Symbol: RSL1D1
  Gene Name: ribosomal L1 domain containing 1
  Uniprot ID: O76021
  ENST ID: ENST00000571133
  CDS Start-End: 74-1546
ggcttgctcgcgcgtgcgcaccagaagccagcagtggggttgcacacgcgcctcttcacgaggtggaaacaagatggaggattcggcctcggcctcgctgtcttctgcagccgctactggaacctccacctcgactccagcggccccgacagcacggaagcagctggataaagaacaggttagaaaggcagtggacgctctcttgacgcattgcaagtccaggaaaaacaattatgggttgcttttgaatgagaatgaaagtttatttttaatggtggtattatggaaaattccaagtaaagaactgagggtcagattgaccttgcctcatagtattcgatcagattcagaagatatctgtttatttacgaaggatgaacccaattcaactcctgaaaagacagaacagttttatagaaagcttttaaacaagcatggaattaaaaccgtttctcagattatctccctccaaactctaaagaaggaatataaatcctatgaagccaagctccgccttctgagcagttttgatttcttccttactgatgccagaattaggcggctcttaccctcactcattgggagacatttctatcaaagaaagaaagttccagtatctgtaaaccttctgtccaagaatttatcaagagagatcaatgactgtataggtggaacagtcttaaacatttctaaaagtggttcttgcagtgctatacgtattggtcacgttggaatgcaaattgagcacatcattgaaaacattgttgctgtcaccaaaggactttcagaaaaattgccagagaagtgggagagcgtgaaactcctgtttgtgaaaactgagaaatcggctgcacttcccatcttttcctcgtttgtcagcaattgggatgaagccaccaaaagatctttgcttaataagaagaaaaaagaggcaaggagaaaacgaagagaaagaaattttgaaaaacaaaaggagaggaagaagaagaggcagcaggctaggaagactgcatcagttcttagtaaagatgatgtggcacctgaaagtggtgatactacagtgaagaaacctgaatcaaagaaggaacagaccccagagcatgggaagaaaaaacgtggcagaggaaaagcccaagttaaagcaacaaatgaatccgaagacgaaatcccacagctggtaccaataggaaagaagactccagctaatgaaaaagtagagattcaaaaacatgccacaggaaagaagtctccagcaaagagtcctaatcccagcacacctcgtgggaagaaaagaaaggctttgccagcatctgagaccccaaaagctgcagagtctgagaccccagggaaaagcccagagaagaagccaaaaatcaaagaagaggcagtgaaggaaaaaagtccttcgctggggaaaaaagatgcgagacagactccaaaaaagccagaggccaagtttttcaccactcctagtaaatctgtgagaaaagcttcccacacccccaaaaaatggcccaaaaaacccaaagtaccccagtcgacctaaagtcagtgattcaactggaaggaaacctcaatgctgcctccagagctttttggaaatactcagatcctggccgcctttgtaaccttctctaaacgtcaggcctggacttaaaagattttttaaaacctccataagtagtccaggggcggtggctcacgcctgtaatcccagcactttgggaggccgaggcaggcggatcacaaggtcaacgagatcgagaccatcctggccaacatggtgaaaccctgtctgtaccaaaaatacaaaaattaattgggcatggtggtggacacctgtaatcccagctactagggaggctgaggcaggagaattgcttgaacctgggaggcggaggttgcagtgagccactgcactccagcctgatgacagagcaagactcagtctcaaaaataaataaaaataataaaacctccataagtaatcctgacatatgttcctgggtataatctgtttctaaattgtccttctgtgtatttgctaatgtaatagagggaaaaatagagtgcttctctgtggttgttcagcactttaggtagccaaggtgagaggattgcttgaggccaggagtttgagactagcctgggcaacttggtaaaaccccatctctacaaaagaaaaaaaaaaattagtgtggcatggtggcatgcatctgtgctcccagctcctcacgaggctgaggtggaaggatcaagtgagcgcaagaggttgaggctccagtgagccacgatcaccccactgtgctgtagcctgggtgacagtgtgagattctgtctcagaaaaaacaaagtataacattgctttgcttctgagtatactgttggctttccaaatcagtgggtctgacttgaggtctgtgatgtgacccttttcctcacctgctcaaccattattcacatggactccatcatattcatttgtagtcattcccagagtggcccagtgagggtctcgctgtatgagagtcggctacggaatttaggagaaacagaagtttcttggctttcatgctgagcttgttggtctaagcttatgagtcactggattagcatccatatgggaagggaaattaacatggagtcatttatacagggactaaattgaatcctacctaccggaggcaagaacatgatttatcttccataagccttatcctcttcctccttattcctcagtccatatggatttgcttatgtatgacaactccaaggaatcttggaagagtagattgctaacgtttccacaattgtcaagtatattctgaggcagtaaacacctttttaggtacgtggcctttcactggttgtgaattggtatgcatccgtagtagtaagttcacagattcactgcagtgcaggaatgttcttgcatgccaaagactcaactgctttcaaagataatgtgggtgctagatgcagtggcttacatctgtaaccctgttagggtgaccagacccaacaccaggtcgtgggggtgacaaagtccagtggagtcaaaggattgagaaaaagacagtttgagagagaagtaggaccagcagaccatcgggatggtggaggctgtgaaggccgtgagctctgggagcccacactatttattggtaatccaacaaagaaacagatggtgagaatgtgaaggtcagaagggcaccttgcattaagcacatgatttacagctgtgatggtttagcatttgctctgctacttgagatgatggagagcaggttcttttaactcaagttacagtcgatcctgggagagcaaggagccagcaagtctagacattccagagccacaggccctggattttatccaagccacgagggattttatgccctgggcttagattatggtgcgtcagggcagccttccaccctttagcacagagcttggtgttccaaagaccacaaggggttttagacccttgaccctggacatattccaagactcttttacattatgtcagaatgcaagccctgcctcagcttctcccaacactcagcttttcgcaacataatcccagcactttggaacgctgggtggattgcttgaacccaggagttcgagaccatcctgggcaatatggcaaaaccccatctttaccaaaaataagctgggtgtggtggaacatgcctgtggtcccagcttcttgggaggctgaggtgggaggattgcttgaacccgggaggtagaggctgcaatgggccatgatcacgatcctgcactccagcctgggcaacagagagagacagtccctggcccactgcccccttccctggcccagtctcaaaaaaaatgaggctgggcgtggtggctcacatctgtaatcccagccaaggctggcagatcacttgaggccaggagttctgagaccagcctggcttacatggtgaaaccccatctctactaaaaatacaaaaactagccaggcatggtgggaggcacctgtaatcccagctacttgggaggctgaagcaggagaatcactttaacccgggaggtggaggttgcagtgagctgagatcacaccactgcactccagcctgggcggcagagcaaaactgaaaaaaagagaaaaaaaaaaacatctagctctccctgaaattagaggagtctagcctgcttttgctgtttttttggtagcgagagtagcgggcagtgggggagatggtcttactctgttccccaggctggagtgcactagtgtcatcacagctccagcctcaatttcctgggctcaaggcgatcttcccacctcagcctcccaagtagctcagactacaggggcatgccatcacagctggccagtttttacgtcttgcgtagagatgggttttccctgtgttccctaggctgggctcgaactcctgggctcaagtcctcctgcctcagcctcccaaaatgttcagattacaggcatgaggcagcatgccaatcctgtttttgcattttagtaacacaaattgtaatgttaactttttaaattatgaaagcatctaaaatataaaattatttgtaaccccactgtccttttgggcttctataaatgaatatacatctaaaatgtgggggtttagcttaattgattgttttccatagaaactaggttttatgggaagatggttggatagacttgtttcacttaaaggtctggtttgtgtaggacaaacccacatatgtaatcgtgccagtctgttctctgcatgacataattttccagcaatagctgtgtggtttttgtaatcctatcatctagtcagttcaagatcttgcaacactgtgtgattctttgctccgtagttcagtcttgttgaacatgacacaggtgtttactttcctgttcttgcatctagtttcattctaataatgttctctgttgaaaaagctggcttcaatttattgagcaagatgctggtgttatcatctaacataaaacctatcttataataaagtgttgacacatgtaatgagtactgtactgaaaaatggtggtatgtatatggtttgtactgattatgtatcgcttttataccatcaaaaagttgaaaaatcataaagttgaatcatcctaaaatgggtacattctgtactatgtttccaaggcttcagaagtgttgcatacacattcctagccagctgatagtgctaggagccaacagtagtctcccccgggggccaagaggagggcgaaatctctactatggtatatgatgttctcgtgggccaagtatgagggtgatatttcattgttggcactgggtttctggaatccatcctcttcaccagggagatttaatgaaccaaatgagatctgatgggagaaatttgagtgtaacgtttttgttctgaaggaagtaattgagttttagttcatttgttttttaggaatcgtaataattaaaatttcattttaaatgcca

SEQ ID NO: 176352 - DNA, 766 bp, Homo sapiens
  Payload ID: 14621
  Gene Symbol: RSL1D1
  Gene Name: ribosomal L1 domain containing 1
  ENST ID: ENST00000573029
  CDS Start-End: 7-147
aacaagatggaggattcggcctcggcctcgctgtcttctgcagccgctactggaacctccacctcgactccagcggccccgacagcacggaagcagctggataaagaacagtgctatacgtattggtcacgttggaatgcaaattgagcacatcattgaaaacattgttgctgtcaccaaaggactttcagaaaaattgccagagaagtgggagagcgtgaaactcctgtttgtgaaaactgagaaatcggctgcacttcccatcttttcctcgtttgtcagcaattgggatgaagccaccaaaagatctttgcttaataagaagaaaaaagaggcaaggagaaaacgaagagaaagaaattttgaaaaacaaaaggagaggaagaagaagaggcagcaggctaggaagactgcatcagttcttagtaaagatgatgtggcacctgaaagtggtgatactacagtgaagaaacctgaatcaaagaaggaacagaccccagagcatgggaagaaaaaacgtggcagaggaaaagcccaagttaaagcaacaaatgaatccgaagacgaaatcccacagctggtaccaataggaaagaagactccagctaatgaaaaagtagagattcaaaaacatgccacaggaaagaagtctccagcaaagagtcctaatcccagcacacctcgtgggaagaaaagaaaggctttgccagcatctgagaccccaaaagctgcagagtctgagaccccagggaaaagcccagagaag

SEQ ID NO: 176353 - DNA, 2015 bp, Homo sapiens
  Payload ID: 14622
  Gene Symbol: RSL24D1
  Gene Name: ribosomal L24 domain containing 1
  Uniprot ID: Q9UHA3
  ENST ID: ENST00000260443
  CDS Start-End: 178-669
cacacggccgccggaggcacagtcgtgttcgcatctggtctaacagacccgcgagaacgaaggacgcttgcctttttccggtcggggaagggggaagaaggtaacttccggtgacggggttgcatcacttcctctcaagcttggcgtttgtttggtggggttacacgcgggttcaacatgcgtatcgaaaagtgttatttctgttcggggcccatctatcctggacacggcatgatgttcgtccgcaacgattgcaaggtgttcagattttgcaaatctaaatgtcataaaaactttaaaaagaagcgcaatcctcgcaaagttaggtggaccaaagcattccggaaagcagctggtaaagagcttacagtggataattcatttgaatttgaaaaacgtagaaatgaacctatcaaataccagcgagagctatggaataaaactattgatgcgatgaagagagttgaagaaatcaaacagaagcgccaagctaaatttataatgaacagattgaagaaaaataaagagctacagaaagttcaggatatcaaagaagtcaagcaaaacatccatcttatccgagcccctcttgcaggcaaagggaaacagttggaagagaaaatggtacagcagttacaagaggatgtggacatggaagatgctccttaaaaatctctgtaaccatttcttttatgtacatttgaaaatgccctttggatacttggaactgctaaattattttattttttacataaggtcacttaaatgaaaagcgattaaaagacatctttcctgcattgccatctacataatatcagatattacggatgttagattgcatctcagtgttaaatctttactgatagatgtacttaagtaaatcatgaaaattctacttgtaactatagaagtgaattgtggacgtaaaatggttgtgctatttggataatggcactaggcagcatttgtatagtaactaatggcaaaaattcatggctagtgatgtataaaataaaatattctttgcagtaaaatattccctttgttaatgttatagaaggggggatacaaaaaggaactaacaatttgtatggcagtgtcagatatttttattttagtatttcctgttttggtttatttgcatcttagaagagcataatgacattgtttgatgaagcctaattatgctggactgttttgacctggtttaacccttctgataggtagttgtggatgctggggatgagaactgaataatctttgcctggagtgacactacactctagaatttccactttggagaatactcagttccaacttgtgattcctgatagaacagactttacttttctagcccagcattgatctagaagcagaggaatcccagcgccttttaaaagttgttatgtggttttcttttaaaaagctcctgtttttggaaagtagaatttatgggtacaacgtatgttcattatttgtacataaaataaaaccatttaaaaagtaatgctgatatttattctttaaaggcactaaacaaagatatgaaatattgatgacctggaagaagaaatcttcctccacacatcccatttaagtaggagatacatttaattaaagagaaatagatacttaatacttaatgttttgtgtttttacattgtttacagttttaagtatgttaaatacattaagtaacgatcagtttgcataatggtttttttagggtagagtttaaaatcagtaattcttagccttacataattataaagtaatggctcattttttgtttcagtattagatagtaaaactaaggctgtagaccagtccctggaccaagtgttaggagacctgagttccaatgtggttttgcctgggtattcttatttgtaaataatattattgattgaagattaggggaaatgatacatgtgaggaaagacatttgtaaaatttcttgggtttttactacataccgtattcattttttaaagaaataaacattttgaaagtta

SEQ ID NO: 176354 - DNA, 442 bp, Homo sapiens
  Payload ID: 14622
  Gene Symbol: RSL24D1
  Gene Name: ribosomal L24 domain containing 1
  ENST ID: ENST00000569386
  CDS Start-End: 244-442
gtcttccgagcggcgctggccaccacgccacccttgggtggcgttggcagcgaggaacttcaggagcgatcccagctagcgcctaccaggaatcttggatgtctgtgagggctgtttggccactcatgtacttgggccaaattcttgaatccagtaaactttgttgagtgtataccctgtcaggcattacactaaggtccatactaaagtgtagaggttgatggaagtgttccgtattgcttaatggtagagttatgtattaagttactgcaggtgttcagattttgcaaatctaaatgtcataaaaactttaaaaagaagcgcaatcctcgcaaagttaggtggaccaaagcattccggaaagcagctggtaaagagcttacagtggataattcatttgaatttgaaaaacgtagaaatgaacctatcaaataccagcgag

SEQ ID NO: 176355 - DNA, 940 bp, Homo sapiens
  Payload ID: 14622
  Gene Symbol: RSL24D1
  Gene Name: ribosomal L24 domain containing 1
  ENST ID: ENST00000562993
  CDS Start-End: 25-276
ggtggggttacacgcgggttcaacatgcgtatcgaaaagtgttatttctgttcggggcccatctatcctggacacggcatgatgttcgtccgcaacgattgcaaggtgttcagattttgcaaatctaaatgtcataaaaactttaaaaagaagcgcaatcctcgcaaagttaggtggaccaaagcattccggaaagcagctggtaaagagcttacagtggtgagtacggttagctatcaatatagtttttacacgtttcacagttttagtatttgaagggtatatgtcatctaatcaatcataacaaggcctcctataacatgattaataagtaccttatttgtatttggctgtggaaataatctcattctcacatgatccttaaaactgtaattctgtggagctactatttttagctcttgcagaccaagaggaaaatcacttaaatggcttgggatgaagttgggaattgctactgaaagattttgagatgaagttaagagataaaggatttctgaacagcagtcaaggctcaggataattcatttgaatttgaaaaacgtagaaatgaacctatcaaataccagcgagagctatggaataaaactattgatgcgatgaagagagttgaagaaatcaaacagaagcgccaagctaaatttataatgaacagattgaagaaaaataaagagctacagaaagttcaggatatcaaagaagtcaagcaaaacatccatcttatccgagcccctcttgcaggcaaagggaaacagttggaagagaaaatggtacagcagttacaagaggatgtggacatggaagatgctccttaaaaatctctgtaaccatttcttttatgtacatttgaaaatgccctttggatacttggaactgctaaattattttattttttacataaggtcacttaaatgaaaagcga

SEQ ID NO: 176356 - DNA, 864 bp, Homo sapiens
  Payload ID: 14623
  Gene Symbol: RIMKLA
  Gene Name: ribosomal modification protein rimK-like family member A
  ENST ID: ENST00000410070
  CDS Start-End: 574-864
gagacgcctggcgcacccgcgggagcggagccgtggcgcgctcgccccggacgccggccgcccctccgctcgccctactgagcgagcggcccggggcgccgaggggtccgcgccgcgcggggcgcaccgccctggccgccatgtgctcccagctctggttcctgacggaccggcgcatccgcgaggactacccgcaggtgcagatcctgcgcgccctccggcagcgctgctccgagcaggacgtgcgcttccgggcggtgcttatggaccagatcgccgtcaccatcgtcggcggccacctcggcttcagttggaatgagccaggcccaaagatttacctttggagaagagagatgaagtcctggcctccagctaaaccagaaggccctcaccactttcccggatgtggtgcttgtacgggtacccacaccctcagtgcagtcagacagtgacatcactgtcctgcgacacctggagaagctgggctgccggttggtcaatcgcccacagagcatcttaaattgcatcaacaaattctggacgttccaagaactggctggacatggggtccccatgccagacaccttctcctatggtgggcatgaagacttttcaaaaatgattgatgaagctgagcccctgggctacccagtcgtggtgaagagcacacgaggccaccggggaaaagctgtttttctggcaagagataaacatcacctctctgacatctgccatctgatccgccacgatgtgccctacctgttccagaagtacgtgaaggagtcccatggaaaggacatccgggtggtggtggtagggggccaggtcataggctctatgcttcgctgctccactgatggacgg

SEQ ID NO: 176357 - DNA, 8909 bp, Homo sapiens
  Payload ID: 14623
  Gene Symbol: RIMKLA
  Gene Name: ribosomal modification protein rimK-like family member A
  Uniprot ID: Q8IXN7
  ENST ID: ENST00000431473
  CDS Start-End: 130-1305
cgcacccgcgggagcggagccgtggcgcgctcgccccggacgccggccgcccctccgctcgccctactgagcgagcggcccggggcgccgaggggtccgcgccgcgcggggcgcaccgccctggccgccatgtgctcccagctctggttcctgacggaccggcgcatccgcgaggactacccgcaggtgcagatcctgcgcgccctccggcagcgctgctccgagcaggacgtgcgcttccgggcggtgcttatggaccagatcgccgtcaccatcgtcggcggccacctcggcctccagctaaaccagaaggccctcaccactttcccggatgtggtgcttgtacgggtacccacaccctcagtgcagtcagacagtgacatcactgtcctgcgacacctggagaagctgggctgccggttggtcaatcgcccacagagcatcttaaattgcatcaacaaattctggacgttccaagaactggctggacatggggtccccatgccagacaccttctcctatggtgggcatgaagacttttcaaaaatgattgatgaagctgagcccctgggctacccagtcgtggtgaagagcacacgaggccaccggggaaaagctgtttttctggcaagagataaacatcacctctctgacatctgccatctgatccgccacgatgtgccctacctgttccagaagtacgtgaaggagtcccatggaaaggacatccgggtggtggtggtagggggccaggtcataggctctatgcttcgctgctccactgatggacggatgcagagcaactgctctctcggtggcgtgggcgtcaagtgtccgctgacagaacaaggcaagcagttggctattcaggtgtccaacatcctaggcatggacttctgtggcattgatctccttatcatggacgatggctcctttgtggtgtgtgaggcaaatgctaatgttggcttcctagcctttgaccaggcatgcaacttagatgtgggtgggatcattgcagactataccatgtccttgctgccaaataggcagactggaaagatggctgtcctcccaggactgtcgagtccaagggagaagaacgagccggatggctgtgcttcagctcagggagttgcagagagcgtctataccatcaacagtgggtctacctctagtgaaagtgagcctgaactgggagagatccgggattcctcagcaagcacaatgggggccccaccctccatgctgcccgaacctggctacaacattaacaacaggattgcttctgagttaaaacttaagtgaattcctgctttttggcagcatttaaaccaaatcctactgcttccctagtagttttgagtgaataaaatctggactaatgtgatttcatttgcacagaaactagaaatcccatctgggcactcagcattttttctaacgatgatttaagcaaatggcctagctttgtggtttttacaaagacaaatataaaaacactcaagaacaacgtcccgactgatcagtatgagactgatgtctgctgtgagcacgtggatattacggctgacgctaaggcactgactctgctgttgcttctgacttttagcagtagaacccattagctcaaaatggctcttggaattatgtactcaaaagcaaccacgggatggaagcatgtgcagacgaggtggaatgtgactgcagtaataggttcttcactaagtgtgtgtgtgatgcttggaaaagacacagttcaaacactattagaggatcgatctctgctccccatcaatcaccatcttgaccatatttctccgacactcaggatatggtgttttagggagcttcctcattagcattttcagtgaagcactttgtagaaagtgagattgaacgttctttgacttcacaggttggcaaatgtcctgctttgtaactgggcctttctacaaattgctttgccactctgaatttatagaccctgcttcaactaacgtcagctctagcagcttcttgcacctttgctgcctttggcctcagctggaaatgcacttcaatgagctagtggccactcagtttatttcttaagcgtgcactagaatctaacaccatggactttgtttttcaatggactctgttcacttgtcatccagaagccagtgggtttttaccatagaaagctacttggagatcatcattcttcccctcctctactgaaactttgtgtactgcttagctgtagggggttttcttgtatgagtgggtgttggaggtctattgagtagatgggagccattggaaacactccaatccccttgaaactctacttttatctaagatccagacacctgtccttacccacttttccaaacggggaagactcaggtatcaggaattacccattgcacattttgcgggggggggggctaatgtagacatgacaccaagtgcttttcattttaattctctaagcagtagatgagatctttcccttgggagaaatcacagagatggagttttccatttctgcttatacgaaatatgactgaaaatgaacaaagccacctttttaaccaaatacactagaacatatgcactcaagagttagcataattggagttattttcttgatgttgcatgtgccaagaacacttagggttcccctttgggattacctttgaagccatgcaaggcaagaggcctcacaactttatagtcagaccttgtgttttatccaacccctcctcctgcccaccaagatcatcctgagctgcttcacccattttatttagcagacttattttctaatgctctttagctgttaaaaaaaaaaaatcattcctcaaaaaatagatctacccttaaaggacaaagatttaccaacactgaagacccttacaagttgacagtttctaaagagggttctaggaatgttctgtgtaaggtcagcttcactggaataaacatacatcttcccaaggtgactacttcaaaggcaacactacccattcgggtgcagaaattaccgtacttactctgccataaatgtaaaatgtgtataaagttaagctattgcattttttcataacacatttaaatagaaattggcttttaaagtattgtagttaaaaccagatctcaccaagtaatagttgtgcaattgacaaatgtttggtgccatgtaatggagatgtcacactacacagttgtagtttaaatgcagtccaacataaggtgcatgccactgaactgtaaccctagtaatgtgtcttgtacagttgaaaaataatacttcacctttatataggttaagatatgtaccttatctttaccactcagggtggctttaaaagacggacagctttaggtttgttctcactggaactggttacactttctgtgcaaacttaaccaagtgatgatcgtctggaagctgcattccctcatttccactgtttggtgtgaatctagtctccccactttatctaaaaggaggctagcagggccccagcctgagcagagcagctagagagtgcttccagattcctttgccaaaggaggcccattttccagctgtgagtgacatctgtagtcattggcttcattgcctggcactagccctgtctagaagtggagaaagctggatcacagctggaccacaaccagccccaatccaggatttcccataccatgctggctgtgggctctgtgagcctcagccaggtggccaggctatacttgtcacagctggccacaggcctgctgaaggaacatggggtgtagagccagagcctggttctggttctccgcttgaacagctgacctcgtgcaatcacaggaactctgcgtctccatgtttcactcagatagagaaaatgcctcctttgtttacctctttgaagctgaagtaagtgagactggtgcatgtaaattaatggtagtagagcacctcccacatctgattttataacagtttcccatcactccttaaagaaaaaggccaggccgggcgtggtggttcacgcctgtaatctcagcacttcgggaggccgaggcgggtggatcatgaggtcaggagattgagaccattctggctaacacagtgaacaaaaaattagtcgggcatggtggcgggcgcctgtagtcccagctacttgggaggctgaggcaggagaattgcttgaaccttggaggtggaggctgcagtgagccaagattatgccactgcactccagcctgggtgacagagcgagactccgtctcaaaaaaaaaaaaaaaaagccacacattcttggcattagcacaccaaacagtggtagggtaccctgagaaaggaatgcagcttctcagaggcctcacttccagccagggaaacttaagacctgaaaggaataaggctctttgtgtattcagacagccttctggatgtatcgtatataacctgaaactctccactcttgtataccaactaacaaagtcttccttatgtaacatagattgcagtgtctgtatatggtcttcccattatctggtagtagcatcttgaaactggtcaaaacttgaatgccaatagctcagtcactcagaatatacgattctgcacttgggaaaaatgtcttcatgctgtttttctgatcgggtatggggttgccagaatgaggatttggggctttaggtctttcggatctcagaaacaatataagtagatcataagccactagtgtcacaatttcaggcccattgcttccagctaaaaggagattccatgaccatggggaccaggagaggaggaaagggaaaagggaaaggtctggaatagttttgtgaaagaaataaaaaattgggatgatttggaattctagtaggaaggaggaaaaaatggctcttctgtgggctgttttaatgaaagaatcatgaatatgtattgatcagaggtagatgtctttgaagctgttctgcataaagataatgagatgcatggatttccatccaccctggagaagtgggggagatgtgcttcctcccttctttaaatcctgaggaatgctggtcttgagaacactgaatgcaaatctgaggaagatgtaagcggctggctggggagttttaggaccacccaaataaaagctgaccctcccagaggctaatgaaccacagtgctgtgtgcaggcatagccttagcaggtcagtttaaggagtcaggtcagagaataaatccaaccttagtcaagtcactacagtttaatattttcctttgcaactggaggtaagcctgtttgccattagtctgagtggatgtcttgggaaggcccctgaaaatagccatatttgtcactgtccctaaagtgaatgttcatagatctgggactgtttttgactgtacctctgagactcaagatcaggacagattgttactttaaaatgttacctggaagacgattcttctaagggctataatgttataatcttttcctaaaactaaatcatgcctccattccaggtctatggctagactctgcagccctccctcctaaaaccacagggctgaatgtggaaactttcttcttttaagcctttccatttccttctctaggtacagctcctgtgccaatatgcactgtctcaagccctgtgctggcattccaacctggtttggtaattttgctgtgaggttcatgttctctggggctccagggcaacactaagaaagtcgcttatgatccccatttgagaccatggaattagcattttggagaccagtctagtcccccatttcataagtagggaatcttacttagttccagaggccatgttcacttgctagtcaatagcaaggctggactcaggcagtctgattcctcatccactttggcatactgccagaggtagctccatccctccctggaatctagcacatgctcccatcctgggcctaccctccgcctcctccccttctgatgagcctctgttctggatcaacacggtgttgatgtgccagctgtcaagggttcagcacttggatggcttctaggtgagagccccaaaggcatgtatatttccatgatgcaagctggctcatggcccgcaccgtctttagaccagccaagaccatttaactctaccccacactttcagtggtgggatgtgaggaagaaagcccatgccaagctaactgaaagcttatttggctccaattcggctgatgttccctcactgcagaatgtcctggaaaccaagggtttgcagctcctaaacctattgcattaggcacacccaagaagaaatcctgttcgatgcacatgctccagtttcaatcagcaacaaggtcaaaagtttccccccactttctgttccacagtgcgttccccttgcagccagacattaggcacagattcatccctattgtaacccaaatgtcagctgagggctccttgcctcttgacatccagagaggtctgataactgggctctgtttctgaacctctagatttctgtgatttctcaaagacttatatttttgcagccactgctgactccacacttctgctacctcattttaaatagcgtcttatccctgcaatgcatcagctgagacatgaagctcagtttcctcgcccatttccacatagcaaaattcaagcgagtgagtgtgtgtgcctgcgtgtgtctcagtgacgtgggaaggaatggcagatgctacaacagtgcagactcggcaccccatttatagaatgttctttttatatactatggaggaatctccactcaccttccactccacgtggtccctgtctcctgtccttgggacagagcagttccatttatattctcacatacaaccagatggatagccattccttttcttaatttgattcctgccaacaccctaaccgtcatgacttcaccttttaccatgggtggcttattaaaaacattttcctggacgaagacagttccctccccaagcggaattcgagtgccatctcttaaggtgatgcatttttaattcccactgcacaagccaggcatcacaatgaccatattcaccactcgttgtcaggggtacaccttttggaaggcagcgtgggctaatgtgaatggtactagtctgagtcagatccagttcaaatccaggtaacttaaagcttgtgtgacccagggacactttacttcaacttgttaaaccttaattttgtcacctataaatgtgatacataaacaaacttgaatgtgtcgcacttaaccacatgcctggctttccataggttcctttcctcttgcttcccccactgtgagcaacacaagcatcgccttcttgtgatcatggctcagtgccaagggataaaagctggcagacagcagctttacagctgggaaaaagagctgctgggggcagggctggcggtagctcaagcatgctgtggttcaggctaatgactggaaggtcccatccatccttgagattttatgacgctatgtgcaagatctagcgaacgtatttggctaagaaaaatcctggaggagagactgcctcagacaactggggggctggaaagccgacctggaaagcagcctgaccttggatgatttagcacctgggttttttggctcttcctgtattaggtttgctggcttcgcatcaaatggaaggaggtggtgccagggacgtgaattaaacctgtcaaatagagggtgaggggagtgcagaaggctgggggaaggaggggctgtgtggggaactctgatagtctgacagcaccatctggacttggcagggatgacagccctgagatcagatggaactaaccaataaagctgctaaaattctgctgtcctgggcctatccggagtgggactcccgtaatctcctatttagaaggaacactgatctgcaaggggagagctggggcccttaatcattctgcagagctgataacggtcactgtggaggcaggactaggcgggtgcctggtttgcttagtcccaccttgaggtcccgagttccagtggtgtgccgaagtggtttgcactggcccatgagagtggattgttgaatttccaggaattttgtaagctggttggtaaacacagccacagtgaccattagagattatattaacctgcaattaaataaagtatgttaaaaacagtaataaatactcaaaactcatcacttcctaattattttactattatctatgttcttgaggatactgacatctattgtattggtatggtgtgctacaatataatggcgtgctattgcacatctcttcccaacctgaacattcagtgacatcacatcagtagctggggaatcggccctattgagagtatttacaccacagagattggcaaacactctatatcaagacccccctccccgagagctggttgttaaacatttgtcagcacaccactgctgctgggagacagagagaagaaactgatacacgtgagcactgaaacatcttagttccagggaggtagcatttgtgttgtatttctcagaagcaagtgtcctagtgtaatgtgcacaagtggcatgaagtttaacacctaaaagactgcttctctgcttgttctgtctaacttctgtgatttcaacacttgagaaagatgtttactttgctactaaacttattggagtgatttgtaaagttcactgtcacctgtgggcagtagttcagctaaattccctccaggaaagtggactgtagcttttcctgcctaactggcaaaatgaaaatatgctgaaaagaatacatcttaactaggcaccagaatagctcatttccaagtggtttatacagcaataacagtgttaacttctccaacagagacgaaatcatttataaatgattgttttgctgtttttgctttttattaaaattattactatggaa

SEQ ID NO: 176358 - DNA, 5830 bp, Homo sapiens
  Payload ID: 14624
  Gene Symbol: RIMKLB
  Gene Name: ribosomal modification protein rimK-like family member B
  Uniprot ID: Q9ULI2
  ENST ID: ENST00000357529
  CDS Start-End: 1263-2423
ggtctgagggagcggggcggtctccgccggcgtcgcgcgcgctgtgtgtgagcggggtcgcgcgcgcgcgcggcaggcgagtgagggaacgaggagcggccgggtgtgagtgtgtgggagtgagagtgtgtgggagtggggtgagggagaagctgacgggacgcgaggctgtgagaaactgggcgagtgtgcgaggacgcccggccagcctgcgggagccgcagtcggcggaggagaaaggaggcggctcccggtatcccgaccccctccccctcctctccttcccccacttccagccgcccggcggcccgcgcttcctcgaaggccccagcccggctcagtcggccgagagcgagggaggagccccccgacccaggtgctggagtctgcttgtcagggaggggggcagtctgtgattctgagaacagagccaagaaggggaacagcaaattcagtcacagacaatcctccactcggtcaagagccacttttctcttcctgccttgcccccccgcagggggtaaggaactgagcgtttaatctttagccggttggctaccagctaaaattctacttatcttagtttctagtggatagctttcttattttgcccatgttttcttagaatccctgtttaatatacttttgtcagtagtagtatctaggagtagcagggagagtgacaataaattagccccttcttttttcccttgtcattcaggccccttttcctctccagagggaaattaccagtaaactcttctaaatcttccaccccttctcagtcatactgtgaagaaacacactaaagtggacattatttgaccagtgaacacgaacccagcttcaggcattggtttgttgtggcacatggagaaacatctcttttaaaatatctcccaattacccttttcacaatttgtatccacctaggatttgctgctggggtaagtcactagatttatttctcaaagctcccctctctatgagctgaaagactgaccaaccatgaacactagtaggggatggggaaaggggacagagcagagccagttgttccacactttgggaagcaggagtagcttttatcatcttcctctggggagcaggcatagagacataaactgagtgaaaatgggtggaggaagaacttctatacccacgaacaacatgtgaagagagagaaccaaacataaagtaaggagggtagacgttacatccaagaggaaataatccaggcaaggaagcacaagctgatcaagatgtgtagttctgtggctgccaagttgtggtttttgacagatcgtcgcatcagggaagactatcctcaaaaagagattttacgagcattgaaggccaaatgttgtgaggaggaactggactttagggctgtggtgatggatgaggtggtgctgacaatcgagcaaggaaacctgggtctgcggatcaatggagagctaatcactgcctacccacaagtggtggtagtcagagtaccaaccccttgggtgcaaagtgatagtgacatcactgttttgcgccatctagagaagatgggatgtcggttaatgaaccgacctcaagccatcctgaactgcgttaataagttctggacatttcaagagttggctggccatggtgttcctctgccggatactttctcttatggtggccacgaaaattttgctaaaatgattgatgaggctgaagttctggagttcccaatggtagtaaagaatacgcggggtcacagaggtaaagctgttttcttggctcgagataagcaccatttggctgatctaagccatcttattcgccatgaagcgccatacctgttccagaagtatgttaaagagtctcatggacgggatgtacgtgtcattgtcgtgggaggccgtgtggttggcaccatgttacgttgttcaacagatgggagaatgcaaagcaactgctcattaggtggtgtggggatgatgtgctcattgagtgaacaagggaagcagctagctatccaggtgtctaatatcctggggatggatgtgtgtggcattgatctgctgatgaaagatgacggctccttctgcgtctgtgaggccaatgcaaatgtaggtttcatcgcctttgataaggcttgtaatctagatgtagctggtatcatagcagactatgccgcctcccttctaccctctggccggctcacccggcgtatgtccctgctctccgtggtgtccactgccagtgagactagtgagccggagctgggtcccccagccagcactgctgttgacaacatgagtgcaagttccagctctgttgacagcgaccctgaaagcacggagcgagagctgctcaccaagctcccagggggcctgttcaacatgaaccagctgctagccaatgaaatcaaactactggtggactgactccactggtaattaaccaacaaaacccttgtaaaactttctttcttcttttctatttttaaaaccaacttgcaatgctgttcatggaggatgctcaggaagatgagagaaaattagtaggattagttggagagagtgggagatagatgagacctctgctagtaagatgttactttcatttacaaatcctacaaatagagaggcagaataggtggggtatagaaaaatgtcaggctctcatagttacccttttaaattgctaaaaaatgtgtatgctcataggccatgaggaacaaatactttttttttttcatggtcccttgcttttgtttttgtacaaaaaaaaatggttttgctacaaatatccaagtagcataacttcacattgtgttggaagatttgtcatcagtgaggaaaacatctgcataaattacaggaatttttgtattatacagctctgaaaattctgccatttccttattaactagcagctttagtttgtagtttatgaaatcttgaggggctcttttactgggatttcttatttttttgttttttcccgcttaatttggtgggaggtcaaattgaatataacccaataaaggcttcttaatgacaaaattggcatgtttgcatgatgaaatggaaatgaacagtattgcaatgtccggtatacaaaataacattaattcaatgtagataaaattacactagtttaaaatatgtgcattcacttgtatttgttagtgttttagtcttttttgaaagatgtgctctgttaatgttgcttttttttttttttttaatacatgctagtctaacatttcctgctctatgcctgcatctttaacaatggccaaagtgaagaaaatgctaccttttttgttaacaagacactgacttgaaacatgtacatttaaagccttttattttttccctttttgttttggtagttgggcatttaaataaggacaaggaaaaatatttttgggggcaaatcaagagcctatgagttctaagtataaagctgaagtgatttcgaatgccagcgttatatatttgcatttttcacattttacgagggagtatatgtgtatgtgtgtgcacgcatgcatgtgtatgtgttttgctttttgtttccatcaactaatcaaaaaggataatttagaaaatggagcatgatgggaaacagagtttttgactttaaaaaacagatgagttgttttcataagtagactccactggggtagaggtattcaccttaaaacatagggtgagtagatgcttttttaggcctttttgtgtatatgtacgttgtttgtttttttccttttgtttctagcctgttcagtgtacagtttattcaaggctacatgcttttctttaatgcttctggctatgcattttctctttttacatataggatttgggattgggggtgggttggatgtttttgtttggggacttatttagtagtattgagtctcttatagccctactcttaagccttcaatactgtccactctttatattcctttacttgcagaatttataaaagcccccaaactgcatataatatgagcctttaaaacatgggtaaaactaatcccattgatgggtttggatggtatgttaagaaatggagatgctgcagagcccaacgtaattttttaaacagcaagttttccatctccctacgaatcctctgaagcttttacccaagccctttcttgcctctccagtgctattttccttcagatggaccttaaacataatttcttggacactactagagagacttcgaggcaataataaaagatcagtattaaccagctataacagaggtttgatcatgcttacttgtacagtttttcccccgttttaaaaaggaatgtaataaaatttgttttttccatagaattaaataatattaaaattgagtgaaaggttgattgttgatgaatagaatagtacctctcatctgtgcagtgtctcatttcacctcagagaaaaggatacataagaggagtttgtaatttatcttaggatattctaattgcatttaaaagaacttatcttgcgcagggtaaatgggggactcacatacatatattaatacctctgactcattaacagaaagaaatacttggtacttctttcgctgaatgaccatactgtggaggatgcatactatttggtatagagaaataaatgaggaagaaagaactgcttaattaaattatcattcatatgttcatatagagaccatctggttgccatgtgtattatgacacatacactttgaatagttacatatcacaagtatgtagttcatgtttgtgttggtggggtaaggcatcaggaaaaatgtagttagtcttttcttaacttataccaaattaaccaactatattataggaaatatgtgaaattagttcattagctttattcactattatgcattcacatgatattaaaacgtacactcacatgttagaatgaaaagagcagtagttatcttagattttaaaaacatggatatcttcttgaattccttcaagattgaggtagagaataagagcaaatcattctggaagtaccttaaggaaacaaacagcagcagatatttaggttaaacttattttcataattgtttaataacttttgtataatcttcattgctattatgagagagaatgtatatatcaaatatgtgtaatgataaaatctgaattgtaaaatttttgtatattgttaaaattgtaattctaaattgtatttcaaaaatgattatttctgatattgtttttatgtcacccatgatgaaaactggactttatatatctaaacatacaagtatgaactattctatttaaaatttttaatagtttttttcttttttggtgcctataattgattggtcatttctgctggcttttctccaatgaacattgaaatcttcctgtatatgttaccaataagaaaactaccctggaacagtagaaaaacccaacaagagacttggcattcatcaagcacattatcagactttgagaacatattgaaggcattgactttgaaaatcatctctttttctcaagaagaaagcaatggagaagcaaatttgtttcattcagtgaatccccagtttggggcttgtggggcttagagacattgtgaaatcaaatcttgtgttatacttttctcctggctcactttttttgagaaggtttatgggctatttggctggtgagacacgatcccctcctaagaaaatgtaggtgctcagacaggtaaccactgctgctactgtttttatttgtttgtttgttcaattttatttaagatttgtttttgttgtactaggattttaaaaaatgtaatatattgcaggatttataaccagg

SEQ ID NO: 176359 - DNA, 1589 bp, Homo sapiens
  Payload ID: 14624
  Gene Symbol: RIMKLB
  Gene Name: ribosomal modification protein rimK-like family member B
  Uniprot ID: Q9ULI2
  ENST ID: ENST00000544257
  CDS Start-End: 185-1108
atggattcgtgggctgcttccacctgctaggagggtggtgtactctaactcagggacagaagcccctgtctgtgctcaggactcttgcagacctctttacctggctgttcatcttccataatcaactggtagacgttacatccaagaggaaataatccaggcaaggaagcacaagctgatcaagatgtgtagttctgtggctgccaagttgtggtttttgacagatcgtcgcatcagggaagactatcctcaaaaagagattttacgagcattgaaggccaaatgttgtgaggaggaactggactttagggctgtggtgatggatgaggtggtgctgacaatcgagcaaggaaacctgggtctgcggatcaatggagagctaatcactgcctacccacaagtggtggtagtcagagtaccaaccccttgggtgcaaagtgatagtgacatcactgttttgcgccatctagagaagatgggatgtcggttaatgaaccgacctcaagccatcctgaactgcgttaataagttctggacatttcaagagttggctggccatggtgttcctctgccggatactttctcttatggtggccacgaaaattttgctaaaatgattgatgaggctgaagttctggagttcccaatggtagtaaagaatacgcggggtcacagaggtaaagctgttttcttggctcgagataagcaccatttggctgatctaagccatcttattcgccatgaagcgccatacctgttccagaagtatgttaaagagtctcatggacgggatgtacgtgtcattgtcgtgggaggccgtgtggttggcaccatgttacgttgttcaacagatgggagaatgcaaagcaactgctcattaggtggtgtggggatgatgtgctcattgagtgaacaagggaagcagctagctatccaggtgtctaatatcctggggatggatgtgtgtggcattgatctgctgatgaaagatgacggctccttctgcgtctgtgaggccaatgcaaatccttttcaggagccaaaaaaacaaatacaaacaaacaaaaaaatacccagagaaaaaactttccttcttcccccttcctgatgatgagtgagaagtattgagaactttcggggtcagtgcccttctaaactccccttcccccaataatgcagctgtataatgaatggtaaatgcaccggtttggattcaggcacagccccagtctgcctacagcagacaactaaactggtaggtggcagcagaggaaggaattcttcagattgatggctactgacttaaagtctgcataggagaagagatagagcatgacataccaagtgaagcaagggggacaaaaatggaaacaggactaagattcctgcattttgactctaaatggttcttttgaagtaaccagtgatcttttttgcttaccctcatcaacagaatggatgaagatagatttgactgtgtgctttttcaagtggagaatatgaatatacagaacaagaaagcaataactccaacctgtttgattccgtctgttttctaaataaagacactatgcgctggaaataacata

SEQ ID NO: 176360 - DNA, 481 bp, Homo sapiens
  Payload ID: 14624
  Gene Symbol: RIMKLB
  Gene Name: ribosomal modification protein rimK-like family member B
  ENST ID: ENST00000539923
  CDS Start-End: 197-481
cttttcgctccccgcgcgcgatccatcgcctctcttcccccgaggccagcgatggctcggccgcccggcggcccgcgcttcctcgaaggccccagcccggctcagtcggccgagagcgagggaggagccccccgacccaggtagacgttacatccaagaggaaataatccaggcaaggaagcacaagctgatcaagatgtgtagttctgtggctgccaagttgtggtttttgacagatcgtcgcatcagggaagactatcctcaaaaagagattttacgagcattgaaggccaaatgttgtgaggaggaactggactttagggctgtggtgatggatgaggtggtgctgacaatcgagcaaggaaacctgggtctgcggatcaatggagagctaatcactgcctacccacaagtggtggtagtcagagtaccaaccccttgggtgcaaagtgatagtgacatcactgttttgcgccatcta

SEQ ID NO: 176361 - DNA, 5392 bp, Homo sapiens
  Payload ID: 14624
  Gene Symbol: RIMKLB
  Gene Name: ribosomal modification protein rimK-like family member B
  Uniprot ID: Q9ULI2
  ENST ID: ENST00000538135
  CDS Start-End: 826-1986
ggggaacagcaaattcagtcacagacaatcctccactcggtcaagagccacttttctcttcctgccttgcccccccgcagggggtaaggaactgagcgtttaatctttagccggttggctaccagctaaaattctacttatcttagtttctagtggatagctttcttattttgcccatgttttcttagaatccctgtttaatatacttttgtcagtagtagtatctaggagtagcagggagagtgacaataaattagccccttcttttttcccttgtcattcaggccccttttcctctccagagggaaattaccagtaaactcttctaaatcttccaccccttctcagtcatactgtgaagaaacacactaaagtggacattatttgaccagtgaacacgaacccagcttcaggcattggtttgttgtggcacatggagaaacatctcttttaaaatatctcccaattacccttttcacaatttgtatccacctaggatttgctgctggggtaagtcactagatttatttctcaaagctcccctctctatgagctgaaagactgaccaaccatgaacactagtaggggatggggaaaggggacagagcagagccagttgttccacactttgggaagcaggagtagcttttatcatcttcctctggggagcaggcatagagacataaactgagtgaaaatgggtggaggaagaacttctatacccacgaacaacatgtgaagagagagaaccaaacataaagtaaggagggtagacgttacatccaagaggaaataatccaggcaaggaagcacaagctgatcaagatgtgtagttctgtggctgccaagttgtggtttttgacagatcgtcgcatcagggaagactatcctcaaaaagagattttacgagcattgaaggccaaatgttgtgaggaggaactggactttagggctgtggtgatggatgaggtggtgctgacaatcgagcaaggaaacctgggtctgcggatcaatggagagctaatcactgcctacccacaagtggtggtagtcagagtaccaaccccttgggtgcaaagtgatagtgacatcactgttttgcgccatctagagaagatgggatgtcggttaatgaaccgacctcaagccatcctgaactgcgttaataagttctggacatttcaagagttggctggccatggtgttcctctgccggatactttctcttatggtggccacgaaaattttgctaaaatgattgatgaggctgaagttctggagttcccaatggtagtaaagaatacgcggggtcacagaggtaaagctgttttcttggctcgagataagcaccatttggctgatctaagccatcttattcgccatgaagcgccatacctgttccagaagtatgttaaagagtctcatggacgggatgtacgtgtcattgtcgtgggaggccgtgtggttggcaccatgttacgttgttcaacagatgggagaatgcaaagcaactgctcattaggtggtgtggggatgatgtgctcattgagtgaacaagggaagcagctagctatccaggtgtctaatatcctggggatggatgtgtgtggcattgatctgctgatgaaagatgacggctccttctgcgtctgtgaggccaatgcaaatgtaggtttcatcgcctttgataaggcttgtaatctagatgtagctggtatcatagcagactatgccgcctcccttctaccctctggccggctcacccggcgtatgtccctgctctccgtggtgtccactgccagtgagactagtgagccggagctgggtcccccagccagcactgctgttgacaacatgagtgcaagttccagctctgttgacagcgaccctgaaagcacggagcgagagctgctcaccaagctcccagggggcctgttcaacatgaaccagctgctagccaatgaaatcaaactactggtggactgactccactggtaattaaccaacaaaacccttgtaaaactttctttcttcttttctatttttaaaaccaacttgcaatgctgttcatggaggatgctcaggaagatgagagaaaattagtaggattagttggagagagtgggagatagatgagacctctgctagtaagatgttactttcatttacaaatcctacaaatagagaggcagaataggtggggtatagaaaaatgtcaggctctcatagttacccttttaaattgctaaaaaatgtgtatgctcataggccatgaggaacaaatactttttttttttcatggtcccttgcttttgtttttgtacaaaaaaaaatggttttgctacaaatatccaagtagcataacttcacattgtgttggaagatttgtcatcagtgaggaaaacatctgcataaattacaggaatttttgtattatacagctctgaaaattctgccatttccttattaactagcagctttagtttgtagtttatgaaatcttgaggggctcttttactgggatttcttatttttttgttttttcccgcttaatttggtgggaggtcaaattgaatataacccaataaaggcttcttaatgacaaaattggcatgtttgcatgatgaaatggaaatgaacagtattgcaatgtccggtatacaaaataacattaattcaatgtagataaaattacactagtttaaaatatgtgcattcacttgtatttgttagtgttttagtcttttttgaaagatgtgctctgttaatgttgcttttttttttttttttaatacatgctagtctaacatttcctgctctatgcctgcatctttaacaatggccaaagtgaagaaaatgctaccttttttgttaacaagacactgacttgaaacatgtacatttaaagccttttattttttccctttttgttttggtagttgggcatttaaataaggacaaggaaaaatatttttgggggcaaatcaagagcctatgagttctaagtataaagctgaagtgatttcgaatgccagcgttatatatttgcatttttcacattttacgagggagtatatgtgtatgtgtgtgcacgcatgcatgtgtatgtgttttgctttttgtttccatcaactaatcaaaaaggataatttagaaaatggagcatgatgggaaacagagtttttgactttaaaaaacagatgagttgttttcataagtagactccactggggtagaggtattcaccttaaaacatagggtgagtagatgcttttttaggcctttttgtgtatatgtacgttgtttgtttttttccttttgtttctagcctgttcagtgtacagtttattcaaggctacatgcttttctttaatgcttctggctatgcattttctctttttacatataggatttgggattgggggtgggttggatgtttttgtttggggacttatttagtagtattgagtctcttatagccctactcttaagccttcaatactgtccactctttatattcctttacttgcagaatttataaaagcccccaaactgcatataatatgagcctttaaaacatgggtaaaactaatcccattgatgggtttggatggtatgttaagaaatggagatgctgcagagcccaacgtaattttttaaacagcaagttttccatctccctacgaatcctctgaagcttttacccaagccctttcttgcctctccagtgctattttccttcagatggaccttaaacataatttcttggacactactagagagacttcgaggcaataataaaagatcagtattaaccagctataacagaggtttgatcatgcttacttgtacagtttttcccccgttttaaaaaggaatgtaataaaatttgttttttccatagaattaaataatattaaaattgagtgaaaggttgattgttgatgaatagaatagtacctctcatctgtgcagtgtctcatttcacctcagagaaaaggatacataagaggagtttgtaatttatcttaggatattctaattgcatttaaaagaacttatcttgcgcagggtaaatgggggactcacatacatatattaatacctctgactcattaacagaaagaaatacttggtacttctttcgctgaatgaccatactgtggaggatgcatactatttggtatagagaaataaatgaggaagaaagaactgcttaattaaattatcattcatatgttcatatagagaccatctggttgccatgtgtattatgacacatacactttgaatagttacatatcacaagtatgtagttcatgtttgtgttggtggggtaaggcatcaggaaaaatgtagttagtcttttcttaacttataccaaattaaccaactatattataggaaatatgtgaaattagttcattagctttattcactattatgcattcacatgatattaaaacgtacactcacatgttagaatgaaaagagcagtagttatcttagattttaaaaacatggatatcttcttgaattccttcaagattgaggtagagaataagagcaaatcattctggaagtaccttaaggaaacaaacagcagcagatatttaggttaaacttattttcataattgtttaataacttttgtataatcttcattgctattatgagagagaatgtatatatcaaatatgtgtaatgataaaatctgaattgtaaaatttttgtatattgttaaaattgtaattctaaattgtatttcaaaaatgattatttctgatattgtttttatgtcacccatgatgaaaactggactttatatatctaaacatacaagtatgaactattctatttaaaatttttaatagtttttttcttttttggtgcctataattgattggtcatttctgctggcttttctccaatgaacattgaaatcttcctgtatatgttaccaataagaaaactaccctggaacagtagaaaaacccaacaagagacttggcattcatcaagcacattatcagactttgagaacatattgaaggcattgactttgaaaatcatctctttttctcaagaagaaagcaatggagaagcaaatttgtttcattcagtgaatccccagtttggggcttgtggggcttagagacattgtgaaatcaaatcttgtgttatacttttctcctggctcactttttttgagaaggtttatgggctatttggctggtgagacacgatcccctcctaagaaaatgtaggtgctcagacaggtaaccactgctgctactgtttttatttgtttgtttgttcaattttatttaagatttgtttttgttgtactaggattttaaaaaatgtaatatattgcaggatttataaccag

SEQ ID NO: 176362 - DNA, 555 bp, Homo sapiens
  Payload ID: 14624
  Gene Symbol: RIMKLB
  Gene Name: ribosomal modification protein rimK-like family member B
  ENST ID: ENST00000541044
  CDS Start-End: 213-555
gtttacgccggtttctagggggcagagctggcgctatccaccccgcctgtatctccaaacccgcttcagccaggaaatttatcatgtggttttaaatttgcctctcaatatacagaggtactgtctttactccagtcccggataaagaccttctaggtagacgttacatccaagaggaaataatccaggcaaggaagcacaagctgatcaagatgtgtagttctgtggctgccaagttgtggtttttgacagatcgtcgcatcagggaagactatcctcaaaaagagattttacgagcattgaaggccaaatgttgtgaggaggaactggactttagggctgtggtgatggatgaggtggtgctgacaatcgagcaaggaaacctgggtctgcggatcaatggagagctaatcactgcctacccacaagtggtggtagtcagagtaccaaccccttgggtgcaaagtgatagtgacatcactgttttgcgccatctagagaagatgggatgtcggttaatgaaccgacctcaagccatcctgaactgcgttaata

SEQ ID NO: 176363 - DNA, 560 bp, Homo sapiens
  Payload ID: 14624
  Gene Symbol: RIMKLB
  Gene Name: ribosomal modification protein rimK-like family member B
  ENST ID: ENST00000537189
  CDS Start-End: 51-560
ttttcgctccccgcgcgcgatccatcgcctctcttcccccgaggccagcgatggctcgggtgcgggcgaggagctgggagggcggctctcgacgcagccgcccggcggcccgcgcttcctcgaaggccccagcccggctcagtcggccgagagcgagggaggagccccccgacccaggtagacgttacatccaagaggaaataatccaggcaaggaagcacaagctgatcaagatgtgtagttctgtggctgccaagttgtggtttttgacagatcgtcgcatcagggaagactatcctcaaaaagagattttacgagcattgaaggccaaatgttgtgaggaggaactggactttagggctgtggtgatggatgaggtggtgctgacaatcgagcaaggaaacctgggtctgcggatcaatggagagctaatcactgcctacccacaagtggtggtagtcagagtaccaaccccttgggtgcaaagtgatagtgacatcactgttttgcgccatctagagaagatgggatgtcggttaatgaaccgacctcaagccatc

SEQ ID NO: 176364 - DNA, 2236 bp, Homo sapiens
  Payload ID: 14624
  Gene Symbol: RIMKLB
  Gene Name: ribosomal modification protein rimK-like family member B
  Uniprot ID: Q9ULI2
  ENST ID: ENST00000535829
  CDS Start-End: 455-1615
agcaagcgggcgggcggcgttcggtctgagggagcggggcggtctccgccggcgtcgcgcgcgctgtgtgtgagcggggtcgcgcgcgcgcgcggcaggcgagtgagggaacgaggagcggccgggtgtgagtgtgtgggagtgagagtgtgtgggagtggggtgagggagaagctgacgggacgcgaggctgtgagaaactgggcgagtgtgcgaggacgcccggccagcctgcgggagccgcagtcggcggaggagaaaggaggcggctcccggtatcccgaccccctccccctcctctccttcccccacttccagccgcccggcggcccgcgcttcctcgaaggccccagcccggctcagtcggccgagagcgagggaggagccccccgacccaggtagacgttacatccaagaggaaataatccaggcaaggaagcacaagctgatcaagatgtgtagttctgtggctgccaagttgtggtttttgacagatcgtcgcatcagggaagactatcctcaaaaagagattttacgagcattgaaggccaaatgttgtgaggaggaactggactttagggctgtggtgatggatgaggtggtgctgacaatcgagcaaggaaacctgggtctgcggatcaatggagagctaatcactgcctacccacaagtggtggtagtcagagtaccaaccccttgggtgcaaagtgatagtgacatcactgttttgcgccatctagagaagatgggatgtcggttaatgaaccgacctcaagccatcctgaactgcgttaataagttctggacatttcaagagttggctggccatggtgttcctctgccggatactttctcttatggtggccacgaaaattttgctaaaatgattgatgaggctgaagttctggagttcccaatggtagtaaagaatacgcggggtcacagaggtaaagctgttttcttggctcgagataagcaccatttggctgatctaagccatcttattcgccatgaagcgccatacctgttccagaagtatgttaaagagtctcatggacgggatgtacgtgtcattgtcgtgggaggccgtgtggttggcaccatgttacgttgttcaacagatgggagaatgcaaagcaactgctcattaggtggtgtggggatgatgtgctcattgagtgaacaagggaagcagctagctatccaggtgtctaatatcctggggatggatgtgtgtggcattgatctgctgatgaaagatgacggctccttctgcgtctgtgaggccaatgcaaatgtaggtttcatcgcctttgataaggcttgtaatctagatgtagctggtatcatagcagactatgccgcctcccttctaccctctggccggctcacccggcgtatgtccctgctctccgtggtgtccactgccagtgagactagtgagccggagctgggtcccccagccagcactgctgttgacaacatgagtgcaagttccagctctgttgacagcgaccctgaaagcacggagcgagagctgctcaccaagctcccagggggcctgttcaacatgaaccagctgctagccaatgaaatcaaactactggtggactgactccactggtaattaaccaacaaaacccttgtaaaactttctttcttcttttctatttttaaaaccaacttgcaatgctgttcatggaggatgctcaggaagatgagagaaaattagtaggattagttggagagagtgggagatagatgagacctctgctagtaagatgttactttcatttacaaatcctacaaatagagaggcagaataggtggggtatagaaaaatgtcaggctctcatagttacccttttaaattgctaaaaaatgtgtatgctcataggccatgaggaacaaatactttttttttttcatggtcccttgcttttgtttttgtacaaaaaaaaatggttttgctacaaatatccaagtagcataacttcacattgtgttggaagatttgtcatcagtgaggaaaacatctgcataaattacaggaatttttgtattatacagctctgaaaattctgccatttccttattaactagcagctttagtttgtagtttatgaaatcttgaggggctcttttactgggatttcttatttttttgttttttcccgcttaatttggtgggaggtcaaattgaatataacccaataaaggcttcttaatgacaaaa

SEQ ID NO: 176365 - DNA, 1519 bp, Homo sapiens
  Payload ID: 14624
  Gene Symbol: RIMKLB
  Gene Name: ribosomal modification protein rimK-like family member B
  Uniprot ID: Q9ULI2
  ENST ID: ENST00000619374
  CDS Start-End: 125-1048
tgtatgaaatccagaaatcaagtagatttcttgatttaccttttatgtatattttttcttccatctaggtagacgttacatccaagaggaaataatccaggcaaggaagcacaagctgatcaagatgtgtagttctgtggctgccaagttgtggtttttgacagatcgtcgcatcagggaagactatcctcaaaaagagattttacgagcattgaaggccaaatgttgtgaggaggaactggactttagggctgtggtgatggatgaggtggtgctgacaatcgagcaaggaaacctgggtctgcggatcaatggagagctaatcactgcctacccacaagtggtggtagtcagagtaccaaccccttgggtgcaaagtgatagtgacatcactgttttgcgccatctagagaagatgggatgtcggttaatgaaccgacctcaagccatcctgaactgcgttaataagttctggacatttcaagagttggctggccatggtgttcctctgccggatactttctcttatggtggccacgaaaattttgctaaaatgattgatgaggctgaagttctggagttcccaatggtagtaaagaatacgcggggtcacagaggtaaagctgttttcttggctcgagataagcaccatttggctgatctaagccatcttattcgccatgaagcgccatacctgttccagaagtatgttaaagagtctcatggacgggatgtacgtgtcattgtcgtgggaggccgtgtggttggcaccatgttacgttgttcaacagatgggagaatgcaaagcaactgctcattaggtggtgtggggatgatgtgctcattgagtgaacaagggaagcagctagctatccaggtgtctaatatcctggggatggatgtgtgtggcattgatctgctgatgaaagatgacggctccttctgcgtctgtgaggccaatgcaaatccttttcaggagccaaaaaaacaaatacaaacaaacaaaaaaatacccagagaaaaaactttccttcttcccccttcctgatgatgagtgagaagtattgagaactttcggggtcagtgcccttctaaactccccttcccccaataatgcagctgtataatgaatggtaaatgcaccggtttggattcaggcacagccccagtctgcctacagcagacaactaaactggtaggtggcagcagaggaaggaattcttcagattgatggctactgacttaaagtctgcataggagaagagatagagcatgacataccaagtgaagcaagggggacaaaaatggaaacaggactaagattcctgcattttgactctaaatggttcttttgaagtaaccagtgatcttttttgcttaccctcatcaacagaatggatgaagatagatttgactgtgtgctttttcaagtggagaatatgaatatacagaacaagaaagcaataactccaacctgtttgattccgtctgttttctaaataaagacactatgcgctgg

SEQ ID NO: 176366 - DNA, 2278 bp, Homo sapiens
  Payload ID: 14625
  Gene Symbol: RPL10
  Gene Name: ribosomal protein L10
  Uniprot ID: P27635
  ENST ID: ENST00000344746
  CDS Start-End: 149-793
agcgcctctttcccttcggtgtggtgagtaagcgcagttgtcgtctcttgcggtgccgttgctggttctcacaccttttaggtctgttctcgtcttccgttccgactctctctttttcgttgcagccactgaagatcctggtgtcgccatgggccgccgccccgcccgttgttaccggtattgtaagaacaagccgtacccaaagtctcgcttctgccgaggtgtccctgatgccaagattcgcatttttgacctggggcggaaaaaggcaaaagtggatgagtttccgctttgtggccacatggtgtcagatgaatatgagcagctgtcctctgaagccctggaggctgcccgaatttgtgccaataagtacatggtaaaaagttgtggcaaagatggcttccatatccgggtgcggctccaccccttccacgtcatccgcatcaacaagatgttgtcctgtgctggggctgacaggctccaaacaggcatgcgaggtgcctttggaaagccccagggcactgtggccagggttcacattggccaagttatcatgtccatccgcaccaagctgcagaacaaggagcatgtgattgaggccctgcgcagggccaagttcaagtttcctggccgccagaagatccacatctcaaagaagtggggcttcaccaagttcaatgctgatgaatttgaagacatggtggctgaaaagcggctcatcccagatggctgtggggtcaagtacatccccagtcgtggccctctggacaagtggcgggccctgcactcatgagggcttccaatgtgctgcccccctcttaatactcaccaataaattctacttcctgtccacctatgtctttgtatctacattcttgacggggaaggaacttcctctgggaacctttgggtcattgccctttcacttcagaaacaggttgacaactcagccctgctcatgaggcagcaaaccctgcaaagggctgggactggtggccttatgtcagttgtctactctggagcttgacttggacctccccaggtcctaggcagtaggttgaaaaacactgaagtgcttttcatgaagcacagctgcagcaaagccttgcaatcccaggctggggtcagcctacagttgtgttgcttattacaacacatgcggaccaagaggggcttgtgggctagaggctgaccagcagcgtttatttagcaagggtaggtgtgcatcacattgggcttgttctcacccatctggtttggccattcctccttggtgggaatcatccaggtactgctgaggtcacctgcgatttgccccatttcctatctctagcaacctcctgggccccatgcccccaccccttctagaacctgcattcccagggccttcaccacctgaccaaaggtctaggctaacctttggtcatttgtaacaagacctcggaacagacacgtgtgtggcatggtttggcctggggatcttagatgtctgacctgaactattgtagaacagcgctggcttttgggggagcagcaaaaatgagaggagtgctaggtgggtggcctgagcatctgtatccagggacaggactccaaaggcttttggtcccagagctggggtatgttggccccagcccccagcctgtggctcccaaaaggcctctggttttttgtaatctcagtttacagccatttcttaggtttttaattacctttattttattttgccaaacatacctgggaataccttttattttttttttaccttggggtgatggttccaaaccataaatgtgattatagttaacacatgacccttctagcgtcccagccagtgtttttcctgacctctcttctttggagaggaggatggaagggaggggtccggcatgctgctggcattttgctgtgtcctgcagcccctttccgggacacctgggttcacacagctttttagcttacataactggtgcagattttctgtgtggagatgttgccttgaccagccttggctggactttaccaggcatgcagaagcctgtaccaacacagactacagcacccaggaggtgcgagtgtggctgctcagcggttataacaggcctgactgcattgttcaccggattataatgagccaaaatgtttcccggtgtttgctggtttcagggaaggagtttgatatagcagattaaccaccctccttgtagctattggggcttaatggtttcctggtgattcttaccaatccacaataaacatggcccattggcatatctgc

SEQ ID NO: 176367 - DNA, 1284 bp, Homo sapiens
  Payload ID: 14625
  Gene Symbol: RPL10
  Gene Name: ribosomal protein L10
  Uniprot ID: P27635
  ENST ID: ENST00000369817
  CDS Start-End: 577-1221
gcaattcctgacttgtactgccccagtggtgttacagcctcgaacccagtttccagacctaagtcaccgccggcatccagagtcccatgatggaaagggaggctaggttcccctgggaaggaccttgcaccactgctgcaagtgcaccccagaaatcgtcccaagcttttctcaaagggacctgcagccatttataaaagcgacatatcatcctggaaaacagaaatatacgtctgtcacagttaacggcaaagcctagggcaagagttctacgcccaagatggccagccggaagcgggcttctcgcgaccatgtggcgaagccccattcgtcagctggccgcccgcggccctggtacccggtcacctctctgatctgcgcatgtgctgggctacgcccgggcgcaagcgccaagagcggctgcgtctatggtcatgacgtctgacagagcgtccacccgtcttcgacaggactctatggttcttacgcgcgcagacagaccgcctatataagccatgcgcaggcggaggagcgcctctttcccttcggtgtgccactgaagatcctggtgtcgccatgggccgccgccccgcccgttgttaccggtattgtaagaacaagccgtacccaaagtctcgcttctgccgaggtgtccctgatgccaagattcgcatttttgacctggggcggaaaaaggcaaaagtggatgagtttccgctttgtggccacatggtgtcagatgaatatgagcagctgtcctctgaagccctggaggctgcccgaatttgtgccaataagtacatggtaaaaagttgtggcaaagatggcttccatatccgggtgcggctccaccccttccacgtcatccgcatcaacaagatgttgtcctgtgctggggctgacaggctccaaacaggcatgcgaggtgcctttggaaagccccagggcactgtggccagggttcacattggccaagttatcatgtccatccgcaccaagctgcagaacaaggagcatgtgattgaggccctgcgcagggccaagttcaagtttcctggccgccagaagatccacatctcaaagaagtggggcttcaccaagttcaatgctgatgaatttgaagacatggtggctgaaaagcggctcatcccagatggctgtggggtcaagtacatccccagtcgtggccctctggacaagtggcgggccctgcactcatgagggcttccaatgtgctgcccccctcttaatactcaccaataaattctacttcctgtccaccta

SEQ ID NO: 176368 - DNA, 748 bp, Homo sapiens
  Payload ID: 14625
  Gene Symbol: RPL10
  Gene Name: ribosomal protein L10
  ENST ID: ENST00000406022
  CDS Start-End: 202-693
cgggaaaaacgggtgcggccgcctcctgtgtcctacagggggcgccagacgcatttccactcggcttggagttaccggtattgtaagaacaagccgtacccaaagtctcgcttctgccgaggtgtccctgatgccaagattcgcatttttgacctggggcggaaaaaggcaaaagtggatgagtttccgctttgtggccacatggtgtcagatgaatatgagcagctgtcctctgaagccctggaggctgcccgaatttgtgccaataagtacatggtaaaaagttgtggcaaagatggcttccatatccgggtgcggctccaccccttccacgtcatccgcatcaacaagatgttgtcctgtgctggggctgacaggctccaaacaggcatgcgaggtgcctttggaaagccccagggcactgtggccagggttcacattggccaagttatcatgtccatccgcaccaagctgcagaacaaggagcatgtgattgaggccctgcgcagggccaagttcaagtttcctggccgccagaagatccacatctcaaagaagtggggcttcaccaagttcaatgctgatgaatttgaagacatggtggctgaaaagcggctcatcccagatggctgtggggtcaagtacatccccagtcgtggccctctggacaagtggcgggccctgcactcatgagggcttccaatgtgctgcccccctcttaatactcaccaataaattctacttcctg

SEQ ID NO: 176369 - DNA, 657 bp, Homo sapiens
  Payload ID: 14625
  Gene Symbol: RPL10
  Gene Name: ribosomal protein L10
  ENST ID: ENST00000436473
  CDS Start-End: 56-657
ggaggagcgcctctttcccttcggtgtggtgaccactgaagatcctggtgtcgccatgggccgccgccccgcccgttgttaccggtattgtaagaacaagccgtacccaaagtctcgcttctgccgaggtgtccctgatgccaagattcgcatttttgacctggggcggaaaaaggcaaaagtggatgagtttccgctttgtggccacatggtgtcagatgaatatgagcagctgtcctctgaagccctggaggctgcccgaatttgtgccaataagtacatggtaaaaagttgtggcaaagatggcttccatatccgggtgcggctccaccccttccacgtcatccgcatcaacaagatgttgtcctgtgctggggctgacaggctccaaacaggcatgcgaggtgcctttggaaagccccagggcactgtggccagggttcacattggccaagttatcatgtccatccgcaccaagctgcagaacaaggagcatgtgattgaggccctgcgcagggccaagttcaagtttcctggccgccagaagatccacatctcaaagaagtggggcttcaccaagttcaatgctgatgaatttgaagacatggtggctgaaaagcggctcatcccagatggctgtggggtcaagtacatccc

SEQ ID NO: 176370 - DNA, 585 bp, Homo sapiens
  Payload ID: 14625
  Gene Symbol: RPL10
  Gene Name: ribosomal protein L10
  ENST ID: ENST00000458500
  CDS Start-End: 41-585
tctttcccttcggtgtgccactgaagatcctggtgtcgccatgggccgccgccccgcccgttgttaccggtattgtaagaacaagccgtacccaaagtctcgcttctgccgaggtgtccctgatgccaagattcgcatttttgacctggggcggaaaaaggcaaaagtggatgagtttccgctttgtggccacatggtgtcagatgaatatgagcagctgtcctctgaagccctggaggctgcccgaatttgtgccaataagtacatggtaaaaagttgtggcaaagatggcttccatatccgggtgcggctccaccccttccacgtcatccgcatcaacaagatgttgtcctgtgctggggctgacagatccacatctcaaagaagtggggcttcaccaagttcaatgctgatgaatttgaagacatggtggctgaaaagcggctcatcccagatggctgtggggtcaagtacatccccagtcgtggccctctggacaagtggcgggccctgcactcatgagggcttccaatgtgctgcccccctcttaatactcaccaataaattctacttcctgtccaccta

SEQ ID NO: 176371 - DNA, 292 bp, Homo sapiens
  Payload ID: 14625
  Gene Symbol: RPL10
  Gene Name: ribosomal protein L10
  ENST ID: ENST00000428169
  CDS Start-End: 1-276
ctccaccccttccacgtcatccgcatcaacaagatgttgtcctgtgctggggctgacaggctccaaacaggcatgcgaggtgcctttggaaagccccagggcactgtggccagggttcacattggccaagttatcatgtccatccgcaccaagctgcagaacaaggagcatgtgattgaggccctgcgcagggccaagttcaagtttcctggccgccagaagggggctcccatacctgctcagaccagcttgtcaccaagtctgcctcatccttaagtggatcgcgataccc

SEQ ID NO: 176372 - DNA, 457 bp, Homo sapiens
  Payload ID: 14625
  Gene Symbol: RPL10
  Gene Name: ribosomal protein L10
  ENST ID: ENST00000427682
  CDS Start-End: 1-396
ctccaccccttccacgtcatccgcatcaacaagatgttgtcctgtgctggggctgacaggctccaaacaggcatgcgaggtgcctttggaaagccccagggcactgtggccagggttcacattggccaagttatcatgtccatccgcaccaagctgcagaacaaggagcatgtgattgaggccctgcgcagggccaagttcaagtttcctggccgccagaaggcctaccttgctctgccagtgctgggagacctccagaaacacatcgtagagggcgttcagctccttctctacggccttaggagtggtgtgcagcgggaccaacaccaggctgggaaggactgcaaggcccagggaccgagggctgccatccactcctggaccttctccccctagcccgtctgggtgaggaagcccccagtggagccagccagaactccccttctgctcccacata

SEQ ID NO: 176373 - DNA, 713 bp, Homo sapiens
  Payload ID: 14625
  Gene Symbol: RPL10
  Gene Name: ribosomal protein L10
  ENST ID: ENST00000451365
  CDS Start-End: 1-327
ccaaagtctcgcttctgccgaggtgtccctgatgccaagattcgcatttttgacctggggcggaaaaaggcaaaagtggatgagtttccgctttgtggccacatggtgtcagatgaatatgagcagctgtcctctgaagccctggaggctgcccgaatttgtgccaataagtacatggtaaaaagttgtggcaaagatggcttccatatccgggtgcggctccaccccttccacgtcatccgcatcaacaagatgttgtcctgtgctggggctgacaggcctaccttgctctgccagtgctgggagacctccagaaacacatcgtagagggcgttcagctccttctctacggccttaggagtggtgtgcagcgggaccaacaccaggctgggaaggactgcaaggcccagggaccgagggctgccatccactcctggaccttctccccctagcccgtctgggtgaggaagcccccagtggagccagccagaactccccttctgctcccacataccaagcccacccttcccttcctaccattgctgggcaaagagaactgggccacaaatggctcccgggcaaagacgtcatcctcatcgttgtacacgtaggaactcaggacctgtgttttgtgtgacctgggaggacaaagggatgggcagcagtggccccacgtctttgattttggcttgcaagtgccaaacggcgctcag

SEQ ID NO: 176374 - DNA, 622 bp, Homo sapiens
  Payload ID: 14625
  Gene Symbol: RPL10
  Gene Name: ribosomal protein L10
  ENST ID: ENST00000449494
  CDS Start-End: 1-87
ctccaccccttccacgtcatccgcatcaacaagatgttgtcctgtgctggggctgacagccccatcccttcacctcctcctcggtgagctggaagctcgtggggaagtcaaaggcagccgcagtgtgcagcagactccggcagcgctccccgtgcagcacgacgcggtcataggtgcagtgggtgctggcccgcactgtggtgtcctccccatcggcaatcacccagtggaagcctggctcagtccgcagctccagcttgtccaggcgctttttggtcagtgaagcgcagtcagcattgaagtccccaagcaggatcacgtcctagagacacagcagccatcaggctggccgctgggccaccctatccttgtccctcctgtacaaactgcccaggcctaccttgctctgccagtgctgggagacctccagaaacacatcgtagagggcgttcagctccttctctacggccttaggagtggtgtgcagcgggaccaacaccaggctgggaaggactgcaaggcccagggaccgagggctgccatccactcctggaccttctccccctagcccgtctgggtgaggaagcccccagtggagccagccagaactccccttctgctc

SEQ ID NO: 176375 - DNA, 2318 bp, Homo sapiens
  Payload ID: 14625
  Gene Symbol: RPL10
  Gene Name: ribosomal protein L10
  Uniprot ID: P27635
  ENST ID: ENST00000424325
  CDS Start-End: 189-833
gggctacgcccgggcgcaagcgccaagagcggctgcgtctatggtcatgacgtctgacagagcgtccacccgtcttcgacaggactctatggttcttacgcgcgcagacagaccgcctatataagccatgcgcaggcggaggagcgcctctttcccttcggtgtgccactgaagatcctggtgtcgccatgggccgccgccccgcccgttgttaccggtattgtaagaacaagccgtacccaaagtctcgcttctgccgaggtgtccctgatgccaagattcgcatttttgacctggggcggaaaaaggcaaaagtggatgagtttccgctttgtggccacatggtgtcagatgaatatgagcagctgtcctctgaagccctggaggctgcccgaatttgtgccaataagtacatggtaaaaagttgtggcaaagatggcttccatatccgggtgcggctccaccccttccacgtcatccgcatcaacaagatgttgtcctgtgctggggctgacaggctccaaacaggcatgcgaggtgcctttggaaagccccagggcactgtggccagggttcacattggccaagttatcatgtccatccgcaccaagctgcagaacaaggagcatgtgattgaggccctgcgcagggccaagttcaagtttcctggccgccagaagatccacatctcaaagaagtggggcttcaccaagttcaatgctgatgaatttgaagacatggtggctgaaaagcggctcatcccagatggctgtggggtcaagtacatccccagtcgtggccctctggacaagtggcgggccctgcactcatgagggcttccaatgtgctgcccccctcttaatactcaccaataaattctacttcctgtccacctatgtctttgtatctacattcttgacggggaaggaacttcctctgggaacctttgggtcattgccctttcacttcagaaacaggttgacaactcagccctgctcatgaggcagcaaaccctgcaaagggctgggactggtggccttatgtcagttgtctactctggagcttgacttggacctccccaggtcctaggcagtaggttgaaaaacactgaagtgcttttcatgaagcacagctgcagcaaagccttgcaatcccaggctggggtcagcctacagttgtgttgcttattacaacacatgcggaccaagaggggcttgtgggctagaggctgaccagcagcgtttatttagcaagggtaggtgtgcatcacattgggcttgttctcacccatctggtttggccattcctccttggtgggaatcatccaggtactgctgaggtcacctgcgatttgccccatttcctatctctagcaacctcctgggccccatgcccccaccccttctagaacctgcattcccagggccttcaccacctgaccaaaggtctaggctaacctttggtcatttgtaacaagacctcggaacagacacgtgtgtggcatggtttggcctggggatcttagatgtctgacctgaactattgtagaacagcgctggcttttgggggagcagcaaaaatgagaggagtgctaggtgggtggcctgagcatctgtatccagggacaggactccaaaggcttttggtcccagagctggggtatgttggccccagcccccagcctgtggctcccaaaaggcctctggttttttgtaatctcagtttacagccatttcttaggtttttaattacctttattttattttgccaaacatacctgggaataccttttattttttttttaccttggggtgatggttccaaaccataaatgtgattatagttaacacatgacccttctagcgtcccagccagtgtttttcctgacctctcttctttggagaggaggatggaagggaggggtccggcatgctgctggcattttgctgtgtcctgcagcccctttccgggacacctgggttcacacagctttttagcttacataactggtgcagattttctgtgtggagatgttgccttgaccagccttggctggactttaccaggcatgcagaagcctgtaccaacacagactacagcacccaggaggtgcgagtgtggctgctcagcggttataacaggcctgactgcattgttcaccggattataatgagccaaaatgtttcccggtgtttgctggtttcagggaaggagtttgatatagcagattaaccaccctccttgtagctattggggcttaatggtttcctggtgattcttaccaatccacaataaacatggcccattggcatatctgc

SEQ ID NO: 176376 - DNA, 2210 bp, Homo sapiens
  Payload ID: 14625
  Gene Symbol: RPL10
  Gene Name: ribosomal protein L10
  ENST ID: ENST00000618723
  CDS Start-End: 189-725
gggctacgcccgggcgcaagcgccaagagcggctgcgtctatggtcatgacgtctgacagagcgtccacccgtcttcgacaggactctatggttcttacgcgcgcagacagaccgcctatataagccatgcgcaggcggaggagcgcctctttcccttcggtgtgccactgaagatcctggtgtcgccatgggccgccgccccgcccgttgttaccggtattgtaagaacaagccgtacccaaagtctcgcttctgccgaggtgtccctgccctggaggctgcccgaatttgtgccaataagtacatggtaaaaagttgtggcaaagatggcttccatatccgggtgcggctccaccccttccacgtcatccgcatcaacaagatgttgtcctgtgctggggctgacaggctccaaacaggcatgcgaggtgcctttggaaagccccagggcactgtggccagggttcacattggccaagttatcatgtccatccgcaccaagctgcagaacaaggagcatgtgattgaggccctgcgcagggccaagttcaagtttcctggccgccagaagatccacatctcaaagaagtggggcttcaccaagttcaatgctgatgaatttgaagacatggtggctgaaaagcggctcatcccagatggctgtggggtcaagtacatccccagtcgtggccctctggacaagtggcgggccctgcactcatgagggcttccaatgtgctgcccccctcttaatactcaccaataaattctacttcctgtccacctatgtctttgtatctacattcttgacggggaaggaacttcctctgggaacctttgggtcattgccctttcacttcagaaacaggttgacaactcagccctgctcatgaggcagcaaaccctgcaaagggctgggactggtggccttatgtcagttgtctactctggagcttgacttggacctccccaggtcctaggcagtaggttgaaaaacactgaagtgcttttcatgaagcacagctgcagcaaagccttgcaatcccaggctggggtcagcctacagttgtgttgcttattacaacacatgcggaccaagaggggcttgtgggctagaggctgaccagcagcgtttatttagcaagggtaggtgtgcatcacattgggcttgttctcacccatctggtttggccattcctccttggtgggaatcatccaggtactgctgaggtcacctgcgatttgccccatttcctatctctagcaacctcctgggccccatgcccccaccccttctagaacctgcattcccagggccttcaccacctgaccaaaggtctaggctaacctttggtcatttgtaacaagacctcggaacagacacgtgtgtggcatggtttggcctggggatcttagatgtctgacctgaactattgtagaacagcgctggcttttgggggagcagcaaaaatgagaggagtgctaggtgggtggcctgagcatctgtatccagggacaggactccaaaggcttttggtcccagagctggggtatgttggccccagcccccagcctgtggctcccaaaaggcctctggttttttgtaatctcagtttacagccatttcttaggtttttaattacctttattttattttgccaaacatacctgggaataccttttattttttttttaccttggggtgatggttccaaaccataaatgtgattatagttaacacatgacccttctagcgtcccagccagtgtttttcctgacctctcttctttggagaggaggatggaagggaggggtccggcatgctgctggcattttgctgtgtcctgcagcccctttccgggacacctgggttcacacagctttttagcttacataactggtgcagattttctgtgtggagatgttgccttgaccagccttggctggactttaccaggcatgcagaagcctgtaccaacacagactacagcacccaggaggtgcgagtgtggctgctcagcggttataacaggcctgactgcattgttcaccggattataatgagccaaaatgtttcccggtgtttgctggtttcagggaaggagtttgatatagcagattaaccaccctccttgtagctattggggcttaatggtttcctggtgattcttaccaatccacaataaacatggcccattggcatatctgc

SEQ ID NO: 176377 - DNA, 716 bp, Homo sapiens
  Payload ID: 14626
  Gene Symbol: RPL10A
  Gene Name: ribosomal protein L10a
  Uniprot ID: P62906
  ENST ID: ENST00000322203
  CDS Start-End: 28-681
tttccggttagcgcggcgtgagaagccatgagcagcaaagtctctcgcgacaccctgtacgaggcggtgcgggaagtcctgcacgggaaccagcgcaagcgccgcaagttcctggagacggtggagttgcagatcagcttgaagaactatgatccccagaaggacaagcgcttctcgggcaccgtcaggcttaagtccactccccgccctaagttctctgtgtgtgtcctgggggaccagcagcactgtgacgaggctaaggccgtggatatcccccacatggacatcgaggcgctgaaaaaactcaacaagaataaaaaactggtcaagaagctggccaagaagtatgatgcgtttttggcctcagagtctctgatcaagcagattccacgaatcctcggcccaggtttaaataaggcaggaaagttcccttccctgctcacacacaacgaaaacatggtggccaaagtggatgaggtgaagtccacaatcaagttccaaatgaagaaggtgttatgtctggctgtagctgttggtcacgtgaagatgacagacgatgagcttgtgtataacattcacctggctgtcaacttcttggtgtcattgctcaagaaaaactggcagaatgtccgggccttatatatcaagagcaccatgggcaagccccagcgcctatattaaggcacatttgaataaattctattaccagttccctc

SEQ ID NO: 176378 - DNA, 812 bp, Homo sapiens
  Payload ID: 14627
  Gene Symbol: RPL10L
  Gene Name: ribosomal protein L10-like
  Uniprot ID: Q96L21
  ENST ID: ENST00000298283
  CDS Start-End: 86-730
gaggggcaacgtatataaatgcgcgcaggcgtagttaagagagcgcattttgacttcgaggcaccgccgacgttactgtgtcgccatggggcgccgtccagctcgctgttaccggtattgtaagaacaagccgtacccaaaatctcgtttctgccgaggggttcctgatgccaagatccgcatctttgacctgggtagaaagaaggcaaaagtggatgagttcccactcggtggccacatggtgtctgatgaatatgagcagctgtcttctgaagccctggaggccgcccgtatttgtgccaacaaatacatggtgaaaagttgtggcagagatggctttcacatgcgagtgcggctccatcccttccatgtcatccgcatcaacaagatgttgtcctgtgctggggctgacaggctccagacaggtatgcgaggtgcctttggaaaaccccagggtactgtagcccgggtccacattggtcaagtcatcatgtccatccgcaccaagcttcagaacgaggagcatgtgattgaagccttgcgcagggccaagttcaagttccctggacgccagaagattcatatctccaagaagtggggcttcacgaagtttaatgctgacgaatttgaagacatggtggccaagaagtgcctcatccctgatggttgtggagtcaagtacgttcccagtcatggccccttggacaagtggcgggttctgcactcatgaaggttttggcagtactgtctccttgggccatgctggtctgacttatgcttactaataaattctgtttactggcaaaaaataa

SEQ ID NO: 176379 - DNA, 634 bp, Homo sapiens
  Payload ID: 14628
  Gene Symbol: RPL11
  Gene Name: ribosomal protein L11
  Uniprot ID: P62913
  ENST ID: ENST00000374550
  CDS Start-End: 46-582
aaggccctcggccggaagctccgctttctcttcctgctctccatcatggcgcaggatcaaggtgaaaaggagaaccccatgcgggaacttcgcatccgcaaactctgtctcaacatctgtgttggggagagtggagacagactgacgcgagcagccaaggtgttggagcagctcacagggcagacccctgtgttttccaaagctagatacactgtcagatcctttggcatccggagaaatgaaaagattgctgtccactgcacagttcgaggggccaaggcagaagaaatcttggagaagggtctaaaggtgcgggagtatgagttaagaaaaaacaacttctcagatactggaaactttggttttgggatccaggaacacatcgatctgggtatcaaatatgacccaagcattggtatctacggcctggacttctatgtggtgctgggtaggccaggtttcagcatcgcagacaagaagcgcaggacaggctgcattggggccaaacacagaatcagcaaagaggaggccatgcgctggttccagcagaagtatgatgggatcatccttcctggcaaataaattcccgtttctatccaaaagagcaataaaaagttttcagtgaaatgtgcaa

SEQ ID NO: 176380 - DNA, 994 bp, Homo sapiens
  Payload ID: 14628
  Gene Symbol: RPL11
  Gene Name: ribosomal protein L11
  ENST ID: ENST00000443624
  CDS Start-End: 1-396
caggatcaaggtgaaaaggagaaccccatgcgggaacttcgcatccgcaaactctgtctcaacatctgtgttggggagagtggagacagactgacgcgagcagccaaggtgttggagcagctcacagggcagacccctgtgttttccaaagctagatacactgtcagatcctttggcatccggagaaatgaaaagattgctgtccactgcacagttcgaggggccaaggcagaagaaatcttggagaagggtctaaaggtgcgggagtatgagttaagaaaaaacaacttctcagatactggaaactttggttttgggatccaggaacacatcgatctgggtatcaaatatgacccaagcattggtatctacggcctggacttctatgtggtatgaatatttaatcttttcccgctcctggtctgtgaggagaggggaatctttatttcatatgtggtatgttggtgttcacatgttgagttgcagctttgaatattgtctgcctttgtgttctcctcccccttggggaaatgtgcctcatttgtggcaaatgtaggggtgcagctctgaacaaggtggacaagatccctgctgttggggaacttgcagtcgaggatctgtaaagcacccacatggcttaaaggtggatgaaggaaactgttccctccagccagtgatttgaaactttggagagaggcagtattggtgccacatttggcctatgggttggttggctgcactgaggctgttctccccctggttcttcctatagaaacagctttgggtgatgcagtggtttgctcaggaagggggttttaacatagaaatgaccttttgtgttactgccgtgttttggtccaacaataaaactgaatagcctaaatcagaagtcctgactagtgtggaacctgaaagatggtggcaccctcattagacagacaagtaataagacttggatactcacaggatgttggaggaacagcacacctttggg

SEQ ID NO: 176381 - DNA, 721 bp, Homo sapiens
  Payload ID: 14628
  Gene Symbol: RPL11
  Gene Name: ribosomal protein L11
  ENST ID: ENST00000458455
  CDS Start-End: 1-525
caggatcaaggtgaaaaggagaaccccatgcgggaacttcgcatccgcaaactctgtctcaacatctgtgttggggagagtggagacagactgacgcgagcagccaaggtgttggagcagctcacagggcagacccctgtgttttccaaagctagatacactgtcagatcctttggcatccggagaaatgaaaagattgctgtccactgcacagttcgaggggccaaggcagaagaaatcttggagaagggtctaaaggtgcgggagtatgagttaagaaaaaacaacttctcagatactggaaactttggttttgggatccaggaacacatcgatctgggtatcaaatatgacccaagcattggtatctacggcctggacttctatgtggtgctgggtaggccaggtttcagcatcgcagacaagaagcgcaggacaggctgcattggggccaaacacagaatcagcaaagaggaggccatgcgctggttccagcagaaggtaaagctgatttatctcaagtgaagtggtggaatgtgatgttggtgaatggagttgggatttggggatgcaaaatatagtactatttgctgggtatcttctttaaagttagaatattgggcatcttgacaaatcaggggcttccagggatgatggtttaaaagaacatccagaactaggccttctccctgtcaccatgaatgggggtagatggaagggg

SEQ ID NO: 176382 - DNA, 633 bp, Homo sapiens
  Payload ID: 14629
  Gene Symbol: RPL12
  Gene Name: ribosomal protein L12
  Uniprot ID: P30050
  ENST ID: ENST00000361436
  CDS Start-End: 89-586
ctctcggctttcggctcggaggaggccaaggtgcaacttccttcggtcgtcccgaatccgggttcatccgacaccagccgcctccaccatgccgccgaagttcgaccccaacgagatcaaagtcgtatacctgaggtgcaccggaggtgaagtcggtgccacttctgccctggcccccaagatcggccccctgggtctgtctccaaaaaaagttggtgatgacattgccaaggcaacgggtgactggaagggcctgaggattacagtgaaactgaccattcagaacagacaggcccagattgaggtggtgccttctgcctctgccctgatcatcaaagccctcaaggaaccaccaagagacagaaagaaacagaaaaacattaaacacagtgggaatatcacttttgatgagattgtcaacattgctcgacagatgcggcaccgatccttagccagagaactctctggaaccattaaagagatcctggggactgcccagtcagtgggctgtaatgttgatggccgccatcctcatgacatcatcgatgacatcaacagtggtgctgtggaatgcccagccagttaagcacaaaggaaaacatttcaataaaggatcatttgacaactggtgga

SEQ ID NO: 176383 - DNA, 499 bp, Homo sapiens
  Payload ID: 14629
  Gene Symbol: RPL12
  Gene Name: ribosomal protein L12
  Uniprot ID: P30050
  ENST ID: ENST00000536368
  CDS Start-End: 57-455
gcaacttccttcggtcgtcccgaatccgggttcatccgacaccagccgcctccaccatgccgccgaagttcgaccccaacgagatcaaagtcgtatacctgaggtgcaccggaggtgaagtcggtgccacttctgccctggcccccaagatcggccccctgggtctgattgaggtggtgccttctgcctctgccctgatcatcaaagccctcaaggaaccaccaagagacagaaagaaacagaaaaacattaaacacagtgggaatatcacttttgatgagattgtcaacattgctcgacagatgcggcaccgatccttagccagagaactctctggaaccattaaagagatcctggggactgcccagtcagtgggctgtaatgttgatggccgccatcctcatgacatcatcgatgacatcaacagtggtgctgtggaatgcccagccagttaagcacaaaggaaaacatttcaataaaggatcatttgacaactggt

SEQ ID NO: 176384 - DNA, 4498 bp, Homo sapiens
  Payload ID: 14630
  Gene Symbol: RPL13
  Gene Name: ribosomal protein L13
  Uniprot ID: P26373
  ENST ID: ENST00000311528
  CDS Start-End: 77-712
ccagagtgcattgcggggccgcttcctttccgctcggctgttttcctgcgcaggagccgcagggccgtaggcagccatggcgcccagccggaatggcatggtcttgaagccccacttccacaaggactggcagcggcgcgtggccacgtggttcaaccagccggcccgtaagatccgcagacgtaaggcccggcaagccaaggcgcgccgcatcgccccgcgccccgcgtcgggtcccatccggcccatcgtgcgctgccccacggttcggtaccacacgaaggtgcgcgccggccgcggcttcagcctggaggagctcagggtggccggcattcacaagaaggtggcccggaccatcggcatttctgtggatccgaggaggcggaacaagtccacggagtccctgcaggccaacgtgcagcggctgaaggagtaccgctccaaactcatcctcttccccaggaagccctcggcccccaagaagggagacagttctgctgaagaactgaaactggccacccagctgaccggaccggtcatgcccgtccggaacgtctataagaaggagaaagctcgagtcatcactgaggaagagaagaatttcaaagccttcgctagtctccgtatggcccgtgccaacgcccggctcttcggcatacgggcaaaaagagccaaggaagccgcagaacaggatgttgaaaagaaaaaataaagccctcctggggacttggaatcagtcggcagtcatgctgggtctccacgtggtgtgtttcgtgggaacaactgggcctgggatggggcttcactgctgtgacttcctcctgccaggggatttggggctttcttgaaagacagtccaagccctggataatgctttactttctgtgttgaagcactgttggttgtttggttagtgactgatgtaaaacggttttcttgtggggaggttacagaggctgacttcagagtggacttgtgttttttctttttaaagaggcaaggttgggctggtgctcacagctgtaatcccagcactttgaggttggctgggagttcaagaccagcctggccaacatgtcagaactactaaaaataaagaaatcagccatgcttggtgctgcacacttgtagttgcagctcctgggaggcagaggtgagggatcacttaacccaggaggcagaggctgcactgagccaggatcacgccactgcactctagcctgggcaacagtgagactgtctcaaaaaaaaaaaaagagacagggtcttcggcacccaggctggagtacagtgccacaatcatggctcactgcagtcttgaactcatggcctcaagcagtcctccctcagcctcccaagtagaggggtttataggcacgagaccctgcacccaacctagagttgccttttttaagcaaagcagtttctagttaatgtagcatcttggactttggggcgtcattcttaagcttgttgtgcccggtaaccatggtcctcttgctctgattaacccttccttcaatgggcttcttcacccagacaccaaggtatgagatggccctgccaagtgtcggcctctcctgttaaacaaaaacattctaaagccattgttcttgcttcatggacaagaggcagccagagagagtgccagggtgccctggtctgagctggcatccccatgtcttctgtgtccgagggcagcatggtttctcgtgcagtgctcagacacagcctgccctagtcctaccagctcacagcagcacctgctctccttggcagctatggccatgacaaccccagagaagcagcttcagggaccgagtcagattctgttttgtctacatgcctctgccgggtgccggtattgaggcacccagggagctgttactggcgtggaaataggtgatgctgctacctctgctgctgcactcacagccacacttgatacacgatgacaccttgcttgtttggaaacatctaaacatctagtagatgacttgcaggctgttggctaccagtttcctgtctgaggtgtatatgttaacttcgtgatcagtttgtatgtttgggactcttgtcctatgtaaagttaaggtgggccgggtgcagtggctcacgcctgtaatcctaacactgggaggccgaggcgggtggatcacctgatggtgaaacctcatctctactgaaaatacaaaaattagctgagtggtgacacacgcctgtaatcccagctacttggtaggcttgaacccaggaggcagagattgcagtgagccgagctgcaccactgtgctccagcctgggtgacagcgagactcagtctcaaaaaaagttgtacaaggtggatggttggaagcttgagcctaggctcgaatccctctcacgtgagagggcctgaagatttctggtggattccaacctggctgaagactggccgtggggggtgcaggggtctccagcgctctgccctccagcctgcttcctccctgcccacaccgcactaggggaagggcctttcctgctgcctgcggggccgcacctggagtaggtaatgccatgtggtgacgtgaatggagcagaggtctgtgccccatcacaccgccttgctgtttttactgtgggacaaaagcactctgatctgcgtgttccgggggccctcctaccagccgacttgacgggaagtcagggttcaggtatcatctgtgcacctggggcggggtagtctgcactgaacctgccagagtcccctcctcatttcactgaaagtcacagtctccagggctgtgttgctaaccttacgttctctccgtttgcttaatctattaagagccctaacaggagaggatgggctttctctgttgtctggggccctgctgttggccggtgctcttagcaagaggtcatttttctaggttgcgctgggacattgtgagtttggtgagggtcatggatgtgggctgggctgggctgggctgggccgggctgcctgctgcctgctgctcccctacctgaaatgcagctagtgcggctctgcccttcctggggctgaggaaggcttctgcaggatagctggggggctgggcaggtgggtgaggcagcctccctgctgacactcagtccttgtagctggagcaagatctcctgatccaggtacgggcctgtctgctccaagaaagactctgccaccagatgcaaaggggccctttgttttaacttagtccctggggaccgcctgattcagcacctgtcggcccaggataccccgctggtggggacaagtgcctgagtgtgggccgtgcccgagtgtggccatccctgagtggggccgtcctgactaggaagtggcttttcagttgtgatgtgtgggcctgacctagggggcgctgtggaacccgggctggaaccagccctctgtgccaggccgcagacaggttccgccggccctgaggggcagctgccatggcgtgggtcactgggagctgagaggaagggcccccaccgcacctcaggcaaagcggctctgggaacaccttgatttcgtccatgtgagccgtcccagggagggcagccaagctgtgaagcctgagaaactgacctgtgtgccacgagcttgtggtctgctgcccggtggaggaagtgcaggtgcgcccaggctcctcattccgttttgcaggattccttcggggtgtgagcatttcctattcagcctgtcgcccccggggagcacgggctggctctgtggtgcccgtggccttttgtagaagcgttggttttacggcaggttcatctctggggcagcctcccacagtgggtggggctttgccagcagtgcccacgggggtcatggggccaggcgcgctccggcgcctgcagaactgatcggggatagtctcaggaggcgctagtcacgtgccccggtgatcggggatagtctcagaaggcgctagtctcctgccccggtgatcggggatagtctcaggaggcacgagtcgcctgcctcggtgatgcaccgtttctcacaccggctgctctggcccgagctaaaggggaagacgtgtgcggataggagctgcacacaattttcctccatgtattgtttattttgctttttcttttggctagacattaggaatttcagttttcccaagttgtatttttccttttctattttaaaattatcatgcagggctgggtgaggtcgctcacgcctatagtctcaaaactttgggaggctgaggggggaggatggcatgagcccaggagtttaaggctgcagtgagccgagatcgctccactgtcctccagcctgcatgacagagcgagaccctatctcaggaaaaaaaaaaacaaaactattatgcagtagtttcgaccctggaagacgagtgtgcatctttgagttgtaacacgtgtacctcgcccatccaggcgtagtttcatttggaatctggttatcctgtagttgctttgttaaaaatatatgtaattgcaaatcatt

SEQ ID NO: 176385 - DNA, 2385 bp, Homo sapiens
  Payload ID: 14630
  Gene Symbol: RPL13
  Gene Name: ribosomal protein L13
  Uniprot ID: P26373
  ENST ID: ENST00000393099
  CDS Start-End: 250-885
aggtgagggagactgggtcctggcctttgggcatcatccagcgccatcggcctggcgcttcagccaacgcgggagtggatgggccccttcttcttcgcagacagcgttcggccgctgcccgggctctaggcgcggccggacggcccagtctggagggttcggggcggaggcccgggggggtgcgcgcgcccggggtccggcctctcactcgctcccctctcgtccgcagccgcagggccgtaggcagccatggcgcccagccggaatggcatggtcttgaagccccacttccacaaggactggcagcggcgcgtggccacgtggttcaaccagccggcccgtaagatccgcagacgtaaggcccggcaagccaaggcgcgccgcatcgccccgcgccccgcgtcgggtcccatccggcccatcgtgcgctgccccacggttcggtaccacacgaaggtgcgcgccggccgcggcttcagcctggaggagctcagggtggccggcattcacaagaaggtggcccggaccatcggcatttctgtggatccgaggaggcggaacaagtccacggagtccctgcaggccaacgtgcagcggctgaaggagtaccgctccaaactcatcctcttccccaggaagccctcggcccccaagaagggagacagttctgctgaagaactgaaactggccacccagctgaccggaccggtcatgcccgtccggaacgtctataagaaggagaaagctcgagtcatcactgaggaagagaagaatttcaaagccttcgctagtctccgtatggcccgtgccaacgcccggctcttcggcatacgggcaaaaagagccaaggaagccgcagaacaggatgttgaaaagaaaaaataaagccctcctggggacttggaatcagtcggcagtcatgctgggtctccacgtggtgtgtttcgtgggaacaactgggcctgggatggggcttcactgctgtgacttcctcctgccaggggatttggggctttcttgaaagacagtccaagccctggataatgctttactttctgtgttgaagcactgttggttgtttggttagtgactgatgtaaaacggttttcttgtggggaggttacagaggctgacttcagagtggacttgtgttttttctttttaaagaggcaaggttgggctggtgctcacagctgtaatcccagcactttgaggttggctgggagttcaagaccagcctggccaacatgtcagaactactaaaaataaagaaatcagccatgcttggtgctgcacacttgtagttgcagctcctgggaggcagaggtgagggatcacttaacccaggaggcagaggctgcactgagccaggatcacgccactgcactctagcctgggcaacagtgagactgtctcaaaaaaaaaaaaagagacagggtcttcggcacccaggctggagtacagtgccacaatcatggctcactgcagtcttgaactcatggcctcaagcagtcctccctcagcctcccaagtagaggggtttataggcacgagaccctgcacccaacctagagttgccttttttaagcaaagcagtttctagttaatgtagcatcttggactttggggcgtcattcttaagcttgttgtgcccggtaaccatggtcctcttgctctgattaacccttccttcaatgggcttcttcacccagacaccaaggtatgagatggccctgccaagtgtcggcctctcctgttaaacaaaaacattctaaagccattgttcttgcttcatggacaagaggcagccagagagagtgccagggtgccctggtctgagctggcatccccatgtcttctgtgtccgagggcagcatggtttctcgtgcagtgctcagacacagcctgccctagtcctaccagctcacagcagcacctgctctccttggcagctatggccatgacaaccccagagaagcagcttcagggaccgagtcagattctgttttgtctacatgcctctgccgggtgccggtattgaggcacccagggagctgttactggcgtggaaataggtgatgctgctacctctgctgctgcactcacagccacacttgatacacgatgacaccttgcttgtttggaaacatctaaacatctagtagatgacttgcaggctgttggctaccagtttcctgtctgaggtgtatatgttaacttcgtgatcagtttgtatgtttgggactcttgtcctatgtaaagttaaggtgggccgggtgcagtggctcacgcctgtaatcctaacactgggaggccgaggcgggtggatcacctgatggtgaaacctcatctctactgaaaatacaaaaattagctgagtggtga

SEQ ID NO: 176386 - DNA, 1455 bp, Homo sapiens
  Payload ID: 14630
  Gene Symbol: RPL13
  Gene Name: ribosomal protein L13
  Uniprot ID: P26373
  ENST ID: ENST00000452368
  CDS Start-End: 51-545
tttccgctcggctgttttcctgcgcaggagccgcagggccgtaggcagccatggcgcccagccggaatggcatggtcttgaagccccacttccacaaggactggcagcggcgcgtggccacgtggttcaaccagccggcccgtaagatccgcagacgtaaggcccggcaagccaaggcgcgccgcatcgccccgcgccccgcgtcgggtcccatccggcccatcgtgcgctgccccacggttcggtaccacacgaaggtgcgcgccggccgcggcttcagcctggaggagctcagggtggccggcattcacaagaagggagacagttctgctgaagaactgaaactggccacccagctgaccggaccggtcatgcccgtccggaacgtctataagaaggagaaagctcgagtcatcactgaggaagagaagaatttcaaagccttcgctagtctccgtatggcccgtgccaacgcccggctcttcggcatacgggcaaaaagagccaaggaagccgcagaacaggatgttgaaaagaaaaaataaagccctcctggggacttggaatcagtcggcagtcatgctgggtctccacgtggtgtgtttcgtgggaacaactgggcctgggatggggcttcactgctgtgacttcctcctgccaggggatttggggctttcttgaaagacagtccaagccctggataatgctttactttctgtgttgaagcactgttggttgtttggttagtgactgatgtaaaacggttttcttgtggggaggttacagaggctgacttcagagtggacttgtgttttttctttttaaagaggcaaggttgggctggtgctcacagctgtaatcccagcactttgaggttggctgggagttcaagaccagcctggccaacatgtcagaactactaaaaataaagaaatcagccatgcttggtgctgcacacttgtagttgcagctcctgggaggcagaggtgagggatcacttaacccaggaggcagaggctgcactgagccaggatcacgccactgcactctagcctgggcaacagtgagactgtctcaaaaaaaaaaaaagagacagggtcttcggcacccaggctggagtacagtgccacaatcatggctcactgcagtcttgaactcatggcctcaagcagtcctccctcagcctcccaagtagaggggtttataggcacgagaccctgcacccaacctagagttgccttttttaagcaaagcagtttctagttaatgtagcatcttggactttggggcgtcattcttaagcttgttgtgcccggtaaccatggtcctcttgctctgattaacccttccttcaatgggcttcttcacccagacaccaaggtatgagatggccctgccaagtgtcggcctctcctgttaaacaaaaacattctaaagccattgttcttgcttcat

SEQ ID NO: 176387 - DNA, 712 bp, Homo sapiens
  Payload ID: 14630
  Gene Symbol: RPL13
  Gene Name: ribosomal protein L13
  Uniprot ID: P26373
  ENST ID: ENST00000567815
  CDS Start-End: 39-674
cctttccgctcggctgttttcctgcgcaggaggcagccatggcgcccagccggaatggcatggtcttgaagccccacttccacaaggactggcagcggcgcgtggccacgtggttcaaccagccggcccgtaagatccgcagacgtaaggcccggcaagccaaggcgcgccgcatcgccccgcgccccgcgtcgggtcccatccggcccatcgtgcgctgccccacggttcggtaccacacgaaggtgcgcgccggccgcggcttcagcctggaggagctcagggtggccggcattcacaagaaggtggcccggaccatcggcatttctgtggatccgaggaggcggaacaagtccacggagtccctgcaggccaacgtgcagcggctgaaggagtaccgctccaaactcatcctcttccccaggaagccctcggcccccaagaagggagacagttctgctgaagaactgaaactggccacccagctgaccggaccggtcatgcccgtccggaacgtctataagaaggagaaagctcgagtcatcactgaggaagagaagaatttcaaagccttcgctagtctccgtatggcccgtgccaacgcccggctcttcggcatacgggcaaaaagagccaaggaagccgcagaacaggatgttgaaaagaaaaaataaagccctcctggggacttggaatcagtcggcagtcatgc

SEQ ID NO: 176388 - DNA, 958 bp, Homo sapiens
  Payload ID: 14630
  Gene Symbol: RPL13
  Gene Name: ribosomal protein L13
  ENST ID: ENST00000562879
  CDS Start-End: 52-243
ctttccgctcggctgttttcctgcgcaggagccgcagggccgtaggcagccatggcgcccagccggaatggcatggtcttgaagccccacttccacaaggactggcagcggcgcgtggccacgtggttcaaccagccggcccgtaagatccgcagaaggtggcccggaccatcggcatttctgtggatccgaggaggcggaacaagtccacggagtccctgcaggccaacgtgcagcggctgaaggagtaccgctccaaactcatcctcttccccaggaagccctcggcccccaagaagggagacagttctgctgaagaactgaaactggccacccagctgaccggaccggtcatgcccgtccggaacgtctataagaaggagaaagctcgagtcatcactgaggaagagaagaatttcaaagccttcgctagtctccgtatggcccgtgccaacgcccggctcttcggcatacgggcaaaaagagccaaggaagccgcagaacaggatgttgaaaagaaaaaataaagccctcctggggacttggaatcagtcggcagtcatgctgggtctccacgtggtgtgtttcgtgggaacaactgggcctgggatggggcttcactgctgtgacttcctcctgccaggggatttggggctttcttgaaagacagtccaagccctggataatgctttactttctgtgttgaagcactgttggttgtttggttagtgactgatgtaaaacggttttcttgtggggaggttacagaggctgacttcagagtggacttgtgttttttctttttaaagaggcaaggttgggctggtgctcacagctgtaatcccagcactttgaggttggctgggagttcaagaccagcctggccaacatgtcagaactactaaaaataaagaaatcagccatgcttggtgctgcacacttgtagttgcagctcctg

SEQ ID NO: 176389 - DNA, 554 bp, Homo sapiens
  Payload ID: 14630
  Gene Symbol: RPL13
  Gene Name: ribosomal protein L13
  ENST ID: ENST00000563270
  CDS Start-End: 391-554
cctttccgctcggctgttttcctgcgcaggagacgtaaggcccggcaagccaaggcgcgccgcatcgccccgcgccccgcgtcgggtcccatccggcccatcgtgcgctgccccacggttcggtaccacacgaaggtgcgcgccggccgcggcttcagcctggaggagctcagggtggccggcattcacaagaaggtggcccggaccatcggcatttctgtggatccgaggaggcggaacaagtccacggagtccctgcaggccaacgtgcagcggctgaaggagtaccgctccaaactcatcctcttccccaggaagccctcggcccccaagaagggagacagttctgctgaagaactgaaactggccacccagctgaccggaccggtcatgcccgtccggaacgtctataagaaggagaaagctcgagtcatcactgaggaagagaagaatttcaaagccttcgctagtctccgtatggcccgtgccaacgcccggctcttcggcatacgggcaaaaagagccaaggaagccgcagaacaggatgttgaaaa

SEQ ID NO: 176390 - DNA, 631 bp, Homo sapiens
  Payload ID: 14630
  Gene Symbol: RPL13
  Gene Name: ribosomal protein L13
  ENST ID: ENST00000472354
  CDS Start-End: 1-235
accggtcatgcccgtccggaacgtaagtgaacacttactcaaatccaggcttcagacgagatcagtgggtgaacacgtctataagaaggagaaagctcgagtcatcactgaggaagagaagaatttcaaagccttcgctagtctccgtatggcccgtgccaacgcccggctcttcggcatacgggcaaaaagagccaaggaagccgcagaacaggatgttgaaaagaaaaaataaagccctcctggggacttggaatcagtcggcagtcatgctgggtctccacgtggtgtgtttcgtgggaacaactgggcctgggatggggcttcactgctgtgacttcctcctgccaggggatttggggctttcttgaaagacagtccaagccctggataatgctttactttctgtgttgaagcactgttggttgtttggttagtgactgatgtaaaacggttttcttgtggggaggttacagaggctgacttcagagtggacttgtgttttttctttttaaagaggcaaggttgggctggtgctcacagctgtaatcccagcactttgaggttggctgggagttcaagaccagcctggccaacatgtcagaactactaaaaataaagaaatcagcca

SEQ ID NO: 176391 - DNA, 528 bp, Homo sapiens
  Payload ID: 14630
  Gene Symbol: RPL13
  Gene Name: ribosomal protein L13
  ENST ID: ENST00000467736
  CDS Start-End: 150-528
aggtgagggagactgggtcctggcctttgggcatcatccagcgccatcggcctggcgcttcagccaacgcgggagtggatgggccccttcttcttcgcagacagcgttcggccgctgcccgggctctagccgcagggccgtaggcagccatggcgcccagccggaatggcatggtcttgaagccccacttccacaaggactggcagcggcgcgtggccacgtggttcaaccagccggcccgtaagatccgcagacgtaaggcccggcaagccaaggcgcgccgcatcgccccgcgccccgcgtcgggtcccatccggcccatcgtgcgctgccccacggttcggtaccacacgaaggtgcgcgccggccgcggcttcagcctggaggagctcagggtggccggcattcacaagaaggtggcccggaccatcggcatttctgtggatccgaggaggcggaacaagtccacggagtccctgcaggccaacgtgcagcggctgaaggagtaccgctccaaactcatcctct

SEQ ID NO: 176392 - DNA, 1181 bp, Homo sapiens
  Payload ID: 14631
  Gene Symbol: RPL13A
  Gene Name: ribosomal protein L13a
  Uniprot ID: P40429
  ENST ID: ENST00000391857
  CDS Start-End: 77-688
cacttctgccgcccctgtttcaagggataagaaaccctgcgacaaaacctcctccttttccaagcggctgccgaagatggcggaggtgcaggtcctggtgcttgatggtcgaggccatctcctgggccgcctggcggccatcgtggctaaacaggtactgctgggccggaaggtggtggtcgtacgctgtgaaggcatcaacatttctggcaatttctacagaaacaagttgaagtacctggctttcctccgcaagcggatgaacaccaacccttcccgaggcccctaccacttccgggcccccagccgcatcttctggcggaccgtgcgaggtatgctgccccacaaaaccaagcgaggccaggccgctctggaccgtctcaaggtgtttgacggcatcccaccgccctacgacaagaaaaagcggatggtggttcctgctgccctcaaggtcgtgcgtctgaagcctacaagaaagtttgcctatctggggcgcctggctcacgaggttggctggaagtaccaggcagtgacagccaccctggaggagaagaggaaagagaaagccaagatccactaccggaagaagaaacagctcatgaggctacggaaacaggccgagaagaacgtggagaagaaaattgacaaatacacagaggtcctcaagacccacggactcctggtctgagcccaataaagactgttaattcctcatgcgttgcctgcccttcctccattgttgccctggaatgtacgggacccaggggcagcagcagtccaggtgccacaggcagccctgggacataggaagctgggagcaaggaaagggtcttagtcactgcctcccgaagttgcttgaaagcactcggagaattgtgcaggtgtcatttatctatgaccaataggaagagcaaccagttactatgagtgaaagggagccagaagactgattggagggccctatcttgtgagtggggcatctgttggactttccacctggtcatatactctgcagctgttagaatgtgcaagcacttggggacagcatgagcttgctgttgtacacagggtatttctagaagcagaaatagactgggaagatgcacaaccaaggggttacaggcatcgcccatgctcctcacctgtattttgtaatcagaaataaattgcttttaaagaaa

SEQ ID NO: 176393 - DNA, 660 bp, Homo sapiens
  Payload ID: 14631
  Gene Symbol: RPL13A
  Gene Name: ribosomal protein L13a
  ENST ID: ENST00000467825
  CDS Start-End: 1-632
cggaggtgcaggtcctggtgcttgatggtcgaggccatctcctgggccgcctggcggccatcgtggctaaacaggtactgctgggccggaaggtggtggtcgtacgctgtgaaggcatcaacatttctggcaatttctacagaaacaagttgaagtacctggctttcctccgcaagcggatgaacaccaacccttcccgaggcccctaccacttccgggcccccagccgcatcttctggcggaccgtgcgaggtgagcagagcgtggggactgcaggtatgctgccccacaaaaccaagcgaggccaggccgctctggaccgtctcaaggtgtttgacggcatcccaccgccctacgacaagaaaaagcggatggtggttcctgctgccctcaaggtcgtgcgtctgaagcctacaagaaagtttgcctatctggggcgcctggctcacgaggttggctggaagtaccaggcagtgacagccaccctggaggagaagaggaaagagaaagccaagatccactaccggaagaagaaacagctcatgaggctacggaaacaggccgagaagaacgtggagaagaaaattgacaaatacacagaggtcctcaagacccacggactcctggtctgagcccaataaagactgttaattcctcatg

SEQ ID NO: 176394 - DNA, 794 bp, Homo sapiens
  Payload ID: 14631
  Gene Symbol: RPL13A
  Gene Name: ribosomal protein L13a
  ENST ID: ENST00000484279
  CDS Start-End: 23-163
cttttccaagcggctgccgaagatggcggaggtgcaggtcctggtgcttgatggtcgaggccatctcctgggccgcctggcggccatcgtggctaaacaggtactgctgggtaagtcgctgctcgtggcccctctgtcatgggcccccgctggaggtcagtgatgagcaacattcaccatctttcgtttgagtctcacggccatgagatcaaccccatgcaccgctctgagacctgccagccactcttccccagggttggggactccaggctcaagaagccggaaggtggtggtcgtacgctgtgaaggcatcaacatttctggcaatttctacagaaacaagttgaagtacctggctttcctccgcaagcggatgaacaccaacccttcccgaggcccctaccacttccgggcccccagccgcatcttctggcggaccgtgcgaggtatgctgccccacaaaaccaagcgaggccaggccgctctggaccgtctcaaggtgtttgacggcatcccaccgccctacgacaagaaaaagcggatggtggttcctgctgccctcaaggtcgtgcgtctgaagcctacaagaaagtttgcctatctggggcgcctggctcacgaggttggctggaagtaccaggcagtgacagccaccctggaggagaagaggaaagagaaagccaagatccactaccggaagaagaaacagctcatgaggctacggaaacaggccgagaagaacgtggagaagaaaattgacaaatacacagaggtcctcaagacccacggactcc

SEQ ID NO: 176395 - DNA, 1098 bp, Homo sapiens
  Payload ID: 14631
  Gene Symbol: RPL13A
  Gene Name: ribosomal protein L13a
  ENST ID: ENST00000621674
  CDS Start-End: 184-612
cacttctgccgcccctgtttcaagggataagaaaccctgcgacaaaacctcctccttttccaagcggctgccgaagatggcggaggtgcaggtcctggtgcttgatggtcgaggccatctcctgggccgcctggcggccatcgtggctaaacagtgaagtacctggctttcctccgcaagcggatgaacaccaacccttcccgaggcccctaccacttccgggcccccagccgcatcttctggcggaccgtgcgaggtatgctgccccacaaaaccaagcgaggccaggccgctctggaccgtctcaaggtgtttgacggcatcccaccgccctacgacaagaaaaagcggatggtggttcctgctgccctcaaggtcgtgcgtctgaagcctacaagaaagtttgcctatctggggcgcctggctcacgaggttggctggaagtaccaggcagtgacagccaccctggaggagaagaggaaagagaaagccaagatccactaccggaagaagaaacagctcatgaggctacggaaacaggccgagaagaacgtggagaagaaaattgacaaatacacagaggtcctcaagacccacggactcctggtctgagcccaataaagactgttaattcctcatgcgttgcctgcccttcctccattgttgccctggaatgtacgggacccaggggcagcagcagtccaggtgccacaggcagccctgggacataggaagctgggagcaaggaaagggtcttagtcactgcctcccgaagttgcttgaaagcactcggagaattgtgcaggtgtcatttatctatgaccaataggaagagcaaccagttactatgagtgaaagggagccagaagactgattggagggccctatcttgtgagtggggcatctgttggactttccacctggtcatatactctgcagctgttagaatgtgcaagcacttggggacagcatgagcttgctgttgtacacagggtatttctagaagcagaaatagactgggaagatgcacaaccaaggggttacaggcatcgcccatgctcctcacctgtattttgtaatcagaaataaattgctttt

SEQ ID NO: 176396 - DNA, 1122 bp, Homo sapiens
  Payload ID: 14631
  Gene Symbol: RPL13A
  Gene Name: ribosomal protein L13a
  ENST ID: ENST00000624069
  CDS Start-End: 28-174
tcctccttttccaagcggctgccgaagatggcggaggtgcaggtcctggtgcttgatggtcgaggccatctcctgggccgcctggcggccatcgtggctaaacaggccggaaggtggtggtcgtacgctgtgaaggcatcaacatttctggcaatttctacagaaacaagttgaagtacctggctttcctccgcaagcggatgaacaccaacccttcccgaggcccctaccacttccgggcccccagccgcatcttctggcggaccgtgcgaggtatgctgccccacaaaaccaagcgaggccaggccgctctggaccgtctcaaggtgtttgacggcatcccaccgccctacgacaagaaaaagcggatggtggttcctgctgccctcaaggtcgtgcgtctgaagcctacaagaaagtttgcctatctggggcgcctggctcacgaggttggctggaagtaccaggcagtgacagccaccctggaggagaagaggaaagagaaagccaagatccactaccggaagaagaaacagctcatgaggctacggaaacaggccgagaagaacgtggagaagaaaattgacaaatacacagaggtcctcaagacccacggactcctggtctgagcccaataaagactgttaattcctcatgcgttgcctgcccttcctccattgttgccctggaatgtacgggacccaggggcagcagcagtccaggtgccacaggcagccctgggacataggaagctgggagcaaggaaagggtcttagtcactgcctcccgaagttgcttgaaagcactcggagaattgtgcaggtgtcatttatctatgaccaataggaagagcaaccagttactatgagtgaaagggagccagaagactgattggagggccctatcttgtgagtggggcatctgttggactttccacctggtcatatactctgcagctgttagaatgtgcaagcacttggggacagcatgagcttgctgttgtacacagggtatttctagaagcagaaatagactgggaagatgcacaaccaaggggttacaggcatcgcccatgctcctcacctgtattttgtaatcagaaataaattgcttttaaagaaa

SEQ ID NO: 176397 - DNA, 7072 bp, Homo sapiens
  Payload ID: 14632
  Gene Symbol: RPL14
  Gene Name: ribosomal protein L14
  Uniprot ID: P50914
  ENST ID: ENST00000338970
  CDS Start-End: 70-717
ggcggtgcgttcttctacacatgcgcagggttgggcgggtcttcttccttctcgcctaacgccgccaacatggtgttcaggcgcttcgtggaggttggccgggtggcctatgtctcctttggacctcatgccggaaaattggtcgcgattgtagatgttattgatcagaacagggctttggtcgatggaccttgcactcaagtgaggagacaggccatgcctttcaagtgcatgcagctcactgatttcatcctcaagtttccgcacagtgcccaccagaagtatgtccgacaagcctggcagaaggcagacatcaatacaaaatgggcagccacacgatgggccaagaagattgaagccagagaaaggaaagccaagatgacagattttgatcgttttaaagttatgaaggcaaagaaaatgaggaacagaataatcaagaatgaagttaagaagcttcaaaaggcagctctcctgaaagcttctcccaaaaaagcacctggtactaagggtactgctgctgctgctgctgctgctgctgctgctaaagttccagcaaaaaagatcaccgccgcgagtaaaaaggctccagcccagaaggttcctgcccagaaagccacaggccagaaagcagcgcctgctccaaaagctcagaagggtcaaaaagctccagcccagaaagcacctgctccaaaggcatctggcaagaaagcataagtggcaatcataaaaagtaataaaggttctttttgacctgttgacaaatgtatttaagcctttggatttaaagcctgttgaggctggagttaggaggcagattgatagtaggattataataaacattaaataatcagttcctttttttttttttttttttttgagatggagtctcgttctgttgctcaggccggactgcagtggcgctatctcggctcactgtaagttccacctcccgggttcatgccattctcctgcctcagcctcctgagcagctgggactacaggtgcccgccaccgcgcctggctaattttttgtatttttagtagagacggggtttcaccgtgttagccaggatggtctcgctctcctgacctcgtgatccgcccgcctcggcctcccaaagtgctaggattgcaggcatgagccgccgcgcctggcctaaataatcagttctttaatctcactctctgcccatacttggataggtagtgcaaaatcattgcagtcataattgatcatgtcatgagaaatcatgataacttagaacaccaagtgacacaagtgacatttttttcttatggtcaccttggcttcagaacatcttttttccttgtacaaatatgtttgccataaataggtaaagtgacagcctcttgatgctcaagagtctagcagatttattttatttatttattttttttttttggagacagagtcttgctgtgttgcccaggctggagtgcagtggtgcgatctcagctccctccaccttccgggttcaagtgattctcctgccttggcttcccaggtagctgggactacaggcgcccaccaccatgcccagctaattttttttgtagagactgggtttcactatgttggccaggctggttttgaactcctgacctcgtgatccgcctgtctcggcctcccagagcgggggattataggcatgggccactgcacttggcctttttttgtttttttgagacagagtcttgatcttatcacccaggctggagtgcagtggcacgatcttggctcagcgcaacctctgcctcctgggctcaagcggttctcctgctcagccttctgagtagttgggactataggtgtgtgccaccacgtctggctagtttttgtatttttagtggagatggggtttcaccatgttggccatgctggtctcgagctcctgacctcaggtgatacacccgccttggcctcccaaagtgctggaattacaggtgtgagccactgtgcccggcctgcaaattttcttataaaaagtaaactaggaaaatagggcaagtataaaaattgcaggttgagcatatttctaatccaaaaagctctaacctctgaaactgagctatgacactacaatttaaaaatccctagcctacccgcatggtgggttatggtcaaaatacaggtacacagcactattcagtgtccctgaggaagaaatagttaaccttcagggtacatgtatatgaagcataaatgaatttcctgtatagacctaggtcccatccccaaagtgtcatgtatatgcacttaactccaacatcagaacacatctcgtcctaagtgtttcagataagagatacttatcctgtgtatagtaggttggacttctgtttctctctaccacaagatacaggtaatttggggcagtaaaagatcctggatagatttaaaaatactacaaagctgtacatgaaacaggattacttttttttttttttttgagacagagccttactcttgcccaggctggaatgtagtggcacgatctcagctcactgcgacctccacctcccaggttcaagttgttctgcctcagcctcccaagtagcaggggttaaatgcgtgtaccaccatgcccctctaatattgtattagagatggggttttgccatgtcagccagactggtcttgaactcctgacctcaggtgatctgtccgccttggcctcccaaagtgctgggattacaggcgtgagccaccgcttctggccaggaatacattttaaataaatttgtttcctaaccaaaagctagcttcaggcgtcactggggtaaaggaaaaagcacattgatttgcttgataataggcaagtggtatggtgtaataaggaaaatatggatgatttcggattacctgttctactctgggaggtagagaattgtctagagaaagtggcatctatacctaaaataagaagaaggtggtgtaaggggaagaatgacacgagataggaaataaacgaactgatagtgtagaggactggctcgggaccacatcaaggaagtaggttagtggttagatcgtgtaggggaacacgggaagctactgagggttttttaaaatggcgtgatatctcagatttagatcattgaactgttaagactgaatcttatgggatcaagactgggaatgctcgggttggcagtatgaagtttggcagtaatccaaggaagtgacagtggtaatgccatttaggtggtcttgatcatgcattggactgcagaaataagggagaaaacaatgtgtcagggtttctggtttgtacctctggttcattggttgtgagggaacatgaggcagggtaaagtttatctaggtaaaatgagttagttttcatgtagactatctgggtgtatatgcaaagactgcagacaatctatactaaaatcctggctctgcctcttgaaagctatgtagtttaggcacatagtcaaaatccagtttcctcatctatgtggtacgcttcagagtagttaatcatgatatgtagtccagtgactggttcccttggtaagagctgtgataatgacacaaggaggagaggtttcaggacagacttgggattcatgaatatgtaagtggtcactgattccccaggggtaggatgacaacaatcaagagacgaatagaggttggaaaggagtcatgaggggtgggaaactagcaggggcacatggaagctagggaaagaattttgcttgagatcgtcaaagtgaggggaagagggtagtaagcaaaggagaaatgttatatggggttcggaggttttgtgtttgtaaatctggagtgatgggcatgttcaaatgcttctgggaaaggagctaataggagagaaacttagcccttcgaaaaacaggaagggatggatcctaggggagaggaggaaggattggctttagaggaaagatgtcctttacgtgaggaaaaggaagaaaaggtgggtttagatactaaatctgtaggtttgctgttaggaaattaaggacttttcacctttatctctgaaatttctctggagttagcaaggcaaggtcatacactgagaaggagggatgaggcagtgtagatttgcagacatacaggttgtaattccttatggaggaaaggggagagcacttttgtcagactgcctgtggctttgagagccctttggctacagtccatgaggtgctcagaggatgagaaagcttcagggtagaagcagtattcaagctgcacctagaaaacagtgcaatacagaacagtggaaattggaaattccaatcttggaatctctaggaaagtaactgaggcatacgatgcctgaaaaggagtagaaaataaaattaataaggtgggaccatatgataagagatttgaggccgggcactgtggctcacacctgtaatcccagcactatgggaggctgaggcaggcggatcacctgaggtcaggggtccgagaccagcttggccaacatggtgaaaccccgtctttactaaaaatacaaaaattagacaggcatggtggagcatgcctgtaatcccagctacttgggaggctgaggcgggagaatcgcttgaacccaggaggtggaggttgcagtgagctgacattacgccatagcactccagcttgggcgacagagggagactctgtctcaaaaaaaagacttgagcaagggcgtaatcttcaggaaggtcagtctggtagcatagtgtggattgggttgggggatggggaaggagagcagaaaattattgaaatatccaggtgcataaaagtctactttgattatggagaactacacacttgttcagtcaccctcattggagacgggggatggcatacgaaaagaatgctgatttcaggctgggcacggtggctcatgcctttaatcccagcactttgggaggctgaggcaggtgaatcaggggttcaagaccagcctggccaatgtggtgaaaccctgtctctactaaaaatcaaaaaaaaaaaaaaaaaaatggctgatttcagagtcatattcaggtttaaattctgtcattcagcccaaactcattactttatgttacttatgggaacctcatctaaaaagcaaggatcctgatacctgcctcatattgtggcaaggatcaaatgagtcaaataagatgcttgtgaaagtgaggacaggatctatcctcaacacctagtgcaattctttttacacattaggtacttagtaatttgggttgaattgtgttgaactaacctggcggtataggcaaaatttggaagtttggttttcagaaagtcttgacttcctcttatctctaagtaattggcatgtcctctaattcatattttcccccctcatctgttgggtgaaatactgtttatcctttagtactaaaattaaaagttacctcattcttctagctagctgatttttttttttaatctaggctaaatcatgaatacatttacatttaaataaaatattacagttgaaagtaaagggtcctttcattatctccacttccaattccagtaccctgtgtaaaggaaaacatatacatcttgcagacattttttaatgtgtttgtaatataggtacataaaaatatatgtgcttgttttaagcaaatttcatactctgcaacttgccttttttcttaatacgttctggagatcttatctagtcagcctctaaattagagttcttcagaaaaccaatgggatggatgaatggactcaagagattgtggaaaccaagaagtcccacaaaataccatctgcaagctggagaaccaggaaagctgattgggataattcaaactgggtccagaggcctgagaactggaagggccagtggtgtaagtcctggtctgagaccaaaggcttgatcaagaatcaagagcatcaacaaccgagggcaggagaggatgggtttcccagattaaaaaagcaaattcacgcttcctcccccattttgttctatttgaaccttccgtggataggatgatgcccacctgcattggtgaaggtcatctttactcagtctacccattcaaatgccaatctcttccagaggtaatctcacagatttagaaatgtttcgccagctagctgaacaatccttagcccagtcaagtgcacacataaccataacaattcttactaatctacctcattcttttttatcttctgcataataatccacaacatgaatgttcacgtttgacctctattgatagacatttcggatgatgccaatttctttttctggtttttgttttttgtgtgtgtgtgttttttttttttttgagacgaggtcttgctctcgcccaggctggagtgcagtgggtggggtgatctcggctcactgcaacctctgcctcccgggttcaagcagttctcctgcctcaacctcctgagtagctgggattacaggagtgtgccaccacacctggctaatgtttgtattgttagtagatacagggtttcaccctgttagccaggatggtggatgggcatttgaatgggtagactgagtgatcctgacctcgtgatccactccccagtctcccaaagtactgggattacaggcgtgagccacggcaccaggccctctttttctatttaaacagtgcttccgtgaatgtccttgtgtacacctccttctgtacacaatgatgtttatctgatgcacattgccaatcagtgcacttgctggattgaagaatgtgagtgtttgtatcactctttcagtaggctgtaccaatttagacttgctctaccaatttagatttccatcagcagtaaacaaagacattcctgcctggcagtcttgaactcctgctattatctcttaaatttttgccagtgtgtgaaaagtagtatcttactttaacttgtattttcctggtccaatagtgcactaaatgcccgagttctgtatttattctatttggatagccattagatagccattaagtccactcatagagttattttaaatgttttcctttagtttccaaccacattttcaaataaaatttagaattagcttgtcaa

SEQ ID NO: 176398 - DNA, 916 bp, Homo sapiens
  Payload ID: 14632
  Gene Symbol: RPL14
  Gene Name: ribosomal protein L14
  Uniprot ID: P50914
  ENST ID: ENST00000396203
  CDS Start-End: 133-780
ttctcgcctaacgccgccaacatggtgagtcttactgttgcgggctccggggccgtcgaccatgccgctcgacctccacctccgctgggaagctgaggcgccaaacggctcccagagggtcccgggaagcgcatggtgttcaggcgcttcgtggaggttggccgggtggcctatgtctcctttggacctcatgccggaaaattggtcgcgattgtagatgttattgatcagaacagggctttggtcgatggaccttgcactcaagtgaggagacaggccatgcctttcaagtgcatgcagctcactgatttcatcctcaagtttccgcacagtgcccaccagaagtatgtccgacaagcctggcagaaggcagacatcaatacaaaatgggcagccacacgatgggccaagaagattgaagccagagaaaggaaagccaagatgacagattttgatcgttttaaagttatgaaggcaaagaaaatgaggaacagaataatcaagaatgaagttaagaagcttcaaaaggcagctctcctgaaagcttctcccaaaaaagcacctggtactaagggtactgctgctgctgctgctgctgctgctgctgctaaagttccagcaaaaaagatcaccgccgcgagtaaaaaggctccagcccagaaggttcctgcccagaaagccacaggccagaaagcagcgcctgctccaaaagctcagaagggtcaaaaagctccagcccagaaagcacctgctccaaaggcatctggcaagaaagcataagtggcaatcataaaaagtaataaaggttctttttgacctgttgacaaatgtatttaagcctttggatttaaagcctgttgaggctggagttaggaggcagattgatagtaggattataataaacattaaataatca

SEQ ID NO: 176399 - DNA, 812 bp, Homo sapiens
  Payload ID: 14632
  Gene Symbol: RPL14
  Gene Name: ribosomal protein L14
  ENST ID: ENST00000416518
  CDS Start-End: 119-493
cgccaacatggtgagtcttactgttgcgggctccggggccgtcgaccatgccgctcgacctccacctccgctgggaagctgaggcgccaaacggctcccagagggtcccgggaagcgcatggtgttcaggcgcttcgtggaggttggccgggtggcctatgtctcctttggacctcatgccggaaaattggtcgcgattgtagatgttattgatcagaacagggctttggtcgatggaccttgcactcaagtgaggagacaggccatgcctttcaagtgcatgcagctcactgatttcatcctcaagtttccgcacagtgcccaccagaagtatgtccgacaagcctggcagaaggcagacatcaatacaaaatgggcagccacacgatgggccaagaagattgaagccagagaaaggaaagccaagatgacagattttgatcgttttaaagttatgaaggcaaagaaaatggaacagaataatcaagaatgaagttaagaagcttcaaaaggcagctctcctgaaagcttctcccaaaaaagcacctggtactaagggtactgctgctgctgctgctgctgctgctgctgctaaagttccagcaaaaaagatcaccgccgcgagtaaaaaggctccagcccagaaggttcctgcccagaaagccacaggccagaaagcagcgcctgctccaaaagctcagaagggtcaaaaagctccagcccagaaagcacctgctccaaaggcatctggcaagaaagcataagtggcaatcataaaaagtaataaaggttctttttgacctgttgacaaa

SEQ ID NO: 176400 - DNA, 966 bp, Homo sapiens
  Payload ID: 14632
  Gene Symbol: RPL14
  Gene Name: ribosomal protein L14
  ENST ID: ENST00000435633
  CDS Start-End: 110-268
ggtgagtcttactgttgcgggctccggggccgtcgaccatgccgctcgacctccacctccgctgggaagctgaggcgccaaacggctcccagagggtcccgggaagcgcatggtgagggtccccgggccggctgtgcagcggaatcgggcccttcccggactcgcgcccttcccggactcgccgctggcgagcgcgtggagggcccggcaggcctggcgcgccttgggccacgcgtgcgcgcctccgccgctggagctggatggctgatgcggctcgtggtccgagagccttgtcctgccgtgtgggccttgcggacctgggagctggcgggcgttgggaaccgggcttaagctactgaggcgtttgctgatttcgtccatccaggtgttcaggcgcttcgtggaggttggccgggtggcctatgtctcctttggacctcatgccggaaaattggtcgcgattgtagatgttattgatcagaacagggctttggtcgatggaccttgcactcaagtgaggagacaggccatgcctttcaagtgcatgcagctcactgatttcatcctcaagtttccgcacagtgcccaccagaagtatgtccgacaagcctggcagaaggcagacatcaatacaaaatgggcagccacacgatgggccaagaagattgaagccagagaaaggaaagccaagatgacagattttgatcgttttaaagttatgaaggcaaagaaaatgaggaacagaataatcaagaatgaagttaagaagcttcaaaaggcagctctcctgaaagcttctcccaaaaaagcacctggtactaagggtactgctgctgctgctgctgctgctgctgctgctaaagttccagcaaaaaagatcaccgccgcgagtaaaaaggctccagcccagaaggttcctgcccagaaagccacaggccagaaagcagcgcctgctccaaaagctca

SEQ ID NO: 176401 - DNA, 2730 bp, Homo sapiens
  Payload ID: 14633
  Gene Symbol: RPL15
  Gene Name: ribosomal protein L15
  Uniprot ID: P61313
  ENST ID: ENST00000307839
  CDS Start-End: 640-1254
tggaggagcttcacgcagtctggagctgaagggacacagcgagcgccccgacccgcgacgccccgactccgcgaaggcctccctgggaggctggggaagcgtcgggggatctctcagcgcagctctggggcccagatttctgcgcccgtcgtgcggtggccagagagggacagcgcagcgcggagacgcggagacgcagagactccgcagggggagagcccgcggtgcgtgaaacaaacctgttctctcctcagacctcaaagacagcggctccaccgcggtacgcggccaccggctttggagcctggaccccaacttgcctcctctcgcggagagacagtcgccgacgctcgcttagccgccgagacctcgccgccaactctctcacctctcgagacgcccaggccgctcaggctcgaatcttgcggagcagggggcgggacaatagcggccgcggcgccccactcggcagaactccgccaccaggcgcgatgccggaactacatgtcccatgacgctctgggaggccgcagctttccaccggaaagagggtggctgaggtgggggaggagcccaaaaggcattgtgggagtacagctctttcctttccgtctggcggcagccatcaggtaagccaagatgggtgcatacaagtacatccaggagctatggagaaagaagcagtctgatgtcatgcgctttcttctgagggtccgctgctggcagtaccgccagctctctgctctccacagggctccccgccccacccggcctgataaagcgcgccgactgggctacaaggccaagcaaggttacgttatatataggattcgtgttcgccgtggtggccgaaaacgcccagttcctaagggtgcaacttacggcaagcctgtccatcatggtgttaaccagctaaagtttgctcgaagccttcagtccgttgcagaggagcgagctggacgccactgtggggctctgagagtcctgaattcttactgggttggtgaagattccacatacaaattttttgaggttatcctcattgatccattccataaagctatcagaagaaatcctgacacccagtggatcaccaaaccagtccacaagcacagggagatgcgtgggctgacatctgcaggccgaaagagccgtggccttggaaagggccacaagttccaccacactattggtggctctcgccgggcagcttggagaaggcgcaatactctccagctccaccgttaccgctaatataagtaaagtttgtaaaattcatacttaataaacaatttaggacagtcatgtctgcttacaggtgttatttgtctgttaaaactagtctgcagatgtttcttgaatgctttgtcaaattaagaaagttaaagtgcaataatgtttgaagacaataagtggtggtgtatcttgtttctaataagataaacttttttgtctttgctttatcttattagggagttgtatgtcagtgtataaaacatactgtgtggtataacaggcttaataaattctttaaaaggagagaactgaaactagccctgtagatttgtctggtgcatgtgatgaaacctgcagctttatcggagtgatggcaatgctctgctggtttattttcaagtggctgcgttttttttagtttggcaggtgtagactttttaagttgggctttagaaaatctgggttagcctgaagaaaattgcctcagcctccacagtaccattttaaattcacataaaaggtgaaagctcctggttcagtgccatggcttcatggcattcagtgattagtggtaatggtaaacactggtgtgttttgaagttgaatgtgcgataaaattattagccttaagattggtaagctagcaatgaatgctagggtgggaagctggtgagccagtggccattagataaatacctttcaagtgtgagcttagacgtcaaccctaaaatacttaaccgtaatgctaattgtgatcattatgaatcccttcagtcacattagggggaaagtagttggctataagtacgtcattcttagtccagtcagtcttaaaaacatcttgggttacccactctgtccactcccataggctacagaaaaagtcacaagcgcatggtttccaaccatatgtgttttctgcagttatttctcttgttctggccaaacaaccctaaaaatccttaccattccacaaagttggaccatcacttgtgcacccactttgactatgagtataccaccacattgcatttctgtttgcaccatgtcttccaggagactagactactgttgtccagggtcaatttgagtgtaaagaaaatgtagacaaggaattgcccaattttaaattctgactttgctgacttaatttaaatgctcgttctgaaccaattttctcctatcttctctaggggtttcaaaagactcagttaattgatttccaggaagtactcatagcaagttcataaaagttcttgagacctaaatttcttcacaaaaaaagaaaagatcttaagtcatacattttaattgtgtagaggttgttcaactgaaggaataaatgtctattaaactaaaacaaatggaccttctgttattttttgtcatcttacagtgctaatgtactttaaagcaaaccaaatgccctaaccagcaaaaaggcatcaaaatgtgattatagaaataatataatttgagatagcataaaatgta

SEQ ID NO: 176402 - DNA, 820 bp, Homo sapiens
  Payload ID: 14633
  Gene Symbol: RPL15
  Gene Name: ribosomal protein L15
  Uniprot ID: P61313
  ENST ID: ENST00000354811
  CDS Start-End: 156-770
gggctagctgtccccggcagttggtgcagagccattttcattcccggcggtttccttgtttttgttggggaactaagatggacggatacagtcgtcttattgtacttaaagcggatgatatttaatacacagtttgatttcacaggtaagccaagatgggtgcatacaagtacatccaggagctatggagaaagaagcagtctgatgtcatgcgctttcttctgagggtccgctgctggcagtaccgccagctctctgctctccacagggctccccgccccacccggcctgataaagcgcgccgactgggctacaaggccaagcaaggttacgttatatataggattcgtgttcgccgtggtggccgaaaacgcccagttcctaagggtgcaacttacggcaagcctgtccatcatggtgttaaccagctaaagtttgctcgaagccttcagtccgttgcagaggagcgagctggacgccactgtggggctctgagagtcctgaattcttactgggttggtgaagattccacatacaaattttttgaggttatcctcattgatccattccataaagctatcagaagaaatcctgacacccagtggatcaccaaaccagtccacaagcacagggagatgcgtgggctgacatctgcaggccgaaagagccgtggccttggaaagggccacaagttccaccacactattggtggctctcgccgggcagcttggagaaggcgcaatactctccagctccaccgttaccgctaatataagtaaagtttgtaaaattcatacttaataaacaatttaggacagtc

SEQ ID NO: 176403 - DNA, 588 bp, Homo sapiens
  Payload ID: 14633
  Gene Symbol: RPL15
  Gene Name: ribosomal protein L15
  ENST ID: ENST00000422218
  CDS Start-End: 189-588
cccgacccgcgacgccccgactccgcgaaggcctccctgggaggctggggaagcgtcgggggatctctcagcgcagctctggggcccagatttctgcgcccgtcgtgcggtggccagagagggacagcgcagcgcggagacgcggagacgcagagactccgcagggggagagcccgcggtaagccaagatgggtgcatacaagtacatccaggagctatggagaaagaagcagtctgatgtcatgcgctttcttctgagggtccgctgctggcagtaccgccagctctctgctctccacagggctccccgccccacccggcctgataaagcgcgccgactgggctacaaggccaagcaaggttacgttatatataggattcgtgttcgccgtggtggccgaaaacgcccagttcctaagggtgcaacttacggcaagcctgtccatcatggtgttaaccagctaaagtttgctcgaagccttcagtccgttgcagaggagcgagctggacgccactgtggggctctgagagtcctgaattcttactgggttggtgaagattccacatacaaattttttgaggttatcc

SEQ ID NO: 176404 - DNA, 830 bp, Homo sapiens
  Payload ID: 14633
  Gene Symbol: RPL15
  Gene Name: ribosomal protein L15
  Uniprot ID: P61313
  ENST ID: ENST00000415719
  CDS Start-End: 170-784
cctttccgtctggcggcagccatcagcggcatctcctttcaggtcctccttggggacgccgcctgccgcagccacccgcccccttggtgctcagttctggttctgttaattcgccccaccaaaacgtgccgagcaccgctctgtgctggggttgcggaagtaagccaagatgggtgcatacaagtacatccaggagctatggagaaagaagcagtctgatgtcatgcgctttcttctgagggtccgctgctggcagtaccgccagctctctgctctccacagggctccccgccccacccggcctgataaagcgcgccgactgggctacaaggccaagcaaggttacgttatatataggattcgtgttcgccgtggtggccgaaaacgcccagttcctaagggtgcaacttacggcaagcctgtccatcatggtgttaaccagctaaagtttgctcgaagccttcagtccgttgcagaggagcgagctggacgccactgtggggctctgagagtcctgaattcttactgggttggtgaagattccacatacaaattttttgaggttatcctcattgatccattccataaagctatcagaagaaatcctgacacccagtggatcaccaaaccagtccacaagcacagggagatgcgtgggctgacatctgcaggccgaaagagccgtggccttggaaagggccacaagttccaccacactattggtggctctcgccgggcagcttggagaaggcgcaatactctccagctccaccgttaccgctaatataagtaaagtttgtaaaattcatacttaataaacaatttaggac

SEQ ID NO: 176405 - DNA, 1063 bp, Homo sapiens
  Payload ID: 14633
  Gene Symbol: RPL15
  Gene Name: ribosomal protein L15
  Uniprot ID: P61313
  ENST ID: ENST00000435882
  CDS Start-End: 159-773
cctttccgtctggcggcagccatcaggtaggctgcgttgaggatctttgctcttccatccgcctttgatcgtcttcctcttcagccatccaggtccggggaccctgcgtcctcggagataggtctccctcctgtgcggccagagtttggtaagccaagatgggtgcatacaagtacatccaggagctatggagaaagaagcagtctgatgtcatgcgctttcttctgagggtccgctgctggcagtaccgccagctctctgctctccacagggctccccgccccacccggcctgataaagcgcgccgactgggctacaaggccaagcaaggttacgttatatataggattcgtgttcgccgtggtggccgaaaacgcccagttcctaagggtgcaacttacggcaagcctgtccatcatggtgttaaccagctaaagtttgctcgaagccttcagtccgttgcagaggagcgagctggacgccactgtggggctctgagagtcctgaattcttactgggttggtgaagattccacatacaaattttttgaggttatcctcattgatccattccataaagctatcagaagaaatcctgacacccagtggatcaccaaaccagtccacaagcacagggagatgcgtgggctgacatctgcaggccgaaagagccgtggccttggaaagggccacaagttccaccacactattggtggctctcgccgggcagcttggagaaggcgcaatactctccagctccaccgttaccgctaatataagtaaagtttgtaaaattcatacttaataaacaatttaggacagtcatgtctgcttacaggtgttatttgtctgttaaaactagtctgcagatgtttcttgaatgctttgtcaaattaagaaagttaaagtgcaataatgtttgaagacaataagtggtggtgtatcttgtttctaataagataaacttttttgtctttgctttatcttattagggagttgtatgtcagtgtataaaacatactgtgtggtataacaggcttaataaattctttaaaaggagagaa

SEQ ID NO: 176406 - DNA, 2835 bp, Homo sapiens
  Payload ID: 14633
  Gene Symbol: RPL15
  Gene Name: ribosomal protein L15
  Uniprot ID: P61313
  ENST ID: ENST00000456530
  CDS Start-End: 381-818
aaagacagcggctccaccgcggtacgcggccaccggctttggagcctggaccccaacttgcctcctctcgcggagagacagtcgccgacgctcgcttagccgccgagacctcgccgccaactctctcacctctcgagacgcccaggccgctcaggctcgaatcttgcggagcagggggcgggacaatagcggccgcggcgccccactcggcagaactccgccaccaggcgcgatgccggaactacatgtcccatgacgctctgggaggccgcagctttccaccggaaagagggtggctgaggtgggggaggagcccaaaaggcattgtgggagtacagctctttcctttccgtctggcggcagccatcaggtaagccaagatgggtgcatacaagtacatccaggagctatggagaaagaagcagtctgatgtcatgcgctttcttctgagggtccgctgctggcagtaccgccagctctctgctctccacagggctccccgccccacccggcctgataaagcgcgccgactgggctacaaggccaagcaaggttacgttatatataggattcgtgttcgccgtggtggccgaaaacgcccagttcctaagggtgcaacttacggcaagcctgtccatcatggtgttaaccagctaaagtttgctcgaagccttcagtccgttgcagaggagcgagctggacgccactgtggggctctgagagtcctgaattcttactggatggagtctcactctcactcaggtgggagtgcagtggggcaatcacggctcactgcaacctctgtctcccgggtttgagcaattcttctgcctcggcctcccaaatagccaggactacaggcgcacactgccatgcccagctaagttttgtatttttagtagagactgggtttcactatgttggccaggctggtctcgaactcctgacctcaagtgatccacctgccttggcctcccaaagtgctgggattacaggcgtgagccaccacccccagcccaatttttattttttgtacagacaggatctcactatgttgcccaggttggtctcaaactactggcctcaagcaatcctgccttggcctcccaaagtgctggaattataggaatgagccaccacaccgggcccaaatttactttagtaataacaacaattggctgggtgcggtggctcacgcctgcaatcccaacactttcggtaaccaaggtgggcttgagctcatgagttagagagcagcctgagcaacgtggtgagagcccatctcacaaaaaataacaaatcagctgggcatggtgttgcacgcctgtagtctccgaaatcacaccactgcactcccatcttgggtgatagagccagaacttgtctcaaaaataacaattggtttcttacaatcccaaaaggtgcagttactagtattaatccttttttgccaatgaggaaacacaaagatgaagcaacttgctcaaagtcatacagtgacagtctgaattcaaatcctatacacttaaagtttatttgttttgttttggttttttttgagatggagtctcactgtgtcgcaaggctggagtgcagtggcacgatctcagctcactgcaacccgggttcaagcgattctcctgcctcagcctcccgagtagctgggactacaggcacgcaccaccacacccagctaatttttgtatttttagtagagacggtttcaccatgttggccaggatggtctcgagctcctgacctcaggtgatcctcccgccttggcctcccaaagtgccgggattacaggtgtcagccactgcacgtggccaacttaaagtttttgatagataatacattaacgttaaaaattcaaaagataagtataggctctacagtacaaacccttctgcctcctagttcctctccctggaggcaaggtgatcagtttaacaatatttttttattttgagacagggtctcactgttgcccaggctggagtgtagtggcgcgttcacaacttactgtagcctcaacctcctggctcaagcaatcctcccacctcagcctgtcgagtagctggaaccacaggtgcacaccaccatgccaggctaatttttgtattttttgtagagacagggtttcaccatgttgttcaggctggtctcaaagtcctgggctcaagcaatcttcctgtctctgcttcccaaagtgctgggattacagatgtgggccacggtgcctggcctacatatgtattttttccttttcttccccaagtggtaggatatgatacacattgttgatttttttgtttagttatgtatctcagagcttattctttatcagctcatgaggaacttcatttttttttttttttttgagatgtagttttgctcttatagcccaggttggagtacagtaacacaatcttggctcgcagcaacttctgcctcccaggttcaagcgattctcctgcctcagcctccgagtagctaggattacaggtgcctgccactacatccagctatttttgtattttcagtagagacggggtttcaccattttggccaagctggtctcgaactcctgacctcaggtgatccgcccatctcagcctcccaaagtagtgggattacaggcatgagcaaccgtgcccggctggaacttcattcttttggtataactgcatggtatcccatcatgtggatgtaccatgattcattggatgtggaccctcctgatggacatttaaatttcttccaatctgttgctattacaaaaagaaaaatgtgtgcatacatctttattcatctgtagaataaattcttagaagt

SEQ ID NO: 176407 - DNA, 650 bp, Homo sapiens
  Payload ID: 14633
  Gene Symbol: RPL15
  Gene Name: ribosomal protein L15
  ENST ID: ENST00000434031
  CDS Start-End: 128-650
gggcgggacaatagcggccgcggcgccccactcggcagaactccgccaccaggcgcgatgccggaactacatgtcccatgacgctctgggaggccgcagctttccaccggaaagagggtaagccaagatgggtgcatacaagtacatccaggagctatggagaaagaagcagtctgatgtcatgcgctttcttctgagggtccgctgctggcagtaccgccagctctctgctctccacagggctccccgccccacccggcctgataaagcgcgccgactgggctacaaggccaagcaaggttacgttatatataggattcgtgttcgccgtggtggccgaaaacgcccagttcctaagggtgcaacttacggcaagcctgtccatcatggtgttaaccagctaaagtttgctcgaagccttcagtccgttgcagaggagcgagctggacgccactgtggggctctgagagtcctgaattcttactgggttggtgaagattccacatacaaattttttgaggttatcctcattgatccattccataaagctatcagaagaaatcctgacacccagtggatcaccaaaccagtccacaagcacagggagatgcgtgggctgacatctgcaggccgaaagagccgtggccttg

SEQ ID NO: 176408 - DNA, 1990 bp, Homo sapiens
  Payload ID: 14633
  Gene Symbol: RPL15
  Gene Name: ribosomal protein L15
  ENST ID: ENST00000436146
  CDS Start-End: 14-193
caggtaagccaagatgggtgcatacaagtacatccaggagctatggagaaagaagcagtctgatgtcatgcgctttcttctgagggtccgctgctggcagtaccgccagctctctgctctccacagggctccccgccccacccggcctgataaagcgcgccgactgggctacaaggccaagcaaggtacgtgatcgactgcgttacgttatatataggattcgtgttcgccgtggtggccgaaaacgcccagttcctaagggtgcaacttacggcaagcctgtccatcatggtgttaaccagctaaagtttgctcgaagccttcagtccgttgcagaggagcgagctggacgccactgtggggctctgagagtcctgaattcttactgggttggtgaagattccacatacaaattttttgaggttatcctcattgatccattccataaagctatcagaagaaatcctgacacccagtggatcaccaaaccagtccacaagcacagggagatgcgtgggctgacatctgcaggccgaaagagccgtggccttggaaagggccacaagttccaccacactattggtggctctcgccgggcagcttggagaaggcgcaatactctccagctccaccgttaccgctaatataagtaaagtttgtaaaattcatacttaataaacaatttaggacagtcatgtctgcttacaggtgttatttgtctgttaaaactagtctgcagatgtttcttgaatgctttgtcaaattaagaaagttaaagtgcaataatgtttgaagacaataagtggtggtgtatcttgtttctaataagataaacttttttgtctttgctttatcttattagggagttgtatgtcagtgtataaaacatactgtgtggtataacaggcttaataaattctttaaaaggagagaactgaaactagccctgtagatttgtctggtgcatgtgatgaaacctgcagctttatcggagtgatggcaatgctctgctggtttattttcaagtggctgcgttttttttagtttggcaggtgtagactttttaagttgggctttagaaaatctgggttagcctgaagaaaattgcctcagcctccacagtaccattttaaattcacataaaaggtgaaagctcctggttcagtgccatggcttcatggcattcagtgattagtggtaatggtaaacactggtgtgttttgaagttgaatgtgcgataaaattattagccttaagattggtaagctagcaatgaatgctagggtgggaagctggtgagccagtggccattagataaatacctttcaagtgtgagcttagacgtcaaccctaaaatacttaaccgtaatgctaattgtgatcattatgaatcccttcagtcacattagggggaaagtagttggctataagtacgtcattcttagtccagtcagtcttaaaaacatcttgggttacccactctgtccactcccataggctacagaaaaagtcacaagcgcatggtttccaaccatatgtgttttctgcagttatttctcttgttctggccaaacaaccctaaaaatccttaccattccacaaagttggaccatcacttgtgcacccactttgactatgagtataccaccacattgcatttctgtttgcaccatgtcttccaggagactagactactgttgtccagggtcaatttgagtgtaaagaaaatgtagacaaggaattgcccaattttaaattctgactttgctgacttaatttaaatgctcgttctgaaccaattttctcctatcttctctaggggtttcaaaagactcagttaattgatttccaggaagtactcatagcaagttcataaaagttcttgagacctaaatttcttcacaaaaaaagaaaagatcttaagtcatacattttaattgtgtagaggttgttcaactgaaggaataaatgtctattaaactaaaacaaa

SEQ ID NO: 176409 - DNA, 562 bp, Homo sapiens
  Payload ID: 14633
  Gene Symbol: RPL15
  Gene Name: ribosomal protein L15
  ENST ID: ENST00000412097
  CDS Start-End: 38-562
tcctttccgtctggcggcagccatcaggtaagccaagatgggtgcatacaagtacatccaggagctatggagaaagaagcagtctgatgtcatgcgctttcttctgagggtccgctgctggcagtaccgccagctctctgctctccacagggctccccgccccacccggcctgataaagcgcgccgactgggctacaaggccaagcaaggttacgttatatataggattcgtgttcgccgtggtggccgaaaacgcccagttcctaagggtgcaacttacggcaagcctgtccatcatggtgttaaccagctaaagtttgctcgaagccttcagtccgttgcagaggtaaatgctggacgccactgtggggctctgagagtcctgaattcttactgggttggtgaagattccacatacaaattttttgaggttatcctcattgatccattccataaagctatcagaagaaatcctgacacccagtggatcaccaaaccagtccacaagcacagggagatgcgtgggctgacatctgcaggccgaaagagccgtggccttgga

SEQ ID NO: 176410 - DNA, 2053 bp, Homo sapiens
  Payload ID: 14633
  Gene Symbol: RPL15
  Gene Name: ribosomal protein L15
  Uniprot ID: P61313
  ENST ID: ENST00000413699
  CDS Start-End: 120-734
tgggagtacagctctttcctttccgtctggcggcagccatcaggtaggctgcgttgaggatctttgctcttccatccgcctttgatcgtcttcctcttcagccatccaggtaagccaagatgggtgcatacaagtacatccaggagctatggagaaagaagcagtctgatgtcatgcgctttcttctgagggtccgctgctggcagtaccgccagctctctgctctccacagggctccccgccccacccggcctgataaagcgcgccgactgggctacaaggccaagcaaggttacgttatatataggattcgtgttcgccgtggtggccgaaaacgcccagttcctaagggtgcaacttacggcaagcctgtccatcatggtgttaaccagctaaagtttgctcgaagccttcagtccgttgcagaggagcgagctggacgccactgtggggctctgagagtcctgaattcttactgggttggtgaagattccacatacaaattttttgaggttatcctcattgatccattccataaagctatcagaagaaatcctgacacccagtggatcaccaaaccagtccacaagcacagggagatgcgtgggctgacatctgcaggccgaaagagccgtggccttggaaagggccacaagttccaccacactattggtggctctcgccgggcagcttggagaaggcgcaatactctccagctccaccgttaccgctaatataagtaaagtttgtaaaattcatacttaataaacaatttaggacagtcatgtctgcttacaggtgttatttgtctgttaaaactagtctgcagatgtttcttgaatgctttgtcaaattaagaaagttaaagtgcaataatgtttgaagacaataagtggtggtgtatcttgtttctaataagataaacttttttgtctttgctttatcttattagggagttgtatgtcagtgtataaaacatactgtgtggtataacaggcttaataaattctttaaaaggagagaactgaaactagccctgtagatttgtctggtgcatgtgatgaaacctgcagctttatcggagtgatggcaatgctctgctggtttattttcaagtggctgcgttttttttagtttggcaggtgtagactttttaagttgggctttagaaaatctgggttagcctgaagaaaattgcctcagcctccacagtaccattttaaattcacataaaaggtgaaagctcctggttcagtgccatggcttcatggcattcagtgattagtggtaatggtaaacactggtgtgttttgaagttgaatgtgcgataaaattattagccttaagattggtaagctagcaatgaatgctagggtgggaagctggtgagccagtggccattagataaatacctttcaagtgtgagcttagacgtcaaccctaaaatacttaaccgtaatgctaattgtgatcattatgaatcccttcagtcacattagggggaaagtagttggctataagtacgtcattcttagtccagtcagtcttaaaaacatcttgggttacccactctgtccactcccataggctacagaaaaagtcacaagcgcatggtttccaaccatatgtgttttctgcagttatttctcttgttctggccaaacaaccctaaaaatccttaccattccacaaagttggaccatcacttgtgcacccactttgactatgagtataccaccacattgcatttctgtttgcaccatgtcttccaggagactagactactgttgtccagggtcaatttgagtgtaaagaaaatgtagacaaggaattgcccaattttaaattctgactttgctgacttaatttaaatgctcgttctgaaccaattttctcctatcttctctaggggtttcaaaagactcagttaattgatttccaggaagtactcatagcaagttcataaaagttcttgagacctaaatttcttcacaaaaaaagaaaagatcttaagtcatacattttaattgtgtagaggttgttcaactgaagg

SEQ ID NO: 176411 - DNA, 2363 bp, Homo sapiens
  Payload ID: 14633
  Gene Symbol: RPL15
  Gene Name: ribosomal protein L15
  Uniprot ID: P61313
  ENST ID: ENST00000611050
  CDS Start-End: 394-1008
aaagacagcggctccaccgcggtacgcggccaccggctttggagcctggaccccaacttgcctcctctcgcggagagacagtcgccgacgctcgcttagccgccgagacctcgccgccaactctctcacctctcgagacgcccaggccgctcaggctcgaatcttgcggagcagggggcgggacaatagcggccgcggcgccccactcggcagaactccgccaccaggcgcgatgccggaactacatgtcccatgacgctctgggaggccgcagctttccaccggaaagagggtggctgaggtgggggaggagcccaaaaggcattgtgggagtacagctctttcctttccgtctggcggcagccatcagtttgatttcacaggtaagccaagatgggtgcatacaagtacatccaggagctatggagaaagaagcagtctgatgtcatgcgctttcttctgagggtccgctgctggcagtaccgccagctctctgctctccacagggctccccgccccacccggcctgataaagcgcgccgactgggctacaaggccaagcaaggttacgttatatataggattcgtgttcgccgtggtggccgaaaacgcccagttcctaagggtgcaacttacggcaagcctgtccatcatggtgttaaccagctaaagtttgctcgaagccttcagtccgttgcagaggagcgagctggacgccactgtggggctctgagagtcctgaattcttactgggttggtgaagattccacatacaaattttttgaggttatcctcattgatccattccataaagctatcagaagaaatcctgacacccagtggatcaccaaaccagtccacaagcacagggagatgcgtgggctgacatctgcaggccgaaagagccgtggccttggaaagggccacaagttccaccacactattggtggctctcgccgggcagcttggagaaggcgcaatactctccagctccaccgttaccgctaatataagtaaagtttgtaaaattcatacttaataaacaatttaggacagtcatgtctgcttacaggtgttatttgtctgttaaaactagtctgcagatgtttcttgaatgctttgtcaaattaagaaagttaaagtgcaataatgtttgaagacaataagtggtggtgtatcttgtttctaataagataaacttttttgtctttgctttatcttattagggagttgtatgtcagtgtataaaacatactgtgtggtataacaggcttaataaattctttaaaaggagagaactgaaactagccctgtagatttgtctggtgcatgtgatgaaacctgcagctttatcggagtgatggcaatgctctgctggtttattttcaagtggctgcgttttttttagtttggcaggtgtagactttttaagttgggctttagaaaatctgggttagcctgaagaaaattgcctcagcctccacagtaccattttaaattcacataaaaggtgaaagctcctggttcagtgccatggcttcatggcattcagtgattagtggtaatggtaaacactggtgtgttttgaagttgaatgtgcgataaaattattagccttaagattggtaagctagcaatgaatgctagggtgggaagctggtgagccagtggccattagataaatacctttcaagtgtgagcttagacgtcaaccctaaaatacttaaccgtaatgctaattgtgatcattatgaatcccttcagtcacattagggggaaagtagttggctataagtacgtcattcttagtccagtcagtcttaaaaacatcttgggttacccactctgtccactcccataggctacagaaaaagtcacaagcgcatggtttccaaccatatgtgttttctgcagttatttctcttgttctggccaaacaaccctaaaaatccttaccattccacaaagttggaccatcacttgtgcacccactttgactatgagtataccaccacattgcatttctgtttgcaccatgtcttccaggagactagactactgttgtccagggtcaatttgagtgtaaagaaaatgtagacaaggaattgcccaattttaaattctgactttgctgacttaatttaaatgctcgttctgaaccaattttctcctatcttctctaggggtttcaaaagactcagttaattgatttccaggaagtactcatagcaagttcataaaagttcttgagacctaaatttcttcacaaaaaaagaaaagatcttaagtcatacattttaattgtgtagaggttgttcaactgaaggaataaatgtctattaaactaaaacaaatggaccttc

SEQ ID NO: 176412 - DNA, 827 bp, Homo sapiens
  Payload ID: 14634
  Gene Symbol: RPL17
  Gene Name: ribosomal protein L17
  ENST ID: ENST00000580387
  CDS Start-End: 439-827
cgagggcccaatcctcctgccatcgccgccatcctggcttcgggggcgccggcctccaggcccccgggaggagaactcctagggctactaaatcctcgctggaggcggtggcttcttatgcgggaggacgtggcggagggcctgactttgggagccggggtcagtcggcctctgagggttgactggattggtgaggcccgtgtggctacttctgtggaagcagtgctgtagttactggaagataaaagggaaagcaagcccttggtgggggaaagtatggctgcgatgatggcatttcttaggacacctttggattaataatgaaaacaactactctctgagcagctgttcgaatcatctgatatttatactgaatgagttactgtaagtacgtattgacagaattacactgtactttcctctaggtgatctgtgaaaatggttcgctattcacttgacccggagaaccccacgaaatcatgcaaatcaagaggttccaatcttcgtgttcactttaagaacactcgtgaaactgctcaggccatcaagggtatgcatatacgaaaagccacgaagtatctgaaagatgtcactttacagaaacagtgtgtaccattccgacgttacaatggtggagttggcaggtgtgcgcaggccaagcaatggggctggacacaaggtcggtggcccaaaaagagtgctgaatttttgctgcacatgcttaaaaacgcagagagtaatgctgaacttaagggtttagatgtagattctctggtcattgagcatatccaagtgaacaaagcacctaagatgcgccgccggaccta

SEQ ID NO: 176413 - DNA, 790 bp, Homo sapiens
  Payload ID: 14634
  Gene Symbol: RPL17
  Gene Name: ribosomal protein L17
  Uniprot ID: P18621
  ENST ID: ENST00000579248
  CDS Start-End: 201-755
ctgcgttgctccgagggcccaatcctcctgccatcgccgccatcctggcttcgggggcgccggcctccaggcccccgggaggagaactcctagggctactaaatcctcgctggaggcggtggcttcttatgcgggaggacgtggcggagggcctgactttgggagccggggtcagtcggcctctgaggtgatctgtgaaaatggttcgctattcacttgacccggagaaccccacgaaatcatgcaaatcaagaggttccaatcttcgtgttcactttaagaacactcgtgaaactgctcaggccatcaagggtatgcatatacgaaaagccacgaagtatctgaaagatgtcactttacagaaacagtgtgtaccattccgacgttacaatggtggagttggcaggtgtgcgcaggccaagcaatggggctggacacaaggtcggtggcccaaaaagagtgctgaatttttgctgcacatgcttaaaaacgcagagagtaatgctgaacttaagggtttagatgtagattctctggtcattgagcatatccaagtgaacaaagcacctaagatgcgccgccggacctacagagctcatggtcggattaacccatacatgagctctccctgccacattgagatgatccttacggaaaaggaacagattgttcctaaaccagaagaggaggttgcccagaagaaaaagatatcccagaagaaactgaagaaacaaaaacttatggcacgggagtaaattcagcattaaaataaatgtaattaaaaggaaaa

SEQ ID NO: 176414 - DNA, 758 bp, Homo sapiens
  Payload ID: 14634
  Gene Symbol: RPL17
  Gene Name: ribosomal protein L17
  ENST ID: ENST00000583637
  CDS Start-End: 237-758
tggcttcgggggcgccggcctccaggcccccgggaggagaactcctagggctactaaatcctcgctggaggcggtggcttcttatgcgggaggacgtggcggagggcctgactttgggagccgggggttgactggattggtgaggcccgtgtggctacttctgtggaagcagtgctgtagttactggaagataaaagggaaagcaagcccttggtgggggaaagtgatctgtgaaaatggttcgctattcacttgacccggagaaccccacgaaatcatgcaaatcaagaggttccaatcttcgtgttcactttaagaacactcgtgaaactgctcaggccatcaagggtatgcatatacgaaaagccacgaagtatctgaaagatgtcactttacagaaacagtgtgtaccattccgacgttacaatggtggagttggcaggtgtgcgcaggccaagcaatggggctggacacaaggtcggtggcccaaaaagagtgctgaatttttgctgcacatgcttaaaaacgcagagagtaatgctgaacttaagggtttagatgtagattctctggtcattgagcatatccaagtgaacaaagcacctaagatgcgccgccggacctacagagctcatggtcggattaacccatacatgagctctccctgccacattgagatgatccttacggaaaaggaacagattgttcctaaaccagaagaggaggttgcccagaagaaaaagatatcccagaagaaa

SEQ ID NO: 176415 - DNA, 669 bp, Homo sapiens
  Payload ID: 14634
  Gene Symbol: RPL17
  Gene Name: ribosomal protein L17
  Uniprot ID: P18621
  ENST ID: ENST00000580261
  CDS Start-End: 80-634
agaagtcaagttctcatgagttctcccaaaatccaccgctcttcctctttccctaagcagcctgaggtgatctgtgaaaatggttcgctattcacttgacccggagaaccccacgaaatcatgcaaatcaagaggttccaatcttcgtgttcactttaagaacactcgtgaaactgctcaggccatcaagggtatgcatatacgaaaagccacgaagtatctgaaagatgtcactttacagaaacagtgtgtaccattccgacgttacaatggtggagttggcaggtgtgcgcaggccaagcaatggggctggacacaaggtcggtggcccaaaaagagtgctgaatttttgctgcacatgcttaaaaacgcagagagtaatgctgaacttaagggtttagatgtagattctctggtcattgagcatatccaagtgaacaaagcacctaagatgcgccgccggacctacagagctcatggtcggattaacccatacatgagctctccctgccacattgagatgatccttacggaaaaggaacagattgttcctaaaccagaagaggaggttgcccagaagaaaaagatatcccagaagaaactgaagaaacaaaaacttatggcacgggagtaaattcagcattaaaataaatgtaattaaaaggaaaa

SEQ ID NO: 176416 - DNA, 481 bp, Homo sapiens
  Payload ID: 14634
  Gene Symbol: RPL17
  Gene Name: ribosomal protein L17
  ENST ID: ENST00000578528
  CDS Start-End: 314-481
gggcccaatcctcctgccatcgccgccatcctggcttcgggggcgccggcctccaggcccccgggaggagaactcctagggctactaaatcctcgctggaggcggtggcttcttatgcgggaggacgtggcggagggcctgactttgggagccggggtcagtcggcctctgaggtccgcagagggacgtgatgggcgggaatggggactaccgggctcctccactggtgggggcgccggcccgccgtggggtgcgggccgcctggggtccgtgcggactccggaggtccggtgtctagtggtgatctgtgaaaatggttcgctattcacttgacccggagaaccccacgaaatcatgcaaatcaagaggttccaatcttcgtgttcactttaagaacactcgtgaaactgctcaggccatcaagggtatgcatatacgaaaagccacgaagtatctgaaagatgtcactttacagaaacag

SEQ ID NO: 176417 - DNA, 584 bp, Homo sapiens
  Payload ID: 14634
  Gene Symbol: RPL17
  Gene Name: ribosomal protein L17
  Uniprot ID: P18621
  ENST ID: ENST00000581373
  CDS Start-End: 109-549
ctctttccctaagcagcctgaggtgatctgtgaaaatggttcgctattcacttgacccggagaaccccacgaaataacactcgtgaaactgctcaggccatcaagggtatgcatatacgaaaagccacgaagtatctgaaagatgtcactttacagaaacagtgtgtaccattccgacgttacaatggtggagttggcaggtgtgcgcaggccaagcaatggggctggacacaaggtcggtggcccaaaaagagtgctgaatttttgctgcacatgcttaaaaacgcagagagtaatgctgaacttaagggtttagatgtagattctctggtcattgagcatatccaagtgaacaaagcacctaagatgcgccgccggacctacagagctcatggtcggattaacccatacatgagctctccctgccacattgagatgatccttacggaaaaggaacagattgttcctaaaccagaagaggaggttgcccagaagaaaaagatatcccagaagaaactgaagaaacaaaaacttatggcacgggagtaaattcagcattaaaataaatgtaattaaaaggaaaa

SEQ ID NO: 176418 - DNA, 705 bp, Homo sapiens
  Payload ID: 14634
  Gene Symbol: RPL17
  Gene Name: ribosomal protein L17
  ENST ID: ENST00000580210
  CDS Start-End: 180-704
gcccgtgtggctacttctgtggaagcagtgctgtagttactggaagataaaagggaaagcaagcccttggtgggggaaagtatggctgcgatgatggcatttcttaggacacctttggattaataatgaaaacaactactctctgagcagctgttcgaatcatctgatatttatactgaatgagttactcatgcaaatcaagaggttccaatcttcgtgttcactttaagaacactcgtgaaactgctcaggccatcaagggtatgcatatacgaaaagccacgaagtatctgaaagatgtcactttacagaaacagtgtgtaccattccgacgttacaatggtggagttggcaggtgtgcgcaggccaagcaatggggctggacacaaggtcggtggcccaaaaagagtgctgaatttttgctgcacatgcttaaaaacgcagagagtaatgctgaacttaagggtttagatgtagattctctggtcattgagcatatccaagtgaacaaagcacctaagatgcgccgccggacctacagagctcatggtcggattaacccatacatgagctctccctgccacattgagatgatccttacggaaaaggaacagattgttcctaaaccagaagaggaggttgcccagaagaaaaagatatcccagaagaaactgaagaaacaaaaacttatggcacgggagtaaa

SEQ ID NO: 176419 - DNA, 859 bp, Homo sapiens
  Payload ID: 14634
  Gene Symbol: RPL17
  Gene Name: ribosomal protein L17
  Uniprot ID: P18621
  ENST ID: ENST00000579408
  CDS Start-End: 270-824
tccaaagggttgactggattggtgaggcccgtgtggctacttctgtggaagcagtgctgtagttactggaagataaaagggaaagcaagcccttggtgggggaaagtatggctgcgatgatggcatttcttaggacacctttggattaataatgaaaacaactactctctgagcagctgttcgaatcatctgatatttatactgaatgagttactgtaagtacgtattgacagaattacactgtactttcctctaggtgatctgtgaaaatggttcgctattcacttgacccggagaaccccacgaaatcatgcaaatcaagaggttccaatcttcgtgttcactttaagaacactcgtgaaactgctcaggccatcaagggtatgcatatacgaaaagccacgaagtatctgaaagatgtcactttacagaaacagtgtgtaccattccgacgttacaatggtggagttggcaggtgtgcgcaggccaagcaatggggctggacacaaggtcggtggcccaaaaagagtgctgaatttttgctgcacatgcttaaaaacgcagagagtaatgctgaacttaagggtttagatgtagattctctggtcattgagcatatccaagtgaacaaagcacctaagatgcgccgccggacctacagagctcatggtcggattaacccatacatgagctctccctgccacattgagatgatccttacggaaaaggaacagattgttcctaaaccagaagaggaggttgcccagaagaaaaagatatcccagaagaaactgaagaaacaaaaacttatggcacgggagtaaattcagcattaaaataaatgtaattaaaaggaaaa

SEQ ID NO: 176420 - DNA, 684 bp, Homo sapiens
  Payload ID: 14634
  Gene Symbol: RPL17
  Gene Name: ribosomal protein L17
  ENST ID: ENST00000578532
  CDS Start-End: 172-684
gagggcccaatcctcctgccatcgccgccatcctggcttcgggggcgccggcctccaggcccccgggaggagaactcctagggctactaaatcctcgctggaggcggtggcttcttatgcgggaggacgtggcggagggcctgactttgggagccggggtgatctgtgaaaatggttcgctattcacttgacccggagaaccccacgaaatcatgcaaatcaagaggttccaatcttcgtgttcactttaagaacactcgtgaaactgctcaggccatcaagggtatgcatatacgaaaagccacgaagtatctgaaagatgtcactttacagaaacagtgtgtaccattccgacgttacaatggtggagttggcaggtgtgcgcaggccaagcaatggggctggacacaaggtcggtggcccaaaaagagtgctgaatttttgctgcacatgcttaaaaacgcagagagtaatgctgaacttaagggtttagatgtagattctctggtcattgagcatatccaagtgaacaaagcacctaagatgcgccgccggacctacagagctcatggtcggattaacccatacatgagctctccctgccacattgagatgatccttacggaaaaggaacagattgttcctaaaccagaagaggaggttgcccagaagaaaaagatatcc

SEQ ID NO: 176421 - DNA, 576 bp, Homo sapiens
  Payload ID: 14634
  Gene Symbol: RPL17
  Gene Name: ribosomal protein L17
  ENST ID: ENST00000583036
  CDS Start-End: 163-576
atgagttctcccaaaatccaccgctcttcctctttccctaagcagcctgagggttgactggattggtgaggcccgtgtggctacttctgtggaagcagtgctgtagttactggaagataaaagggaaagcaagcccttggtgggggaaagtgatctgtgaaaatggttcgctattcacttgacccggagaaccccacgaaatcatgcaaatcaagaggttccaatcttcgtgttcactttaagaacactcgtgaaactgctcaggccatcaagggtatgcatatacgaaaagccacgaagtatctgaaagatgtcactttacagaaacagtgtgtaccattccgacgttacaatggtggagttggcaggtgtgcgcaggccaagcaatggggctggacacaaggtcggtggcccaaaaagagtgctgaatttttgctgcacatgcttaaaaacgcagagagtaatgctgaacttaagggtttagatgtagattctctggtcattgagcatatccaagtgaacaaagcacctaagatgcgccgccggacctacagagctcatggtcggattaaccca

SEQ ID NO: 176422 - DNA, 650 bp, Homo sapiens
  Payload ID: 14634
  Gene Symbol: RPL17
  Gene Name: ribosomal protein L17
  ENST ID: ENST00000615760
  CDS Start-End: 256-650
gcccaatcctcctgccatcgccgccatcctggcttcgggggcgccggcctccaggcccccgggaggagaactcctagggctactaaatcctcgctggaggcggtggcttcttatgcgggaggacgtggcggagggcctgactttgggagccgggggttgactggattggtgaggcccgtgtggctacttctgtggaagcagtgctgtagttactggaagataaaagggaaagcaagcccttggtgatctgtgaaaatggttcgctattcacttgacccggagaaccccacgaaatcatgcaaatcaagaggttccaatcttcgtgttcactttaagaacactcgtgaaactgctcaggccatcaagggtatgcatatacgaaaagccacgaagtatctgaaagatgtcactttacagaaacagtgtgtaccattccgacgttacaatggtggagttggcaggtgtgcgcaggccaagcaatggggctggacacaaggtcggtggcccaaaaagagtgctgaatttttgctgcacatgcttaaaaacgcagagagtaatgctgaacttaagggtttagatgtagattctctggtcattgagcatatccaagtgaacaaagcacctaagatgcgccgccggacctacagagc

SEQ ID NO: 176423 - DNA, 856 bp, Homo sapiens
  Payload ID: 14634
  Gene Symbol: RPL17
  Gene Name: ribosomal protein L17
  Uniprot ID: P18621
  ENST ID: ENST00000618613
  CDS Start-End: 264-818
gccgccatcctggcttcgggggcgccggcctccaggcccccgggaggagaactcctagggctactaaatcctcgctggaggcggtggcttcttatgcgggaggacgtggcggagggcctgactttgggagccggggtcagtcggcctctgagggttgactggattggtgaggcccgtgtggctacttctgtggaagcagtgctgtagttactggaagataaaagggaaagcaagcccttggtgggggaaagtgatctgtgaaaatggttcgctattcacttgacccggagaaccccacgaaatcatgcaaatcaagaggttccaatcttcgtgttcactttaagaacactcgtgaaactgctcaggccatcaagggtatgcatatacgaaaagccacgaagtatctgaaagatgtcactttacagaaacagtgtgtaccattccgacgttacaatggtggagttggcaggtgtgcgcaggccaagcaatggggctggacacaaggtcggtggcccaaaaagagtgctgaatttttgctgcacatgcttaaaaacgcagagagtaatgctgaacttaagggtttagatgtagattctctggtcattgagcatatccaagtgaacaaagcacctaagatgcgccgccggacctacagagctcatggtcggattaacccatacatgagctctccctgccacattgagatgatccttacggaaaaggaacagattgttcctaaaccagaagaggaggttgcccagaagaaaaagatatcccagaagaaactgaagaaacaaaaacttatggcacgggagtaaattcagcattaaaataaatgtaattaaaaggaaaagaa

SEQ ID NO: 176424 - DNA, 795 bp, Homo sapiens
  Payload ID: 14634
  Gene Symbol: RPL17
  Gene Name: ribosomal protein L17
  ENST ID: ENST00000617346
  CDS Start-End: 289-795
cttcctctttccctaagcagcctgagggttgactggattggtgaggcccgtgtggctacttctgtggaagcagtgctgtagttactggaagataaaagggaaagcaagcccttggtgggggaaagtatggctgcgatgatggcatttcttaggacacctttggattaataatgaaaacaactactctctgagcagctgttcgaatcatctgatatttatactgaatgagttactgtaagtacgtattgacagaattacactgtactttcctctaggtgatctgtgaaaatggttcgctattcacttgacccggagaaccccacgaaatcatgcaaatcaagaggttccaatcttcgtgttcactttaagaacactcgtgaaactgctcaggccatcaagggtatgcatatacgaaaagccacgaagtatctgaaagatgtcactttacagaaacagtgtgtaccattccgacgttacaatggtggagttggcaggtgtgcgcaggccaagcaatggggctggacacaaggtcggtggcccaaaaagagtgctgaatttttgctgcacatgcttaaaaacgcagagagtaatgctgaacttaagggtttagatgtagattctctggtcattgagcatatccaagtgaacaaagcacctaagatgcgccgccggacctacagagctcatggtcggattaacccatacatgagctctccctgccacattgagatgatccttacggaaaaggaacagattgttcctaaaccagaagaggaggttgcccagaagaaaaag

SEQ ID NO: 176425 - DNA, 586 bp, Homo sapiens
  Payload ID: 14634
  Gene Symbol: RPL17
  Gene Name: ribosomal protein L17
  ENST ID: ENST00000615479
  CDS Start-End: 294-586
cgtggcggagggcctgactttgggagccgggggttgactggattggtgaggcccgtgtggctacttctgtggaagcagtgctgtagttactggaagataaaagggaaagcaagcccttggtgggggaaagtatggctgcgatgatggcatttcttaggacacctttggattaataatgaaaacaactactctctgagcagctgttcgaatcatctgatatttatactgaatgagttactgtaagtacgtattgacagaattacactgtactttcctctaggtgatctgtgaaaatggttcgctattcacttgacccggagaaccccacgaaatcatgcaaatcaagaggttccaatcttcgtgttcactttaagaacactcgtgaaactgctcaggccatcaagggtatgcatatacgaaaagccacgaagtatctgaaagatgtcactttacagaaacagtgtgtaccattccgacgttacaatggtggagttggcaggtgtgcgcaggccaagcaatggggctggacacaaggtcggtggcccaaaaagagtgctgaatttttgctgcacatgcttaaaaacgc

SEQ ID NO: 176426 - DNA, 747 bp, Homo sapiens
  Payload ID: 14634
  Gene Symbol: RPL17
  Gene Name: ribosomal protein L17
  Uniprot ID: P18621
  ENST ID: ENST00000618619
  CDS Start-End: 127-681
ttcctctttccctaagcagcctgagggttgactggattggtgaggcccgtgtggctacttctgtggaagcagtgctgtagttactggaagataaaagggaaagcaagcccttggtgatctgtgaaaatggttcgctattcacttgacccggagaaccccacgaaatcatgcaaatcaagaggttccaatcttcgtgttcactttaagaacactcgtgaaactgctcaggccatcaagggtatgcatatacgaaaagccacgaagtatctgaaagatgtcactttacagaaacagtgtgtaccattccgacgttacaatggtggagttggcaggtgtgcgcaggccaagcaatggggctggacacaaggtcggtggcccaaaaagagtgctgaatttttgctgcacatgcttaaaaacgcagagagtaatgctgaacttaagggtttagatgtagattctctggtcattgagcatatccaagtgaacaaagcacctaagatgcgccgccggacctacagagctcatggtcggattaacccatacatgagctctccctgccacattgagatgatccttacggaaaaggaacagattgttcctaaaccagaagaggaggttgcccagaagaaaaagatatcccagaagaaactgaagaaacaaaaacttatggcacgggagtaaattcagcattaaaataaatgtaattaaaaggaaaagaatgttggttgtctttattagtgaacatat

SEQ ID NO: 176427 - DNA, 612 bp, Homo sapiens
  Payload ID: 14635
  Gene Symbol: RPL18
  Gene Name: ribosomal protein L18
  ENST ID: ENST00000084795
  CDS Start-End: 1-571
cccacagggagtggacatccgccataacaaggaccgaaaggttcggcgcaaggagcccaagagccaggatatctacctgaggctgttggtcaagttatacaggtttctggccagaagaaccaactccacattcaaccaggttgtgttgaagaggttgtttatgagtcgcaccaaccggccgcctctgtccctttcccggatgatccggaagatgaagcttcctggccgggaaaacaagacggccgtggttgtggggaccataactgatgatgtgcgggttcaggaggtacccaaactgaaggtatgtgcactgcgcgtgaccagccgggcccgcagccgcatcctcagggcagggggcaagatcctcactttcgaccagctggccctggactcccctaagggctgtggcactgtcctgctctccggtcctcgcaagggccgagaggtgtaccggcatttcggcaaggccccaggaaccccgcacagccacaccaaaccctacgtccgctccaagggccggaagttcgagcgtgccagaggccgacgggccagccgaggctacaaaaactaaccctggatcctactctcttattaaaaagatttttgctgaca

SEQ ID NO: 176428 - DNA, 541 bp, Homo sapiens
  Payload ID: 14635
  Gene Symbol: RPL18
  Gene Name: ribosomal protein L18
  ENST ID: ENST00000546623
  CDS Start-End: 1-502
ggtcaagttatacaggtttctggccagaagaaccaactccacattcaaccaggttgtgttgaagaggttgtttatgagtcgcaccaaccggccgcctctgtccctttcccggatgatccggaagatgaagcttcctggccgggaaaacaagacggccgtggttgtggggaccataactgatgatgtgcgggttcaggaggtacccaaactgaagccttgtcctctccaccaggtatgtgcactgcgcgtgaccagccgggcccgcagccgcatcctcagggcagggggcaagatcctcactttcgaccagctggccctggactcccctaagggctgtggcactgtcctgctctccggtcctcgcaagggccgagaggtgtaccggcatttcggcaaggccccaggaaccccgcacagccacaccaaaccctacgtccgctccaagggccggaagttcgagcgtgccagaggccgacgggccagccgaggctacaaaaactaaccctggatcctactctcttattaaaaagatttttgctga

SEQ ID NO: 176429 - DNA, 1004 bp, Homo sapiens
  Payload ID: 14635
  Gene Symbol: RPL18
  Gene Name: ribosomal protein L18
  Uniprot ID: Q07020
  ENST ID: ENST00000549920
  CDS Start-End: 394-960
actgggcccgccgggtcctccgggagccactgagaggccgtcggcgtcgggccagagcgtcaccgcgcgacgcatcgtgctagctacacgcatctcgctcccagatccctttcttccggaaagctatcgagaacacggcctgggtagggccagagaggcccccgacgtgctggcccttccctcttggacgttgcgcttgttcctgcgctctatgctctctgccgttatcgcccggctagtcagtcgtccaactcaccacagagaagtccggatcgtggtagagcgccgcgtcgcacccatgtgacgtcacggcggcgccactcgcttgaggctttccccgcccaccccagcccgttctctctttccggacctggccgagcaggaggcgccatcatgggagtggacatccgccataacaaggaccgaaaggttcggcgcaaggagcccaagagccaggatatctacctgaggctgttggtcaagttatacaggtttctggccagaagaaccaactccacattcaaccaggttgtgttgaagaggttgtttatgagtcgcaccaaccggccgcctctgtccctttcccggatgatccggaagatgaagcttcctggccgggaaaacaagacggccgtggttgtggggaccataactgatgatgtgcgggttcaggaggtacccaaactgaaggtatgtgcactgcgcgtgaccagccgggcccgcagccgcatcctcagggcagggggcaagatcctcactttcgaccagctggccctggactcccctaagggctgtggcactgtcctgctctccggtcctcgcaagggccgagaggtgtaccggcatttcggcaaggccccaggaaccccgcacagccacaccaaaccctacgtccgctccaagggccggaagttcgagcgtgccagaggccgacgggccagccgaggctacaaaaactaaccctggatcctactctcttattaaaaagatttttgctgacagtg

SEQ ID NO: 176430 - DNA, 1111 bp, Homo sapiens
  Payload ID: 14635
  Gene Symbol: RPL18
  Gene Name: ribosomal protein L18
  ENST ID: ENST00000550973
  CDS Start-End: 722-1111
gcggcgttcggggctggataatccgctgccatccgccgtggttttgggctaggggcacgctggagggcggcagggggtctgcggctgcccggagggagcaattcccgatactggggacctactctgggggccaggaaagcagggatgggtcagtcatagcctaccgcccccacttagtagatgaccaagtggaggtactcggaggctgatatgactgggtttacaaagccaggaagtggcagagccaggattccgacccaggtggctggacccgcagccactcttagttatttggctttgctgcctttatctggacctgtcactttctagtatgaaaagtcgggttcgatgggggccgcggcgggtgagaggatcgagagccgaataactggatttggggaccaggcaggtctctgagtctcaggccccttcccaccttgtgatggtttttgagcctttgccccagtgtctggctgttcgttgggtacacagtaatctcatctgacaagtttgtgaatttgggaagaaataattcacaggagatgctcatcacggggttttgcacacaggagtggacatccgccataacaaggaccgaaaggttcggcgcaaggagcccaagagccaggatatctacctgaggctgttggtcaagttatacaggtttctggccagaagaaccaactccacattcaaccaggttgtgttgaagaggttgtttatgagtcgcaccaaccggccgcctctgtccctttcccggatgatccggaagatgaagcttcctggccgggaaaacaagacggccgtggttgtggggaccataactgatgatgtgcgggttcaggaggtacccaaactgaaggtatgtgcactgcgcgtgaccagccgggcccgcagccgcatcctcagggcagggggcaagatcctcactttcgaccagctggccctggactcccctaagggctgtggcactgtcctgctctccggtcctcgcaagggccgagaggtgtaccggcatttcggcaaggccccaggaaccccgcacagccacaccaaaccctacgtccgctccaagggccggaagttcgagcgtgccagaggccgacgggcc

SEQ ID NO: 176431 - DNA, 463 bp, Homo sapiens
  Payload ID: 14635
  Gene Symbol: RPL18
  Gene Name: ribosomal protein L18
  ENST ID: ENST00000550645
  CDS Start-End: 21-422
gccgagcaggaggcgccatcatgggagtggacatccgccataacaaggaccgaaaggttcggcgcaaggagcccaagagccaggatatctacctgaggctgttggtcaagttatacaggtttctggccagaagaaccaactccacattcaaccaggttgtgttgaagaggttgtttatgagtcgcaccaaccggccgcctctgtccctttcccggatgatccggaagatgaagcttcctggccgggaaaacaagacggccgtggttgtggggaccataactgatgatgtgcgggttcaggaggtacccaaactgaaggccccaggaaccccgcacagccacaccaaaccctacgtccgctccaagggccggaagttcgagcgtgccagaggccgacgggccagccgaggctacaaaaactaaccctggatcctactctcttattaaaaagatttttgctgaca

SEQ ID NO: 176432 - DNA, 628 bp, Homo sapiens
  Payload ID: 14635
  Gene Symbol: RPL18
  Gene Name: ribosomal protein L18
  ENST ID: ENST00000549370
  CDS Start-End: 34-288
ctttccggacctggccgagcaggaggcgccatcatgggagtggacatccgccataacaaggaccgaaaggttcggcgcaaggagcccaagagccaggatatctacctgaggctgttggtcaaggtttctggccagaagaaccaactccacattcaaccaggttgtgttgaagaggttgtttatgagtcgcaccaaccggccgcctctgtccctttcccggatgatccggaagatgaagcttcctggccgggaaaacaagacggccgtggttgtggggaccataactgatgatgtgcgggttcaggaggtacccaaactgaaggtatgtgcactgcgcgtgaccagccgggcccgcagccgcatcctcagggcagggggcaagatcctcactttcgaccagctggccctggactcccctaagggctgtggcactgtcctgctctccggtcctcgcaagggccgagaggtgtaccggcatttcggcaaggccccaggaaccccgcacagccacaccaaaccctacgtccgctccaagggccggaagttcgagcgtgccagaggccgacgggccagccgaggctacaaaaactaaccctggatcctactctcttattaaaaagatttttgc

SEQ ID NO: 176433 - DNA, 559 bp, Homo sapiens
  Payload ID: 14635
  Gene Symbol: RPL18
  Gene Name: ribosomal protein L18
  Uniprot ID: Q07020
  ENST ID: ENST00000552588
  CDS Start-End: 39-518
tctctctttccggacctggccgagcaggaggcgccatcatgttatacaggtttctggccagaagaaccaactccacattcaaccaggttgtgttgaagaggttgtttatgagtcgcaccaaccggccgcctctgtccctttcccggatgatccggaagatgaagcttcctggccgggaaaacaagacggccgtggttgtggggaccataactgatgatgtgcgggttcaggaggtacccaaactgaaggtatgtgcactgcgcgtgaccagccgggcccgcagccgcatcctcagggcagggggcaagatcctcactttcgaccagctggccctggactcccctaagggctgtggcactgtcctgctctccggtcctcgcaagggccgagaggtgtaccggcatttcggcaaggccccaggaaccccgcacagccacaccaaaccctacgtccgctccaagggccggaagttcgagcgtgccagaggccgacgggccagccgaggctacaaaaactaaccctggatcctactctcttattaaaaagatttttgctgaca

SEQ ID NO: 176434 - DNA, 1036 bp, Homo sapiens
  Payload ID: 14635
  Gene Symbol: RPL18
  Gene Name: ribosomal protein L18
  ENST ID: ENST00000549273
  CDS Start-End: 35-529
tctttccggacctggccgagcaggaggcgccatcatgggagtggacatccgccataacaaggaccgaaaggttcggcgcaaggagcccaagagccaggatatctacctgaggctgttggtcaagttatacaggtttctggccagaagaaccaactccacattcaaccaggttgtgttgaagaggttgtttatgagtcgcaccaaccggccgcctctgtccctttcccggatgatccggaagatgaagcttcctggccgggaaaacaagacggccgtggttgtggggaccataactgatgatgtgcgggttcaggaggtacccaaactgaaggtatgtgcactgcgcgtgaccagccgggcccgcagccgcatcctcagggcagggggcaagatcctcactttcgaccagctggccctggactcccctaagggctgtggcactgtcctgctctccggtcctcgcaagggccgagaggtgtaccggcatttcggcaaggccccaggaaccccgcacagccacaccaagtgagtatcaggcccccagccctgccctctccccagactcagcctgcagggccaggcctggccacacttgggctgcttctcctatccctcgtaccagccagccccaggccttctggaactctcagctgcctcatcctgcctgcttttcccttcaacactgcttggagctgtgttttccagggcctgagcaggcatctcctggggagcatgcagttcaccggcctttgccagcccaggctgggaccctccaggtggtggggcaggtgcttccatagcccctcctggctccttggcttcccactctgccaagcttttccagcagcattgactctcctggggctgaatgtgacaggcttgtggtgttcctgtgccactccacaatggcctcctttaagagggcccccctctcactccctcctctccccacagaccctacgtccgctccaagggccggaagttcgagcgtgccagaggccgacgggccagccgaggctacaaaaactaaccctgg

SEQ ID NO: 176435 - DNA, 440 bp, Homo sapiens
  Payload ID: 14635
  Gene Symbol: RPL18
  Gene Name: ribosomal protein L18
  ENST ID: ENST00000547897
  CDS Start-End: 26-440
acctggccgagcaggaggcgccatcatgggagtggacatccgccataacaaggaccgaaaggttcggcgcaaggagcccaagagccaggatatctacctgaggctgttggtcaagttatacaggtttctggccagaagaaccaactccacattcaaccaggttgtgttgaagaggttgtttatgagtcgcaccaaccggccgcctctgtccctttcccggatgatccggaagatgaagcttcctggccgggaaaacaagacggccgtggttgtggggaccataactgatgatgtgcgggttcaggaggtacccaaactgaagaccctacgtccgctccaagggccggaagttcgagcgtgccagaggccgacgggccagccgaggctacaaaaactaaccctggatcctactctcttattaaaaagatttttgctgacag

SEQ ID NO: 176436 - DNA, 665 bp, Homo sapiens
  Payload ID: 14636
  Gene Symbol: RPL18A
  Gene Name: ribosomal protein L18a
  Uniprot ID: Q02543
  ENST ID: ENST00000222247
  CDS Start-End: 82-612
ccggtagtgaaggcctggtgaacggctgcgcgacagaggacacttccttttgcgggtggcggcgaacgcggagagcacgccatgaaggcctcgggcacgctacgagagtacaaggtagtgggtcgctgcctgcccacccccaaatgccacacgccgcccctctaccgcatgcgaatctttgcgcctaatcatgtcgtcgccaagtcccgcttctggtactttgtatctcagttaaagaagatgaagaagtcttcaggggagattgtctactgtgggcaggtgtttgagaagtcccccctgcgggtgaagaacttcgggatctggctgcgctatgactcccggagcggcacccacaacatgtaccgggaataccgggacctgaccaccgcaggcgctgtcacccagtgctaccgagacatgggtgcccggcaccgcgcccgagcccactccattcagatcatgaaggtggaggagatcgcggccagcaagtgccgccggccggctgtcaagcagttccacgactccaagatcaagttcccgctgccccaccgggtcctgcgccgtcagcacaagccacgcttcaccaccaagaggcccaacaccttcttctaggtgcagggccctcgtccgggtgtgccccaaataaactcaggaacgccccggtg

SEQ ID NO: 176437 - DNA, 491 bp, Homo sapiens
  Payload ID: 14636
  Gene Symbol: RPL18A
  Gene Name: ribosomal protein L18a
  ENST ID: ENST00000599898
  CDS Start-End: 26-439
tggcggcgaacgcggagagcacgccatgaaggcctcgggcacgctacgagagtacaagttaaagaagatgaagaagtcttcaggggagattgtctactgtgggcaggtgtttgagaagtcccccctgcgggtgaagaacttcgggatctggctgcgctatgactcccggagcggcacccacaacatgtaccgggaataccgggacctgaccaccgcaggcgctgtcacccagtgctaccgagacatgggtgcccggcaccgcgcccgagcccactccattcagatcatgaaggtggaggagatcgcggccagcaagtgccgccggccggctgtcaagcagttccacgactccaagatcaagttcccgctgccccaccgggtcctgcgccgtcagcacaagccacgcttcaccaccaagaggcccaacaccttcttctaggtgcagggccctcgtccgggtgtgccccaaataaactcaggaacgccccggt

SEQ ID NO: 176438 - DNA, 1391 bp, Homo sapiens
  Payload ID: 14636
  Gene Symbol: RPL18A
  Gene Name: ribosomal protein L18a
  ENST ID: ENST00000600147
  CDS Start-End: 37-501
ccttttgcgggtggcggcgaacgcggagagcacgccatgaaggcctcgggcacgctacgagagtacaaggtagtgggtcgctgcctgcccacccccaaatgccacacgccgcccctctaccgcatgcgaatctttgcgcctaatcatgtcgtcgccaagtcccgcttctggtactttgtatctcagttaaagaagatgaagaagtcttcaggggagattgtctactgtgggcaggtgtttgagaagtcccccctgcgggtgaagaacttcgggatctggctgcgctatgactcccggagcggcacccacaacatgtaccgggaataccgggacctgaccaccgcaggcgctgtcacccagtgctaccgagacatgggtgcccggcaccgcgcccgagcccactccattcagatcatgaaggtggaggagatcgcggccagcaagtgccgccggccgcacaagccacgcttcaccaccaagaggcccaacaccttcttctaggtgcagggccctcgtccgggtgtgccccaaataaactcaggaacgccccggtgctcgccgcatgttttctttgcacactgcagagctcaaaggggtgctatgagaggccggcccagtcagctcctggggtgcagctgagctgccatttctttgtcctgggaggggtcttcagtgcaaacaaacaaaccctcacatcctcctgtcctggagtgggccctccaggcgcccccacccctgagctccctcttgcttggtcagttctcagccctgctggcagccctgggctatgagctgcaggggtactgtctgtcctgggccctaaatctgtcccaactgccttgtgagacacaggcctcccaggctcccctgctgagtctggaccagggagaatctccctagatagtggggttggcgttcactccctggggattctcctaagtctctggttcccaaagttttcagagtagacacaagtgggcacccgaggggcgctctctgctgcttgggggctgtttccctttcactggttgggggcctcttagatgacgccctcatcttgcccaaggaggtcaaggactcaccacaggtactcatctctgggaaactgcctcaggcctggaaaattccaggcatgacactaatcccaccctggctgagtccttctgtcaggtggaggctaagctggcattggagaagtttgagacacagccaagagctcaggctctgggagcctcccatcctttgttgcgtgaccttgggcagccctgttctgggccagcggcccttctggggcttgctgtcttgatctcaacatcgggttccacattgatgtgggaagtgacgctgtgcaggtgctggggtcagcctatggggccctcctttgtcccaga

SEQ ID NO: 176439 - DNA, 1084 bp, Homo sapiens
  Payload ID: 14636
  Gene Symbol: RPL18A
  Gene Name: ribosomal protein L18a
  ENST ID: ENST00000599870
  CDS Start-End: 600-1043
ggattgcagttgggaaaacggaggcagccgcagctcgcgtggcaacagtgcagggatcccagggctggggagagacctgaggtcttgtcctagttctgcctggaatgggctgtgagatcccatgctggtcactgggcctcagggtgaaagaagatgttggctggatgttttgaggtgcagagtggctgtttgacggcgactgcaaagcaattcaggactgcagcatgaagaaaggaggctgtgggtctaagccacagctttcctggtctgaaacccttagcccaggcaaaggagaggcaggcaactcaattaatcctccctggagacctccctctcctcagttcattttgtgtataaagttgtggtcgggagtgtgacctacagtcaccaagaatccacatggaggccctagggtggccctgcctcctgcttcccgaatctgtggtcactagatgtaggaaagggagtgaggtggatctccacagttgcctctgggtgctggccttaccctcactcctgtttcctttcagctacgagagtacaaggtagtgggtcgctgcctgcccacccccaaatgccacacgccgcccctctaccgcatgcgaatctttgcgcctaatcatgtcgtcgccaagtcccgcttctggtactttgtatctcagttaaagaagatgaagaagtcttcaggggagattgtctactgtgggcaggtgtttgagaagtcccccctgcgggtgaagaacttcgggatctggctgcgctatgactcccggagcggcacccacaacatgtaccgggaataccgggacctgaccaccgcaggcgctgtcacccagtgctaccgagacatgggtgcccggcaccgcgcccgagcccactccattcagatcatgaaggtggaggagatcgcggccagcaagtgccgccggccggctgtcaagcagttccacgactccaagatcaagttcccgctgccccaccgggtcctgcgccgtcagcacaagccacgcttcaccaccaagaggcccaacaccttcttctaggtgcagggccctcgtccgggtgtgccccaaataaactcagg

SEQ ID NO: 176440 - DNA, 683 bp, Homo sapiens
  Payload ID: 14636
  Gene Symbol: RPL18A
  Gene Name: ribosomal protein L18a
  ENST ID: ENST00000597648
  CDS Start-End: 260-683
ggcggccatcgtgggagccgcgtggagagagcgatgcgtgacctgggccagctcagggatcgcgggggcccaaggactccgggtcttcttcccgggggaaggaataagtcgcgcagcatagaggccctagccccggcacctcgtcgagccgccaagtttctgttttcctttctgcaacgtggacgtggcgctacgagagtacaaggtagtgggtcgctgcctgcccacccccaaatgccacacgccgcccctctaccgcatgcgaatctttgcgcctaatcatgtcgtcgccaagtcccgcttctggtactttgtatctcagttaaagaagatgaagaagtcttcaggggagattgtctactgtgggcaggtgtttgagaagtcccccctgcgggtgaagaacttcgggatctggctgcgctatgactcccggagcggcacccacaacatgtaccgggaataccgggacctgaccaccgcaggcgctgtcacccagtgctaccgagacatgggtgcccggcaccgcgcccgagcccactccattcagatcatgaaggtggaggagatcgcggccagcaagtgccgccggccggctgtcaagcagttccacgactccaagatcaagttcccgctgccccaccgggtcctgcgccgtcagcacaagccacgcttcaccaccaaga

SEQ ID NO: 176441 - DNA, 732 bp, Homo sapiens
  Payload ID: 14637
  Gene Symbol: RPL19
  Gene Name: ribosomal protein L19
  Uniprot ID: P84098
  ENST ID: ENST00000225430
  CDS Start-End: 63-653
gcagataatgggaggagccgggcccgagcgagctctttcctttcgctgctgcggccgcagccatgagtatgctcaggcttcagaagaggctcgcctctagtgtcctccgctgtggcaagaagaaggtctggttagaccccaatgagaccaatgaaatcgccaatgccaactcccgtcagcagatccggaagctcatcaaagatgggctgatcatccgcaagcctgtgacggtccattcccgggctcgatgccggaaaaacaccttggcccgccggaagggcaggcacatgggcataggtaagcggaagggtacagccaatgcccgaatgccagagaaggtcacatggatgaggagaatgaggattttgcgccggctgctcagaagataccgtgaatctaagaagatcgatcgccacatgtatcacagcctgtacctgaaggtgaaggggaatgtgttcaaaaacaagcggattctcatggaacacatccacaagctgaaggcagacaaggcccgcaagaagctcctggctgaccaggctgaggcccgcaggtctaagaccaaggaagcacgcaagcgccgtgaagagcgcctccaggccaagaaggaggagatcatcaagactttatccaaggaggaagagaccaagaaataaaacctcccactttgtctgtacatactggcctctgtgattacatagatcagccattaaaataaaacaagccttaatctgc

SEQ ID NO: 176442 - DNA, 792 bp, Homo sapiens
  Payload ID: 14637
  Gene Symbol: RPL19
  Gene Name: ribosomal protein L19
  ENST ID: ENST00000582193
  CDS Start-End: 136-720
atgaggtgagggcgagctggtctccatcaggcgctgacgcgtgtcgacaagggactgtcggtcttgggaccgcagctggggttgggggagatgaaatggaggccgccctaaagcggccggtcccggggtttgggtatgctcaggcttcagaagaggctcgcctctagtgtcctccgctgtggcaagaagaaggtctggttagaccccaatgagaccaatgaaatcgccaatgccaactcccgtcagcagatccggaagctcatcaaagatgggctgatcatccgcaagcctgtgacggtccattcccgggctcgatgccggaaaaacaccttggcccgccggaagggcaggcacatgggcataggtaagcggaagggtacagccaatgcccgaatgccagagaaggtcacatggatgaggagaatgaggattttgcgccggctgctcagaagataccgtgaatctaagaagatcgatcgccacatgtatcacagcctgtacctgaaggtgaaggggaatgtgttcaaaaacaagcggattctcatggaacacatccacaagctgaaggcagacaaggcccgcaagaagctcctggctgaccaggctgaggcccgcaggtctaagaccaaggaagcacgcaagcgccgtgaagagcgcctccaggccaagaaggaggagatcatcaagactttatccaaggaggaagagaccaagaaataaaacctcccactttgtctgtacatactggcctctgtgattacatagatcagccattaaaataaaacaagcctt

SEQ ID NO: 176443 - DNA, 402 bp, Homo sapiens
  Payload ID: 14637
  Gene Symbol: RPL19
  Gene Name: ribosomal protein L19
  ENST ID: ENST00000585199
  CDS Start-End: 17-402
caaagggcaggtcttgatggggacgttcattcttgcccaggattggctttcagagtctaatcatgttttctgtgtgtctagtatgctcaggcttcagaagaggctcgcctctagtgtcctccgctgtggcaagaagaaggtctggttagaccccaatgagaccaatgaaatcgccaatgccaactcccgtcagcagatccggaagctcatcaaagatgggctgatcatccgcaagcctgtgacggtccattcccgggctcgatgccggaaaaacaccttggcccgccggaagggcaggcacatgggcataggtaagcggaagggtacagccaatgcccgaatgccagagaaggtcacatggatgaggagaatgaggattttgcgccggctgctcagaagata

SEQ ID NO: 176444 - DNA, 690 bp, Homo sapiens
  Payload ID: 14637
  Gene Symbol: RPL19
  Gene Name: ribosomal protein L19
  ENST ID: ENST00000579374
  CDS Start-End: 30-611
tctttcctttcgctgctgcggccgcagccatgaggcttcagaagaggctcgcctctagtgtcctccgctgtggcaagaagaaggtctggttagaccccaatgagaccaatgaaatcgccaatgccaactcccgtcagcagatccggaagctcatcaaagatgggctgatcatccgcaagcctgtgacggtccattcccgggctcgatgccggaaaaacaccttggcccgccggaagggcaggcacatgggcataggtaagcggaagggtacagccaatgcccgaatgccagagaaggtcacatggatgaggagaatgaggattttgcgccggctgctcagaagataccgtgaatctaagaagatcgatcgccacatgtatcacagcctgtacctgaaggtgaaggggaatgtgttcaaaaacaagcggattctcatggaacacatccacaagctgaaggcagacaaggcccgcaagaagctcctggctgaccaggctgaggcccgcaggtctaagaccaaggaagcacgcaagcgccgtgaagagcgcctccaggccaagaaggaggagatcatcaagactttatccaaggaggaagagaccaagaaataaaacctcccactttgtctgtacatactggcctctgtgattacatagatcagccattaaaataaaacaagccttaatctgc

SEQ ID NO: 176445 - DNA, 1051 bp, Homo sapiens
  Payload ID: 14637
  Gene Symbol: RPL19
  Gene Name: ribosomal protein L19
  ENST ID: ENST00000579260
  CDS Start-End: 404-988
gccatgaggtgagggcgagctggtctccatcaggcgctgacgcgtgtcgacaagggactgtcggtcttgggaccgcagctggggttgggggagatgaaatggaggccgccctaaagcggccggtcccggggtttggggtaggccggagcactttcgtcccgggcctccggagtgagggggggcggggagcgtcgcagcaactgagaccaggaaaagtctgccccggctggtgccgcaccgcacacgtgtccggtcgacccacgcgagcagagcaaacggagcgaacaagaccaagccgtgggccctttcttgcttggcacacccggagcggagccgatctctgctttcacgtgatgtagggcaagcctagtgtaggccccaggcctccgactgccgagagagtatgctcaggcttcagaagaggctcgcctctagtgtcctccgctgtggcaagaagaaggtctggttagaccccaatgagaccaatgaaatcgccaatgccaactcccgtcagcagatccggaagctcatcaaagatgggctgatcatccgcaagcctgtgacggtccattcccgggctcgatgccggaaaaacaccttggcccgccggaagggcaggcacatgggcataggtaagcggaagggtacagccaatgcccgaatgccagagaaggtcacatggatgaggagaatgaggattttgcgccggctgctcagaagataccgtgaatctaagaagatcgatcgccacatgtatcacagcctgtacctgaaggtgaaggggaatgtgttcaaaaacaagcggattctcatggaacacatccacaagctgaaggcagacaaggcccgcaagaagctcctggctgaccaggctgaggcccgcaggtctaagaccaaggaagcacgcaagcgccgtgaagagcgcctccaggccaagaaggaggagatcatcaagactttatccaaggaggaagagaccaagaaataaaacctcccactttgtctgtacatactggcctctgtgattacatagatcagccattaaaataaa

SEQ ID NO: 176446 - DNA, 815 bp, Homo sapiens
  Payload ID: 14638
  Gene Symbol: RPL21
  Gene Name: ribosomal protein L21
  Uniprot ID: P46778
  ENST ID: ENST00000311549
  CDS Start-End: 290-772
gacgacggcgtcctcttgatcgcccttgaaggcccctttccgggctgtctgacacgatgcaagtgtcagcttgtgttggccggttgcctttctttcgcaagaggggaaaatatcctcacagactttctgtgttctcagagacgatcttcttccctagaaagaagtcgcttacggttggcgtttccctcaggcagcgccgtgggcagcccacaggcccttgtaaggcgcgcgccgcggccccgcctctttcctttcggccggaaccgccatcttccagtaattcgccaaaatgacgaacacaaagggaaagaggagaggcacccgatatatgttctctaggccttttagaaaacatggagttgttcctttggccacatatatgcgaatctataagaaaggtgatattgtagacatcaagggaatgggtactgttcaaaaaggaatgccccacaagtgttaccatggcaaaactggaagagtctacaatgttacccagcatgctgttggcattgttgtaaacaaacaagttaagggcaagattcttgccaagagaattaatgtgcgtattgagcacattaagcactctaagagccgagatagcttcctgaaacgtgtgaaggaaaatgatcagaaaaagaaagaagccaaagagaaaggtacctgggttcaactaaagcgccagcctgctccacccagagaagcacactttgtgagaaccaatgggaaggagcctgagctgctggaacctattccctatgaattcatggcataataggtgttaaaaaaaaaaataaaggacctctgggctacaaaaa

SEQ ID NO: 176447 - DNA, 616 bp, Homo sapiens
  Payload ID: 14638
  Gene Symbol: RPL21
  Gene Name: ribosomal protein L21
  Uniprot ID: P46778
  ENST ID: ENST00000272274
  CDS Start-End: 91-573
cttccaggtagggcctacgcgtggctcccgggcgctaggtgttcgacagacttgaaccgcgaccttgtggcctcagagtaattcgccaaaatgacgaacacaaagggaaagaggagaggcacccgatatatgttctctaggccttttagaaaacatggagttgttcctttggccacatatatgcgaatctataagaaaggtgatattgtagacatcaagggaatgggtactgttcaaaaaggaatgccccacaagtgttaccatggcaaaactggaagagtctacaatgttacccagcatgctgttggcattgttgtaaacaaacaagttaagggcaagattcttgccaagagaattaatgtgcgtattgagcacattaagcactctaagagccgagatagcttcctgaaacgtgtgaaggaaaatgatcagaaaaagaaagaagccaaagagaaaggtacctgggttcaactaaagcgccagcctgctccacccagagaagcacactttgtgagaaccaatgggaaggagcctgagctgctggaacctattccctatgaattcatggcataataggtgttaaaaaaaaaaataaaggacctctgggctacaaaaa

SEQ ID NO: 176448 - DNA, 641 bp, Homo sapiens
  Payload ID: 14638
  Gene Symbol: RPL21
  Gene Name: ribosomal protein L21
  Uniprot ID: P46778
  ENST ID: ENST00000326092
  CDS Start-End: 116-598
gcgtggctcccgggcgctaggtgttcgacagacttgaaccgcgaccttgtggcctcagaggtcgttcattgggaccgtggggagactctctaacctgtttgagtaattcgccaaaatgacgaacacaaagggaaagaggagaggcacccgatatatgttctctaggccttttagaaaacatggagttgttcctttggccacatatatgcgaatctataagaaaggtgatattgtagacatcaagggaatgggtactgttcaaaaaggaatgccccacaagtgttaccatggcaaaactggaagagtctacaatgttacccagcatgctgttggcattgttgtaaacaaacaagttaagggcaagattcttgccaagagaattaatgtgcgtattgagcacattaagcactctaagagccgagatagcttcctgaaacgtgtgaaggaaaatgatcagaaaaagaaagaagccaaagagaaaggtacctgggttcaactaaagcgccagcctgctccacccagagaagcacactttgtgagaaccaatgggaaggagcctgagctgctggaacctattccctatgaattcatggcataataggtgttaaaaaaaaaaataaaggacctctgggctacaaaaa

SEQ ID NO: 176449 - DNA, 806 bp, Homo sapiens
  Payload ID: 14638
  Gene Symbol: RPL21
  Gene Name: ribosomal protein L21
  Uniprot ID: P46778
  ENST ID: ENST00000319826
  CDS Start-End: 281-763
caggtagggcctacgcgtggctcccgggcgctaggtgttcgacagacttgaaccgcgaccttgtggcctcagaggtcgttcattgggaccgtggggagactctctaacctgtttgaggtccattggcatgggcgggttaaaccatgttctgccagacggggagcagcgtgcgccgggtcgggtctgggccgtgggctgagaaccggactgcgatgttgcggccctgcggggggacatttgcgagaaagacgagactgagtcgcttgggtaattcgccaaaatgacgaacacaaagggaaagaggagaggcacccgatatatgttctctaggccttttagaaaacatggagttgttcctttggccacatatatgcgaatctataagaaaggtgatattgtagacatcaagggaatgggtactgttcaaaaaggaatgccccacaagtgttaccatggcaaaactggaagagtctacaatgttacccagcatgctgttggcattgttgtaaacaaacaagttaagggcaagattcttgccaagagaattaatgtgcgtattgagcacattaagcactctaagagccgagatagcttcctgaaacgtgtgaaggaaaatgatcagaaaaagaaagaagccaaagagaaaggtacctgggttcaactaaagcgccagcctgctccacccagagaagcacactttgtgagaaccaatgggaaggagcctgagctgctggaacctattccctatgaattcatggcataataggtgttaaaaaaaaaaataaaggacctctgggctacaaaaa

SEQ ID NO: 176450 - DNA, 681 bp, Homo sapiens
  Payload ID: 14638
  Gene Symbol: RPL21
  Gene Name: ribosomal protein L21
  ENST ID: ENST00000461690
  CDS Start-End: 38-301
ttcggccggaaccgccatcttccagtaattcgccaaaatgacgaacacaaagggaaagaggagaggcacccgatatatgttctctaggccttttagaaaacatggagttgttcctttggccacatatatgcgaatctataagaaaggtgatattgtagacatcaagggaatgggtactgttcaaaaaggaatgccccacaagtgttaccatggcaaaactggaagagtctacaatgttacccagcatgctgttggcattgttgtaaacaaacaagggcaagattcttgccaagagaattaatgtgcgtattgagcacattaagcactctaagagccgagatagcttcctgaaacgtgtgaaggaaaatgatcagaaaaagaaagaagccaaagagaaaggtacctgggttcaactaaagcgccagcctgctccacccagagaagcacactttgtgagaaccaatgggaaggagcctgagctgctggaacctattccctatgaattcatggcataataggtgttaaaaaaaaaaataaaggacctctgggctacaaaaatgtttctcttcattgagtagaagtgtggtgtcctctcccccaaagaaatatttaaagcaaattttggttgtgtcctaattcattatgtaatgtccttgctattcaaatttaatgtatttcttg

SEQ ID NO: 176451 - DNA, 438 bp, Homo sapiens
  Payload ID: 14638
  Gene Symbol: RPL21
  Gene Name: ribosomal protein L21
  ENST ID: ENST00000493317
  CDS Start-End: 73-438
ggggtttggggcaaatgccagttttcagtcgtatttgactgttctgctttctggtttcagtaattcgccaaaatgacgaacacaaagggaaagaggagaggcacccgatatatgttctctaggccttttagaaaacatggagttgttcctttggccacatatatgcgaatctataagaaaggtgatattgtagacatcaagggaatgggtactgttcaaaaaggaatgccccacaagtgttaccatggcaaaactggaagagtctacaatgttacccagcatgctgttggcattgttgtaaacaaacaagttaagggcaagattcttgccaagagaattaatgtgcgtattgagcacattaagcactctaagagccgagatagcttcctgaaacgtgtgaaggaaaatgatcagaaaaagaaagaagccaaagagaaa

SEQ ID NO: 176452 - DNA, 453 bp, Homo sapiens
  Payload ID: 14638
  Gene Symbol: RPL21
  Gene Name: ribosomal protein L21
  ENST ID: ENST00000483765
  CDS Start-End: 13-192
taattcgccaaaatgacgaacacaaagggaaagaggagaggcacccgatatatgttctctaggccttttagaaaacatgggaatgggtactgttcaaaaaggaatgccccacaagtgttaccatggcaaaactggaagagtctacaatgttacccagcatgctgttggcattgttgtaaacaaacaagttaagggcaagattcttgccaagagaattaatgtgcgtattgagcacattaagcactctaagagccgagatagcttcctgaaacgtgtgaaggaaaatgatcagaaaaagaaagaagccaaagagaaaggtacctgggttcaactaaagcgccagcctgctccacccagagaagcacactttgtgagaaccaatgggaaggagcctgagctgctggaacctattccctatgaattcatggcataataggtgttaaaaaaaaaaat

SEQ ID NO: 176453 - DNA, 2078 bp, Homo sapiens
  Payload ID: 14639
  Gene Symbol: RPL22
  Gene Name: ribosomal protein L22
  Uniprot ID: P35268
  ENST ID: ENST00000234875
  CDS Start-End: 40-426
cgtagttcgctcacctccctttctaactccgctgccgccatggctcctgtgaaaaagcttgtggtgaaggggggcaaaaaaaagaagcaagttctgaagttcactcttgattgcacccaccctgtagaagatggaatcatggatgctgccaattttgagcagtttttgcaagaaaggatcaaagtgaacggaaaagctgggaaccttggtggaggggtggtgaccatcgaaaggagcaagagcaagatcaccgtgacatccgaggtgcctttctccaaaaggtatttgaaatatctcaccaaaaaatatttgaagaagaataatctacgtgactggttgcgcgtagttgctaacagcaaagagagttacgaattacgttacttccagattaaccaggacgaagaagaggaggaagacgaggattaaatttcatttatctggaaaattttgtatgagttcttgaataaaacttgggaaccaaaatggtggtttatccttgtatctctgcagtgtggattgaacagaaaattggaaatcatagtcaaagggcttcccttggttcgccactcatttatttgtaacttgacttctttttttttctgcttaaaaatttcaattctcgtggtaataccagagtagaaggagagggtgactttaccgaactgacagccattggggaggcagatgcgggtgtggaggtgtgggctgaaggtagtgactgtttgattttaaaaagtgtgactgtcagttgtatctgttgcttttctcaatgattcagggatacaaatgggcttctctcattcattaaaagaaaacgcgacatctttctaagattctctgtgggaaaatgactgtcaataaaatgcgggtttctgggccattcgtcttactttcattttttgattacaaatttctcttgacgcacacaattatgtctgctaatcctcttcttcctagagagagaaactgtgctccttcagtgttgctgccataaaggggtttggggaatcgattgtaaaagtcccaggttctaaattaactaaatgtgtacagaaatgaacgtgtaagtaatgtttctacaggtctttgcaacaaactgtcactttcgtctccagcagagggagctgtaggaatagtgcttccagatgtggtctcccgtgtggggcccagcaatgggggcccctgatgccaagagctctggaggttcttgaaagaggggacacgaaggaggagtgactgggaagcctcccatgccaaggaggtgggaggtgccctggaaatagctgcctcatgccacttaggccatgactggatttaatgtcagtggtgtgccacagtgcagaggctagacaactgaaaggggctaccaaggctgggaaaaaaatgcaattgttgctgtgagtgactttgaaagactctggtgccttgtggtgcccttctgaaattcaaacagtaatgcaaaagtgtctgcattagaatttacggtgtctaaaattcatgtttttaaaagagcttgcctacagatggtttccacacttgaaattgtgccctgcgagttgcatagctggaagttcaatgctcagtcctaccttggctcccattaaacatttggtgctctgtggattgagttgaacgtgttgaggctttgcaatttcacttgtgttaaaggctctggcatttttccatttctatgcaaatttctttgaagcagaattgcttgcatatttcttctctgccgtcacagaaagcagagtttctttcaaacttcactgaggcatcagttgctctttggcaatgtcccttaaccatgattattaactaagtttgtggcttgagtttacaaattctacttgttgcattgatgttcccatgtagtaagtcatttttagtttggttgtgaaaaaaccctgggctgaagttggcatttcagttaaaagaaaaaaagaaactagtcccagatttgaaaacttgtaataaaattgaaactcactggttttctatgtctttttgaactcttgtaatcgagttttgatcatattttctattaaagtggctaacacctggctactcttactgta

SEQ ID NO: 176454 - DNA, 806 bp, Homo sapiens
  Payload ID: 14639
  Gene Symbol: RPL22
  Gene Name: ribosomal protein L22
  ENST ID: ENST00000465335
  CDS Start-End: 664-806
cgcgatcgccgccgcgcggccccgcgcgccaggcccctgcgctcaccagcaccgcctgctccagccgctcgcagccctgcacgtaagccgattccaggtccacgcagtgtgcccggctctccctgcagaaggcggcgggtgaggcccgctccagcggcccccagccccctcccctcgcgtcccctgtacgcacttctgcatgtcgcggaagcagcggatgcacaacagcaacttcttgtcggtggagaacaagaggcacttggcgctctgatatacccactttacagaggagggcactgcggctcagaggctggaatgttccaactgccacctccaggataaagaagcaagagtggatgacaccagacaggacaggagcaagcaggaagcaaagccccctattgatagagccaaaccgggatcagctggaaagcagaagtgtttgcagaggcccagcctgatcattatagagccaagaacagcagctggctttggagcttggtcaaccggcttgaggcctgagttgaaagctagacccatcagcacagtctcttctggtgattggacttttgctagaaaaagcttgtggtgaaggggggcaaaaaaaagaagcaagttctgaagttcactcttgattgcacccaccctgtagaagatggaatcatggatgctgccaattttgagcagtttttgcaagaaaggatcaaagtgaacggaaaagctgggaaccttggtggaggggtggtgaccatcgaaaggagcaagagcaagatcaccgtgacatccgaggtgcctttctccaaaag

SEQ ID NO: 176455 - DNA, 449 bp, Homo sapiens
  Payload ID: 14639
  Gene Symbol: RPL22
  Gene Name: ribosomal protein L22
  ENST ID: ENST00000484532
  CDS Start-End: 89-250
gaaaaagcttgtggtgaaggggggcaaaaaaaagaagcaagttctgaagttcactcttgattgcacccaccctgtagaagatggaatcatggatgctgccaattttgagcagtttttgcaagaaaggatcaaagtgaacggaaaagctgggaaccttggtggaggggtggtgaccatcgaaaggagcaagagcaagatcaccgtgacatccgaggtgcctttctccaaaaggcggccagcactgggctgacccggcttctctatctacagcgtagttaaagcggatctgggagatggaggggttcccaacaccccagtctttggttccagaaggctggaccgacctctccttgcccagggatgaatgcagagggtcttttgtttggggtttgctggcaataaaattgaacgggaagaagggaaactgctgccgatcctgcgtgtctcag

SEQ ID NO: 176456 - DNA, 508 bp, Homo sapiens
  Payload ID: 14639
  Gene Symbol: RPL22
  Gene Name: ribosomal protein L22
  ENST ID: ENST00000465387
  CDS Start-End: 272-508
ggctccgcgtgaggcctcggctccaggggaggcacgtgggcctcgccgagcccggcatctacccaggctcgctggggacggcgccctgcagcgtcctgctggggtgggctggcaggtcggccggagcgggccagagcccctgccgatcccagcacgttgtaggcggaggaggccgcggcccgagaaaaagcttgtggtgaaggggggcaaaaaaaagaagcaagttctgaagttcactcttgattgcacccaccctgtagaagatggaatcatggatgctgccaattttgagcagtttttgcaagaaaggatcaaagtgaacggaaaagctgggaaccttggtggaggggtggtgaccatcgaaaggagcaagagcaagatcaccgtgacatccgaggtgcctttctccaaaaggtatttgaaatatctcaccaaaaaatatttgaagaagaataatctacgtgactggttgcgcgtagttgctaacagcaaagagagttacgaatta

SEQ ID NO: 176457 - DNA, 524 bp, Homo sapiens
  Payload ID: 14639
  Gene Symbol: RPL22
  Gene Name: ribosomal protein L22
  ENST ID: ENST00000471204
  CDS Start-End: 257-524
ccgctccagcggcccccagccccctcccctcgcgtcccctgtacgcacttctgcatgtcgcggaagcagcggatgcacaacagcaacttcttgtcggtggagaacaagaggcacttggcgctctgatatacccactttacagaggagggcactgcggctcagaggctggaaaaagcttgtggtgaaggggggcaaaaaaaagaagcaagttctgaagttcactcttgattgcacccaccctgtagaagatggaatcatggatgctgccaattttgagcagtttttgcaagaaaggatcaaagtgaacggaaaagctgggaaccttggtggaggggtggtgaccatcgaaaggagcaagagcaagatcaccgtgacatccgaggtgcctttctccaaaaggtatttgaaatatctcaccaaaaaatatttgaagaagaataatctacgtgactggttgcgcgtagttgctaacagcaaagagagttacgaattacgttacttccagattaaccaggacgaagaag

SEQ ID NO: 176458 - DNA, 600 bp, Homo sapiens
  Payload ID: 14639
  Gene Symbol: RPL22
  Gene Name: ribosomal protein L22
  ENST ID: ENST00000462296
  CDS Start-End: 455-600
attaactcatttaatctggagaacactcttaaaaagtagaaaatattaccccagaaagtggtggagctggtatacaaaaccgcgtaggtgctttgttaaggaatgatgcattagtttcccggtaggaggataaagaagcaagagtggatgacaccagacaggacaggagcaagcaggaagcaaagccccctattgatagagccaaaccgggatcagctggaaagcagaagtgtttgcagaggcccagcctgatcattatagagccaagaacagcagctggctttggagcttggtcaaccggcttgaggcctgagttgaaagctagacccatcagcacagtctcttctggtgattggacttttgctagaaaaagcttgtggtgaaggggggcaaaaaaaagaagcaagttctgaagttcactcttgattgcacccaccctgtagaagatggaatcatggatgctgccaattttgagcagtttttgcaagaaaggatcaaagtgaacggaaaagctgggaaccttggtggaggggtggtgaccatcgaaaggagcaagagcaagatcaccgtgacatccgaggtgcctttctccaaaaggta

SEQ ID NO: 176459 - DNA, 786 bp, Homo sapiens
  Payload ID: 14639
  Gene Symbol: RPL22
  Gene Name: ribosomal protein L22
  ENST ID: ENST00000497965
  CDS Start-End: 442-729
gctctgctagggctggtgtctctgaggagaaaacgaggctggttctgcaaatgttggaataagtgcagactggattccactgctgcttccagaatgttccaactgccacctccaggataaagaagcaagagtggatgacaccagacaggacaggagcaagcaggaagcaaagccccctattgatagagccaaaccgggatcagctggaaagcagaagtgtttgcagaggcccagcctgatcattatagagccaagaacagcagctggctttggagcttggtcaaccggcttgaggcctgagttgaaagctagacccatcagcacagtctcttctggtgattggacttttgctagaaaaagcttgtggtgaaggggggcaaaaaaaagaagcaagttctgaagttcactcttgattgcacccaccctgtagaagatggaatcatggatgctgccaattttgagcagtttttgcaagaaaggatcaaagtgaacggaaaagctgggaaccttggtggaggggtggtgaccatcgaaaggagcaagagcaagatcaccgtgacatccgaggtgcctttctccaaaaggtatttgaaatatctcaccaaaaaatatttgaagaagaataatctacgtgactggttgcgcgtagttgctaacagcaaagagagttacgaattacgttacttccagattaaccaggacgaagaagaggaggaagacgaggattaaatttcatttatctggaaaattttgtatgagttcttgaataaaacttgggaaccaaaa

SEQ ID NO: 176460 - DNA, 2190 bp, Homo sapiens
  Payload ID: 14640
  Gene Symbol: RPL22L1
  Gene Name: ribosomal protein L22-like 1
  Uniprot ID: Q6P5R6
  ENST ID: ENST00000295830
  CDS Start-End: 317-685
ctcgcgtgcgtccgtatccgggagcagccactaggtaactgtagaggccactgcaattaatcggcttgaacagccaggagcggaaacccgagagtcagttcaaccacagccacccgcgtgtgcccgcggaaagccgatggcctactctcgtccggcagcgcactggtttcctgggttaccggcctcagcgctcctcccgctttcttttccgggaggcgacaatctgacgctctcagcgcgtgacgcagcacgctttgatataaatgcagaccgcgcggccgtagcttcctctctgctctcgcggccgactcgcaagatggcgccgcagaaagacaggaagcccaagaggtcaacctggaggtttaatttggaccttactcatccagtagaagatggaatttttgattctggaaattttgagcaatttctacgggagaaggttaaagtcaatggcaaaactggaaatctcgggaatgttgttcacattgaacgcttcaagaataaaatcacagttgtttctgagaaacagttctctaaaaggtatttgaaataccttaccaagaaataccttaagaagaacaatcttcgtgattggcttcgagtggttgcatctgacaaggagacctacgaacttcgttacttccagattagtcaagatgaagatgaatcagagtcggaggactaggcaaaggctccccttacagggctttgcttattaataaaataaatgaagtatacatgagaaataccaagaaattggcttttagtttatcagtgaataaaaaatattatactcttgaacttttgtctcatttttttgagtatgctgtttatatgattttgatttccctctgataactatcaacagtatttaaatagcttatagctggtataattttttcccacgatttccaaaatcttttatgtactcaggtaaaagtagcgttatataggaaatcttttttttagacactctcgttctgtcacccaggctggagtgcagtgactcagcttcctaaatagctggaattacaggtgtgagccaccatgcccggctaattttttgtacttttagtagagtagggtttggccatgttggccaggctggtttcaaactcctgacctcaagtgatctacccacctcggcttcccaaagtgctgattatagctgtgaaccaccatgcccggccaggaaatcttactgtagaacaattttttatatagctgtataaaatgtatatgattgtcttgacagtctcaaatactgtttttaatagcttgtaaatgtaatctcaagtgcttagaacagttcttacatataagttgctctgtagtttgctcttatagttagcccaaagactctgggtgtgaggcctgctgtaaaccaatgttaaactgcttattagaaagccctaaccacctgctttgtaggcaccagaaactcaaaaccaaatctcaactcagctacagaatctactgtggtccttgtctgaaaaaattagttcactcggttggaatcttgtctcagagcatcctcatctctttctcaaaagcccctaccccaacaccggcgtgttggttgtctattgaaacttacaagtggatggaccctttctcccgaataaactggcctttgaaagctctaatcgaaatggtttggcaaaatccatactgcaggagattagggaggacaagaatgatgtgcctttttgtactgctgagcctgatggtggtgccactacttcaggtacttagatgagtcttgatgctaatagaattgtgtcgccaaacatatctggacagttacaacctaatctatgcattaattggtttgggaattgcttgaaattattgtttaattcaatgttttaattcgttttcctaaaaatttaagtgcccccatcatcgtgcaatacctcagtgcagcaactccttgattcttggatgactgaacttcctaacttggctctgccccattgttcccatttttcatgtttttcacaaatagttaaccaggtacctactactgtgcaccgctgcagagcattgaggatgtatgtgatgagtaaaaacacccagcctgctctgctgtgttagtattatgacggaaactgatcaaatcacatgtgaacaaatttactgctacaaaagggagggcttaataaaaggaatttcatctgggaaggcaaa

SEQ ID NO: 176461 - DNA, 581 bp, Homo sapiens
  Payload ID: 14640
  Gene Symbol: RPL22L1
  Gene Name: ribosomal protein L22-like 1
  ENST ID: ENST00000475836
  CDS Start-End: 29-223
ctctctgctctcgcggccgactcgcaagatggcgccgcagaaagacaggaagcccaagaggtcaacctggaggtttaatttggaccttactcatccagtagaagatggaatttttgattctggaaattttggtaccttccctagtgaatatctagggttctcttccctagttttgcattttttctgttttaaaataggagcaatttctacgggagaaggttaaagtcaatggcaaaactggaaatctcgggaatgttgttcacattgaacgcttcaagaataaaatcacagttgtttctgagaaacagttctctaaaaggtatttgaaataccttaccaagaaataccttaagaagaacaatcttcgtgattggcttcgagtggttgcatctgacaaggagacctacgaacttcgttacttccagattagtcaagatgaagatgaatcagagtcggaggactaggcaaaggctccccttacagggctttgcttattaataaaataaatgaagtatacatgagaaataccaagaaattggcttttagtttatcagtgaataaaaaatattatactcttgaac

SEQ ID NO: 176462 - DNA, 506 bp, Homo sapiens
  Payload ID: 14640
  Gene Symbol: RPL22L1
  Gene Name: ribosomal protein L22-like 1
  ENST ID: ENST00000463836
  CDS Start-End: 29-394
ctctctgctctcgcggccgactcgcaagatggcgccgaaagacaggaagcccaagaggtcaacctggaggtttaatttggaccttactcatccagtagaagatggaatttttgattctggaaattttgagcaatttctacgggagaaggttaaagtcaatggcaaaactggaaatctcgggaatgttgttcacattgaacgcttcaagaataaaatcacagttgtttctgagaaacagttctctaaaaggtatttgaaataccttaccaagaaataccttaagaagaacaatcttcgtgattggcttcgagtggttgcatctgacaaggagacctacgaacttcgttacttccagattagtcaagatgaagatgaatcagagtcggaggactaggcaaaggctccccttacagggctttgcttattaataaaataaatgaagtatacatgagaaataccaagaaattggcttttagtttatcagtgaataaaaaatattatactct

SEQ ID NO: 176463 - DNA, 545 bp, Homo sapiens
  Payload ID: 14640
  Gene Symbol: RPL22L1
  Gene Name: ribosomal protein L22-like 1
  ENST ID: ENST00000466674
  CDS Start-End: 1-429
ggtcagaaacacaaccaagacgcgaggatcctgaactgtttttcgagactccctggcagctgccatgagcagaaagacaggaagcccaagaggtcaacctggaggtttaatttggaccttactcatccagtagaagatggaatttttgattctggaaattttgagcaatttctacgggagaaggttaaagtcaatggcaaaactggaaatctcgggaatgttgttcacattgaacgcttcaagaataaaatcacagttgtttctgagaaacagttctctaaaaggtatttgaaataccttaccaagaaataccttaagaagaacaatcttcgtgattggcttcgagtggttgcatctgacaaggagacctacgaacttcgttacttccagattagtcaagatgaagatgaatcagagtcggaggactaggcaaaggctccccttacagggctttgcttattaataaaataaatgaagtatacatgagaaataccaagaaattggcttttagtttatcagtgaataaaaaatattatactcttgaa

SEQ ID NO: 176464 - DNA, 587 bp, Homo sapiens
  Payload ID: 14640
  Gene Symbol: RPL22L1
  Gene Name: ribosomal protein L22-like 1
  ENST ID: ENST00000494771
  CDS Start-End: 42-233
cggccgtagcttcctctctgctctcgcggccgactcgcaagatggcgccgaaagacaggaagcccaagaggtcaacctggaggtttaatttggaccttactcatccagtagaagatggaatttttgattctggaaattttggtaccttccctagtgaatatctagggttctcttccctagttttgcattttttctgttttaaaataggagcaatttctacgggagaaggttaaagtcaatggcaaaactggaaatctcgggaatgttgttcacattgaacgcttcaagaataaaatcacagttgtttctgagaaacagttctctaaaaggtatttgaaataccttaccaagaaataccttaagaagaacaatcttcgtgattggcttcgagtggttgcatctgacaaggagacctacgaacttcgttacttccagattagtcaagatgaagatgaatcagagtcggaggactaggcaaaggctccccttacagggctttgcttattaataaaataaatgaagtatacatgagaaataccaagaaattggcttttagtttatcagtgaataaaaaatattatactctt

SEQ ID NO: 176465 - DNA, 392 bp, Homo sapiens
  Payload ID: 14641
  Gene Symbol: RPL23
  Gene Name: ribosomal protein L23
  ENST ID: ENST00000378096
  CDS Start-End: 118-392
gtggccctaggcagctggggcgctttgctctccttcaggccggagagagagagccaggccaccgcgagagcactgccagggccctcgaaagtggcagtggggtgctggagagttgagatggcaggatcccgacgtgaatgtagacgtggtgggtcctctggtgcgaaattccggatttccttgggtcttccggtaggagctgtaatcaattgtgctgacaacacaggagccaaaaacctgtatatcatctccgtgaaggggatcaagggacggctgaacagacttcccgctgctggtgtgggtgacatggtgatggccacagtcaagaaaggcaaaccagagctcagaaaaaaggtacatccagcagtggtcattcgacaacgaaagtcata

SEQ ID NO: 176466 - DNA, 625 bp, Homo sapiens
  Payload ID: 14641
  Gene Symbol: RPL23
  Gene Name: ribosomal protein L23
  Uniprot ID: P62829
  ENST ID: ENST00000394332
  CDS Start-End: 13-435
ccggcgttcaagatgtcgaagcgaggacgtggtgggtcctctggtgcgaaattccggatttccttgggtcttccggtaggagctgtaatcaattgtgctgacaacacaggagccaaaaacctgtatatcatctccgtgaaggggatcaagggacggctgaacagacttcccgctgctggtgtgggtgacatggtgatggccacagtcaagaaaggcaaaccagagctcagaaaaaaggtacatccagcagtggtcattcgacaacgaaagtcataccgtagaaaagatggcgtgtttctttattttgaagataatgcaggagtcatagtgaacaataaaggcgagatgaaaggttctgccattacaggaccagtagcaaaggagtgtgcagacttgtggccccggattgcatccaatgctggcagcattgcatgattctccagtatatttgctggagtgcagtaacaccactgaagctcactgtaactttgaactgctggacttggaatcctcctgctgtggccttcaaagggctgcaattacaagtgtgagccactgcatcccacctcacattttattctttggagattttttttgacttggattaaaaaactttatatttaca

SEQ ID NO: 176467 - DNA, 444 bp, Homo sapiens
  Payload ID: 14641
  Gene Symbol: RPL23
  Gene Name: ribosomal protein L23
  ENST ID: ENST00000394333
  CDS Start-End: 26-370
ttttttcttttttccggcgttcaagatgtcgaagcgaggacgtggtgggtcctctggtgcgaaattccggatttccttgggtcttccggtaggagctgtaatcaattgtgctgacaacacaggagccaaaaacctgtatatcatctccgtgaaggggatcaagggacggctgaacagacttcccgctgctggtgtgggtgacatggtgatggccacagtcaagaaaggcaaaccagagctcagaaaaaaggtcttgctctgtcacacaggctggagtgcagtaacaccactgaagctcactgtaactttgaactgctggacttggaatcctcctgctgtggccttcaaagggctgcaattacaagtgtgagccactgcatcccacctcacattttattctttggagattttttttgacttggattaaaaaactttatatttaca

SEQ ID NO: 176468 - DNA, 2821 bp, Homo sapiens
  Payload ID: 14641
  Gene Symbol: RPL23
  Gene Name: ribosomal protein L23
  Uniprot ID: P62829
  ENST ID: ENST00000479035
  CDS Start-End: 134-556
aataaggcagcgcccagaggcggaagaggccggtttttgctccggccacgtgaggagggtgggcggggcgttaaagttcatatcccagtgtcctttgaatcgacttccttttttcttttttccggcgttcaagatgtcgaagcgaggacgtggtgggtcctctggtgcgaaattccggatttccttgggtcttccggtaggagctgtaatcaattgtgctgacaacacaggagccaaaaacctgtatatcatctccgtgaaggggatcaagggacggctgaacagacttcccgctgctggtgtgggtgacatggtgatggccacagtcaagaaaggcaaaccagagctcagaaaaaaggtacatccagcagtggtcattcgacaacgaaagtcataccgtagaaaagatggcgtgtttctttattttgaagataatgcaggagtcatagtgaacaataaaggcgagatgaaaggttctgccattacaggaccagtagcaaaggagtgtgcagacttgtggccccggattgcatccaatgctggcagcattgcatgattctccagtatatttgtaaaaaataaaaaaaaaaactaaacccattaaaaagtatttgtttgcagtgcttgtctccctgttcacttccagggttcaagcgattctcctgcctcagcctcctaagtagctgggattacaggcacctgccgtcatgcctggctagtttttgtatttttggtggagacagggtttcaccatgtttgccaaacgactcaaactcctgatctcaagtgatctgcccacccaggcctctacagtgtttttgacataccctgaccatcacttttctgaaatggaaactctgggcattttttttttaaagcaatccttgcttttttgtgagtttgcagactttcagcatcttccaattgctgtatttacaattttggcctcaaaaagtattatttgggttttgagtcccaaaaataatagtagatactgctcaatgactggctatacatggtagcttctcctggagtgaggaaggcattcaaatggctgggcgcggtagctggcacctgtaatcccaacactttcggaggccaaggcaggcagatcatgaggtcaggagttcaagaccaggctgaccaacgtggtgaaacctcctcttttctaaaaatacaaaaattagctgggcgtggtggcgcaccgcctgtaatctcagctactgagagaatcgcttgaacctgggaggtggagtttgcagcgagtcgagattgcaccattgtactccatccagcctgggcaacggagcaagattccgttcccgcccccgccccaaaaaaaggcattgaagttaagatagactatatagttagatcctggacacacacatggattttgaggaatgatgtgagtttgtttatgtatgtacattttagcagttaacagatttggagtaaattgaatatttataaaacaacagtaattgccatgtaggtttactgtcatagtggaagatgattaagttgatggtacctacaggtattttgctatgaaaatgttttgacaaacaggatgatcgtgtaatttatgttccaagctctagtttgagaatggaagaatgtggtaaatttttgccaactgaacaggcataaagcgctgataataagggacttggccttaaggtaggaggttgttagcatttctttctaaacgtgtaagagtttatttaggtgacacccagcgttttggaaaaatgggtgtttgtttagaacaataatttggagggaagtggactaaacagggtttttagattaaggtttgtgtttatgtatctgtatctgcaaatactcagccataaatgtttctacctgtaagttgggtataatacaagctccacttggtatcaaaaaggactacccttagtgtcttccatgactagttatggaatgtaccagacctagagaggagttgttctaacctggagcttttgaaaatgtttccggtccataccctagaccaattaagtcagactgcagaataggactcagacatcagaattgtgaagctcccaggagatgtcaaggtatacccaagactgagaaccagtaccctgtctagactgaaccaggcttggttttagaagtattaaatctcgcctgggtacggtggctcacacctataatcccagcactttgggaggctgaggtgggtggatcatctgaggtcaggagagtgagaccagcctgtccaacatgttgaaaccccatctctactatacaaaattagccaggcatggtggtgcatgctgtaatcccagctacttgggaggctgaggcaggagaattgcttgaaccccggagatggaggttgcagtgagctgaggtcgcacgattgtgctccagcctgggcaaccagtgaaactctggggggaaagaaaaaaaatgtattaaatctctagttttagagagttacaccataacatccctgagtatggtcaatttcaagtcagctttagtgtgacaagcccctaggcccaccatttatgtctttatatattatggcaatatatgatccttatatattaaccactaatcgctgctgtttttgaatgttatcttttctgaggcagtcttgctctgtcacacaggctggagtgcagtaacaccactgaagctcactgtaactttgaactgctggacttggaatcctcctgctgtggccttcaaagggctgcaattacaagtgtgagccactgcatcccacctcacattttattctttggagattttttttgacttggattaaaaaactttatattta

SEQ ID NO: 176469 - DNA, 615 bp, Homo sapiens
  Payload ID: 14641
  Gene Symbol: RPL23
  Gene Name: ribosomal protein L23
  ENST ID: ENST00000577407
  CDS Start-End: 28-396
ccttttttcttttttccggcgttcaagatgtcgaagcgaggacgtggtgggtcctctggtgcgaaattccggatttccttgggtcttccggtaggagctgtaatcaattgtgctgacaacacaggagccaaaaacctgtatatcatctccgtgaaggggatcaagggacggctgaacagacttcccgctgctggtgtgggtgacatggtgatggccacagtcaagaaaggcaaaccagagctcagaaaaaaggtacatccagcagtggtcattcgacaacgaaagtcataccgtagaaaagatggcgtgtttctttattttgaagataatgcaggagtcatagtgaacaataaaggcgagatgaaaggtaggaaatcagtccagcttgttccttaggtctctgaggttgggtggattgtctagaagtacaggccaaggatcttctgtgtttgacgatgtcttaatctgtcccccacatgtttttattttattttattttatttttttaatgcaggttctgccattacaggaccagtagcaaaggagtgtgcagacttgtggccccggattgcatccaatgctggcagcattgcatgattctccagtatatttgta

SEQ ID NO: 176470 - DNA, 588 bp, Homo sapiens
  Payload ID: 14641
  Gene Symbol: RPL23
  Gene Name: ribosomal protein L23
  ENST ID: ENST00000245857
  CDS Start-End: 292-537
ctggattaggccctggtttgcgcgacctctgcggttttatgccttgcaggagtaattgcgttttgcgaaagttagagcaagggttgagtcgtctaggtttcttaatttcgatgtcagagtgttaatagacgtggtgggtcctctggtgcgaaattccggatttccttgggtcttccggtaggagctgtaatcaattgtgctgacaacacaggagccaaaaacctgtatatcatctccgtgaaggggatcaagggacggctgaacagacttcccgctgctggtgtgggtgacatggtgatggccacagtcaagaaaggcaaaccagagctcagaaaaaaggtacatccagcagtggtcattcgacaacgaaagtcataccgtagaaaagatggcgtgtttctttattttgaagataatgcaggagtcatagtgaacaataaaggcgagatgaaaggttctgccattacaggaccagtagcaaaggagtgtgcagacttgtggccccggattgcatccaatgctggcagcattgcatgattctccagtatatttgtaaaaaataaaaaaaaaaactaaacccattaaaaa

SEQ ID NO: 176471 - DNA, 333 bp, Homo sapiens
  Payload ID: 14641
  Gene Symbol: RPL23
  Gene Name: ribosomal protein L23
  ENST ID: ENST00000470646
  CDS Start-End: 231-333
attaggccctggtttgcgcgacctctgcggttttatgccttgcaggagtaattgcgttttgcgaaagacgtggtgggtcctctggtgcgaaattccggatttccttgggtcttccggtaggagctgtaatcaattgtgctgacaacacaggagccaaaaacctgtatatcatctccgtgaaggggatcaagggacggctgaacagacttcccgctgctggtgtgggtgacatggtgatggccacagtcaagaaaggcaaaccagagctcagaaaaaaggtacatccagcagtggtcattcgacaacgaaagtcataccgtagaaaagatggcg

SEQ ID NO: 176472 - DNA, 587 bp, Homo sapiens
  Payload ID: 14642
  Gene Symbol: RPL23A
  Gene Name: ribosomal protein L23a
  ENST ID: ENST00000355731
  CDS Start-End: 1-476
cactggttggagctccatgtccccgggcctctcctgcccctcctaaagctgaagccaaagcgaaggctttaaaggccaagaaggcagtgttgaaaggtgtccacagccacaaaaagaagaagatccgcacgtcacccaccttccggcggccgaagacactgcgactccggagacagcccaaatatcctcggaagagcgctcccaggagaaacaagcttgaccactatgctatcatcaagtttccgctgaccactgagtctgccatgaagaagatagaagacaacaacacacttgtgttcattgtggatgttaaagccaacaagcaccagattaaacaggctgtgaagaagctgtatgacattgatgtggccaaggtcaacaccctgattcggcctgatggagagaagaaggcatatgttcgactggctcctgattacgatgctttggatgttgccaacaaaattgggatcatctaaactgagtccagctgcctaattctgaatatatatatatatatatcttttcaccatatacatgcctgtctgtcaatttctggttgggctgggaggccacacacacacactgac

SEQ ID NO: 176473 - DNA, 688 bp, Homo sapiens
  Payload ID: 14642
  Gene Symbol: RPL23A
  Gene Name: ribosomal protein L23a
  ENST ID: ENST00000394938
  CDS Start-End: 49-633
aggcatcatccgccagggagggccagacattcggttctgggaagctacatgcatccactggttggagctccatgtccccgggcctgtaaggaattagtgccctcagctttaaccattttccttctggttcatgttcaaccgggctacattacccgcccctctctccgcagcgtggttttgcgatgggctcctgcccctcctaaagctgaagccaaagcgaaggctttaaaggccaagaaggcagtgttgaaaggtgtccacagccacaaaaagaagaagatccgcacgtcacccaccttccggcggccgaagacactgcgactccggagacagcccaaatatcctcggaagagcgctcccaggagaaacaagcttgaccactatgctatcatcaagtttccgctgaccactgagtctgccatgaagaagatagaagacaacaacacacttgtgttcattgtggatgttaaagccaacaagcaccagattaaacaggctgtgaagaagctgtatgacattgatgtggccaaggtcaacaccctgattcggcctgatggagagaagaaggcatatgttcgactggctcctgattacgatgctttggatgttgccaacaaaattgggatcatctaaactgagtccagctgcctaattctgaatatatatatatatatatcttttcaccata

SEQ ID NO: 176474 - DNA, 1562 bp, Homo sapiens
  Payload ID: 14642
  Gene Symbol: RPL23A
  Gene Name: ribosomal protein L23a
  Uniprot ID: P62750
  ENST ID: ENST00000422514
  CDS Start-End: 614-1084
gttcgaccgagcaaatcctgctccagcactctagaacttagctgtatctaactcccgagtcaatccaaatgtgttctttcctcttggcagcgttcctgcctcctggcatggcaatcctcttccctgagactggcagttgctcaagataggaagctcccgggaccagacccgagcgccagccggctacgccgtccgctggcctgagcaaataaacgcgtgtcttcaaaaaactacaatccccatggtggcacgcgcctgtagtcccagctactctggtggctgaggcaggagaatggcgtaaacccgggaggcggagcttacagtgagccgagatcgcgccactgcactccagcctgggcgacagagcgctcaaaaaaaaaacaaaaaacaaaaaacaaaaaactacaacccccatgaagctttagtgcctttgaggggaggagtggcgcatgtttgttcacgcacgaaaaagaaattaaacctaactaccgttcccagagggcgccgctctgcaaattacccaatcagctctaagtacaaagcatcgcgagtctttagtgctctttggcgctataagcccgtgggaacgagcattggagacccttttcacaagatggcgccgaaagcgaagaaggaagctcctgcccctcctaaagctgaagccaaagcgaaggctttaaaggccaagaaggcagtgttgaaaggtgtccacagccacaaaaagaagaagatccgcacgtcacccaccttccggcggccgaagacactgcgactccggagacagcccaaatatcctcggaagagcgctcccaggagaaacaagcttgaccactatgctatcatcaagtttccgctgaccactgagtctgccatgaagaagatagaagacaacaacacacttgtgttcattgtggatgttaaagccaacaagcaccagattaaacaggctgtgaagaagctgtatgacattgatgtggccaaggtcaacaccctgattcggcctgatggagagaagaaggcatatgttcgactggctcctgattacgatgctttggatgttgccaacaaaattgggatcatctaaactgagtccagctgcctaattctgaatatatatatatatatatcttttcaccatatacatgcctgtctgtcaatttctggttgggctgggaggccacacacacacactgacatgacagggcttgggcaagactcctgttctacttatccttttgaaatacctcaccctgccactccaccatgtatgatcattccagagatctttgtgactagagttagtgtcctaggaaaaccagaactcagaacttgcctccatggttgagtaacaagctgtacaagaaccccttttatccctggaagaggctgtgtatgaaaccaatgcccagggtttgaagggtgttagcatccatttcaggggagtgtggattggctggctctctggtagcattttgtcctcacacacccatctactatgtccaaccggtctgtctgcttccctcaccccttgcccaataaaggacaaggacttcagaggagta

SEQ ID NO: 176475 - DNA, 593 bp, Homo sapiens
  Payload ID: 14642
  Gene Symbol: RPL23A
  Gene Name: ribosomal protein L23a
  ENST ID: ENST00000578181
  CDS Start-End: 1-511
agctcctgcccctcctaaagctgaagccaaagcgaaggctttaaaggccaagaaggcagtgttgaaaggtgtccacagccacaaaaagaagaagatccgcacgtcacccaccttccggcggccgaagacactgcgactccggagacagcccaaatatcctcggaagagcgctcccaggagaaacaagcttgaccactatgctatcatcaagtttccgctgaccactgagtctgccatgaagaagatagaagacaacaacacacttgtgttcattgtggatgttaaagccaacaagcaccagattaaacaggctgtgaagaagctgtatgacattgatgtggccaaggtcaacaccctgattcggcctgatggagagaagaaggcatatgttcgactggctcctgattacgatgctttggatgttgccaacaaagtaagtttccttcctacaaaccccttaatgctcaccccttgggtgcaaatgatgcatatgttagcgaccaaagcctgatctttgctgattagtcataattaactgactgcacccctatccttgacaaaccttatcctcacattcctcattttgctttcta

SEQ ID NO: 176476 - DNA, 639 bp, Homo sapiens
  Payload ID: 14642
  Gene Symbol: RPL23A
  Gene Name: ribosomal protein L23a
  ENST ID: ENST00000472628
  CDS Start-End: 372-584
tttaatctcctgacacttgtgatgtcttcaaaggaaccactgatgcacctgtggccagggtggcccactgcagttcttggggccggaagtgaccgatttctaaatcccgcacccacgttttctttccttttctcccagctcctgcccctcctaaagctgaagccaaagcgaaggctttaaaggccaagaaggcagtgttgaaaggtgtccacagccacaaaaagaagaagatccgcacgtcacccaccttccggcggccgaagacactgcgactccggagacagcccaaatatcctcggaagagcgctcccaggagaaacaagcttgaccactatgctatcatcaagtttccgctgaccactgagtctgccatgaagaagatagaagacaacaacacacttgtgttcattgtggatgttaaagccaacaagcaccagattaaacaggctgtgaagaagctgtatgacattgatgtggccaaggtcaacaccctgattcggcctgatggagagaagaaggcatatgttcgactggctcctgattacgatgctttggatgttgccaacaaaattgggatcatctaaactgagtccagctgcctaattctgaatatatatatatatatatcttttcaccata

SEQ ID NO: 176477 - DNA, 636 bp, Homo sapiens
  Payload ID: 14642
  Gene Symbol: RPL23A
  Gene Name: ribosomal protein L23a
  ENST ID: ENST00000496182
  CDS Start-End: 369-581
ccgcagagcgaacgaattgggaacacggctgctgggctaagccctgagggctctgctccggggctgctccctgcgtttcggacacgctgcagtatacgtgggccgcgtgggcccagcctcgtgggctgagttccgctcctgcccctcctaaagctgaagccaaagcgaaggctttaaaggccaagaaggcagtgttgaaaggtgtccacagccacaaaaagaagaagatccgcacgtcacccaccttccggcggccgaagacactgcgactccggagacagcccaaatatcctcggaagagcgctcccaggagaaacaagcttgaccactatgctatcatcaagtttccgctgaccactgagtctgccatgaagaagatagaagacaacaacacacttgtgttcattgtggatgttaaagccaacaagcaccagattaaacaggctgtgaagaagctgtatgacattgatgtggccaaggtcaacaccctgattcggcctgatggagagaagaaggcatatgttcgactggctcctgattacgatgctttggatgttgccaacaaaattgggatcatctaaactgagtccagctgcctaattctgaatatatatatatatatatcttttcaccata

SEQ ID NO: 176478 - DNA, 580 bp, Homo sapiens
  Payload ID: 14642
  Gene Symbol: RPL23A
  Gene Name: ribosomal protein L23a
  ENST ID: ENST00000394935
  CDS Start-End: 1-528
ggccagacattcggttctgggaagctacatgcatccactggttggagctccatgtccccgggcctcgtggttttgcgatgggctcctgcccctcctaaagctgaagccaaagcgaaggctttaaaggccaagaaggcagtgttgaaaggtgtccacagccacaaaaagaagaagatccgcacgtcacccaccttccggcggccgaagacactgcgactccggagacagcccaaatatcctcggaagagcgctcccaggagaaacaagcttgaccactatgctatcatcaagtttccgctgaccactgagtctgccatgaagaagatagaagacaacaacacacttgtgttcattgtggatgttaaagccaacaagcaccagattaaacaggctgtgaagaagctgtatgacattgatgtggccaaggtcaacaccctgattcggcctgatggagagaagaaggcatatgttcgactggctcctgattacgatgctttggatgttgccaacaaaattgggatcatctaaactgagtccagctgcctaattctgaatatatatatatatatatcttttcacc

SEQ ID NO: 176479 - DNA, 623 bp, Homo sapiens
  Payload ID: 14643
  Gene Symbol: RPL24
  Gene Name: ribosomal protein L24
  Uniprot ID: P83731
  ENST ID: ENST00000394077
  CDS Start-End: 107-580
ggggaggagatttccggcccccatccccgcagcgaccttataaggtctcttcccatgattctctctttcttttcgccatcttttgtctttccgtggagctgtcgccatgaaggtcgagctgtgcagttttagcgggtacaagatctaccccggacacgggaggcgctacgccaggaccgacgggaaggttttccagtttcttaatgcgaaatgcgagtcggctttcctttccaagaggaatcctcggcagataaactggactgtcctctacagaaggaagcacaaaaagggacagtcggaagaaattcaaaagaaaagaacccgccgagcagtcaaattccagagggccattactggtgcatctcttgctgatataatggccaagaggaatcagaaacctgaagttagaaaggctcaacgagaacaagctatcagggctgctaaggaagcaaaaaaggctaagcaagcatctaaaaagactgcaatggctgctgctaaggcacctacaaaggcagcacctaagcaaaagattgtgaagcctgtgaaagtttcagctccccgagttggtggaaaacgctaaactggcagattagatttttaaataaagattggattataactct

SEQ ID NO: 176480 - DNA, 478 bp, Homo sapiens
  Payload ID: 14643
  Gene Symbol: RPL24
  Gene Name: ribosomal protein L24
  ENST ID: ENST00000495401
  CDS Start-End: 30-395
atcttttgtctttccgtggagctgtcgccatgaaggtcgagctgtgcagttttagcgggtacaagatctaccccggacacgggaggcgctacgccaggaccgacgggaaggttttccagtttcttaatgcgaaatgcgagtcggctttcctttccaagaggaatcctcggcagataaactggactgtcctctacagaaggaagcacaaaaagggacagtcggaagaaattcaaaagaaaagaacccgccgagcagtcaaattccagagggccattactggtgcatctcttgctgatataatggccaagaggaatcagaaacctgaagttagaaaggctcaacgagaacaagctatcaggcacctacaaaggcagcacctaagcaaaagattgtgaagcctgtgaaagtttcagctccccgagttggtggaaaacgctaaactggcagattagatttttaaataaagattggattataa

SEQ ID NO: 176481 - DNA, 799 bp, Homo sapiens
  Payload ID: 14643
  Gene Symbol: RPL24
  Gene Name: ribosomal protein L24
  ENST ID: ENST00000469605
  CDS Start-End: 20-472
tttccgtggagctgtcgccatgaaggtcgagctgtgcagttttagcgggtacaagatctaccccggacacgggaggcgctacgccaggaccgacgggaaggttttccagtttcttaatgcgaaatgcgagtcggctttcctttccaagaggaatcctcggcagataaactggactgtcctctacagaaggaagcacaaaaagggacagtcggaagaaattcaaaagaaaagaacccgccgagcagtcaaattccagagggccattactggtgcatctcttgctgatataatggccaagaggaatcagaaacctgaagttagaaaggctcaacgagaacaagctatcagggctgctaaggaagcaaaaaaggctaagcaagcatctaaaaagactgcaatggctgctgctaaggtaattatggggtttctttactttcttgaacaatacaacaggaaaattttctttttttgagacggagtcttgctctgttgcccaggatggggtgcagtggcgtgatctgatctcagctcactgcaacctctgcctcccgggttcaagtgatactcctgcctcagcctcccgagtagctgggagtacaggtgcgcgccatcacgcccggctgattttttgtttgtttgtttgtttgtttaagtagagacagggtttcaccatgtcggacaggctggtcttgaactcttgacctcaggtgatctgcccacctcagcctcccaaagtgctggggttacaagtgtgagccactgagcccggctggaaaatttattttcagtctaaattgtg

SEQ ID NO: 176482 - DNA, 524 bp, Homo sapiens
  Payload ID: 14644
  Gene Symbol: RPL26
  Gene Name: ribosomal protein L26
  Uniprot ID: P61254
  ENST ID: ENST00000293842
  CDS Start-End: 43-480
ctcttcccttttgcggccatcaccgaagcgggagcggccaaaatgaagtttaatccctttgtgacttccgaccgaagcaagaatcgcaaaaggcatttcaatgcaccttcccacattcgaaggaagattatgtcttcccctctttccaaagagctgagacagaagtacaacgtgcgatccatgcccatccgaaaggatgatgaagttcaggttgtacgtggacactataaaggtcagcaaattggcaaagtagtccaggtttacaggaagaaatatgttatctacattgaacgggtgcagcgggaaaaggctaatggcacaactgtccacgtaggcattcaccccagcaaggtggttatcactaggctaaaactggacaaagaccgcaaaaagatcctcgaacggaaagccaaatctcgccaagtaggaaaggaaaagggcaaatacaaggaagaaaccattgagaagatgcaggaataaagtaatcttatatacaagctttgattaaaacttgaaacaaagag

SEQ ID NO: 176483 - DNA, 328 bp, Homo sapiens
  Payload ID: 14644
  Gene Symbol: RPL26
  Gene Name: ribosomal protein L26
  ENST ID: ENST00000584441
  CDS Start-End: 1-192
gttgtacgtggacactataaaggtcagcaaattggcaaagtagtccaggtttacaggaagaaatatgttatctacattgaacgggtgcagcgggaaaaggctaatggcacaactgtccacgtaggcattcaccccagcaagcttgggagtgtttttttcttatttttctgcaggtggttatcactaggctaaaactggacaaagaccgcaaaaagatcctcgaacggaaagccaaatctcgccaagtaggaaaggaaaagggcaaatacaaggaagaaaccattgagaagatgcaggaataaagtaatcttatatacaagctttgatt

SEQ ID NO: 176484 - DNA, 524 bp, Homo sapiens
  Payload ID: 14644
  Gene Symbol: RPL26
  Gene Name: ribosomal protein L26
  Uniprot ID: P61254
  ENST ID: ENST00000583011
  CDS Start-End: 86-523
accggaagcagcgtgtagttctcttcccttttgcggccatcaccgaagcgggagcggagtctttttaactttttatttagccaaaatgaagtttaatccctttgtgacttccgaccgaagcaagaatcgcaaaaggcatttcaatgcaccttcccacattcgaaggaagattatgtcttcccctctttccaaagagctgagacagaagtacaacgtgcgatccatgcccatccgaaaggatgatgaagttcaggttgtacgtggacactataaaggtcagcaaattggcaaagtagtccaggtttacaggaagaaatatgttatctacattgaacgggtgcagcgggaaaaggctaatggcacaactgtccacgtaggcattcaccccagcaaggtggttatcactaggctaaaactggacaaagaccgcaaaaagatcctcgaacggaaagccaaatctcgccaagtaggaaaggaaaagggcaaatacaaggaagaaaccattgagaagatgcaggaataaa

SEQ ID NO: 176485 - DNA, 561 bp, Homo sapiens
  Payload ID: 14644
  Gene Symbol: RPL26
  Gene Name: ribosomal protein L26
  ENST ID: ENST00000584906
  CDS Start-End: 6-197
ccaaaatgaagtttaatccctttgtgacttccgaccgaagcaagaatcgcaaaaggcatttcaatgcaccttcccacattcgaaggaagattatgtcttcccctctttccaaagagctgagacagaagtacaacgtgcgatccatgcccatccgaaaggatgatgaagttcaggaggtttcaatgtttggtcattgaagaggcagttgaggaccagtaaacagaattgctcccaatctagattcaggagctgtaactgaagcacagtcacgttatcgtttgcacttacaggttgtacgtggacactataaaggtcagcaaattggcaaagtagtccaggtttacaggaagaaatatgttatctacattgaacgggtgcagcgggaaaaggctaatggcacaactgtccacgtaggcattcaccccagcaaggtggttatcactaggctaaaactggacaaagaccgcaaaaagatcctcgaacggaaagccaaatctcgccaagtaggaaaggaaaagggcaaatacaaggaagaaaccattgagaagatgcaggaataaa

SEQ ID NO: 176486 - DNA, 534 bp, Homo sapiens
  Payload ID: 14644
  Gene Symbol: RPL26
  Gene Name: ribosomal protein L26
  ENST ID: ENST00000583515
  CDS Start-End: 245-534
tttgatgcaaaagtctttagtccgtaaacatatacagaaaacacccgaataaaacaaaaaataaaaagtttcgagcttcggttgataggcccttccgatcaaacagtttttgttgaagttgcacaacatgacactgcctatgatcattctagactatcaagataaaatcattgcggttatttgtttggaagctggatgagattttggtcatttaagagtctttttaactttttatttagccaaaatgaagtttaatccctttgtgacttccgaccgaagcaagaatcgcaaaaggcatttcaatgcaccttcccacattcgaaggaagattatgtcttcccctctttccaaagagctgagacagaagtacaacgtgcgatccatgcccatccgaaaggatgatgaagttcaggttgtacgtggacactataaaggtcagcaaattggcaaagtagtccaggtttacaggaagaaatatgttatctacattgaacgggtgcagcgggaaaaggctaatggcacaactgtccacgt

SEQ ID NO: 176487 - DNA, 763 bp, Homo sapiens
  Payload ID: 14644
  Gene Symbol: RPL26
  Gene Name: ribosomal protein L26
  Uniprot ID: P61254
  ENST ID: ENST00000582556
  CDS Start-End: 311-748
gcgggagcgggtaaggattcggcgggcaagcgggtgtaatcagcagccatccgttcttgggcatggtggcttccgaccgcggggaccccgagagtctcttgtcggccgagtagcagccaggaaggagagactgggatggttttttatctgttgctttcttaaatcaagggccgccgggccggagatggatggagggaccggggatttgggaactcgaaaacgagctgagggaagggagcctgtggaaatagactggagtctgggtagtgtcgtttcctagagaatggtctcgaagtaacttctcgccaaaatgaagtttaatccctttgtgacttccgaccgaagcaagaatcgcaaaaggcatttcaatgcaccttcccacattcgaaggaagattatgtcttcccctctttccaaagagctgagacagaagtacaacgtgcgatccatgcccatccgaaaggatgatgaagttcaggttgtacgtggacactataaaggtcagcaaattggcaaagtagtccaggtttacaggaagaaatatgttatctacattgaacgggtgcagcgggaaaaggctaatggcacaactgtccacgtaggcattcaccccagcaaggtggttatcactaggctaaaactggacaaagaccgcaaaaagatcctcgaacggaaagccaaatctcgccaagtaggaaaggaaaagggcaaatacaaggaagaaaccattgagaagatgcaggaataaagtaatcttatatac

SEQ ID NO: 176488 - DNA, 873 bp, Homo sapiens
  Payload ID: 14644
  Gene Symbol: RPL26
  Gene Name: ribosomal protein L26
  Uniprot ID: P61254
  ENST ID: ENST00000584164
  CDS Start-End: 393-830
agcgggagcgggtaaggattcggcgggcaagcgggtgtaatcagcagccatccgttcttgggcatggtggcttccgaccgcggggaccccgagagtctcttgtcggccgagtagcagccaggaaggagagactgggatggttttttatctgttgctttcttaaatcaagggccgccgggccggagatggatggagggaccggggatttgggaactcgaaaacgagctgagggaagggagcctgtggaaatagactggagtctgggtagtgtcgtttcctagagaatggtctcgaagtaacttctcggtaaagtcttcacggaatttccagaccacacttgcccactgggaggcttttaggacccgagacgtgtgcaggcttttccagccaaaatgaagtttaatccctttgtgacttccgaccgaagcaagaatcgcaaaaggcatttcaatgcaccttcccacattcgaaggaagattatgtcttcccctctttccaaagagctgagacagaagtacaacgtgcgatccatgcccatccgaaaggatgatgaagttcaggttgtacgtggacactataaaggtcagcaaattggcaaagtagtccaggtttacaggaagaaatatgttatctacattgaacgggtgcagcgggaaaaggctaatggcacaactgtccacgtaggcattcaccccagcaaggtggttatcactaggctaaaactggacaaagaccgcaaaaagatcctcgaacggaaagccaaatctcgccaagtaggaaaggaaaagggcaaatacaaggaagaaaccattgagaagatgcaggaataaagtaatcttatatacaagctttgattaaaacttgaaacaaaga

SEQ ID NO: 176489 - DNA, 1002 bp, Homo sapiens
  Payload ID: 14644
  Gene Symbol: RPL26
  Gene Name: ribosomal protein L26
  ENST ID: ENST00000578812
  CDS Start-End: 43-375
ctcttcccttttgcggccatcaccgaagcgggagcggccaaaatgaagtttaatccctttgtgacttccgaccgaagcaagaatcgcaaaaggcatttcaatgcaccttcccacattcgaaggaagattatgtcttcccctctttccaaagagctgagacagaagtacaacgtgcgatccatgcccatccgaaaggatgatgaagttcaggttgtacgtggacactataaaggtcagcaaattggcaaagtagtccaggtttacaggaagaaatatgttatctacattgaacgggtgcagcgggaaaaggctaatggcacaactgtccacgtaggcattcaccccagcaaggtaggtgtttttgagaatgcttgagagaaggaaattatggcaattattgttgacatgattgtttacagagcaaggccatagaaatagtccttgattttacatgtgctggaaaaaaacattttaaagtaaatactactgcacttgtattgaaaattctaataccatttaaaatgtttctgacatcaaagtgttaacggtcattatgtttctgttagtttgtttttgagacagtcttgctctttcacccaggccggagtgcagtggcacaatctcggctcactgcagcctccacctcccaagtgcaagcgattctcccgcctcagcctcctgagtgtagctgtgactacatgcgtgcaccactacacccggctaatttttgtacttcttagtacaaagtttcaccatgttggccaggctggtcttgaactcctgacctcaggtgatttgcctgcctcagcctcctaaagtgctgggattacaggcatgagccaccatgcctgtcccattatgtatattgggcggaggttgcagtgagccgagatcgcaccattgcacttcagcctaggcaacgagtgaaaacgccatctcaaaaaaaaaaaaagaaaaaaaataaagaccttaactgatcttcccttacttctgacatctttt

SEQ ID NO: 176490 - DNA, 443 bp, Homo sapiens
  Payload ID: 14644
  Gene Symbol: RPL26
  Gene Name: ribosomal protein L26
  ENST ID: ENST00000582485
  CDS Start-End: 1-407
tgaagtttaatccctttgtgacttccgaccgaagcaagaatcgcaaaaggcatttcaatgcaccttcccacattcgaaggaagattatgtcttcccctctttccaaagagctgagacagaagtacaacgtgcgatccatgcccatccgaaaggatgatgaagttcaggttgtacgtggacactataaaggtcagcaaattggcaaagtagtccaggtttacaggaagaaatatgttatctacattgaacgggtgcagcgggaaaaggctaatggcacaactgtccacgtaggcattcaccccagcaaggctaaaactggacaaagaccgcaaaaagatcctcgaacggaaagccaaatctcgccaagtaggaaaggaaaagggcaaatacaaggaagaaaccattgagaagatgcaggaataaagtaatcttatatacaagct

SEQ ID NO: 176491 - DNA, 747 bp, Homo sapiens
  Payload ID: 14644
  Gene Symbol: RPL26
  Gene Name: ribosomal protein L26
  ENST ID: ENST00000584343
  CDS Start-End: 425-747
ctcttcccttttgcggccatcaccgaagcgggagcgggtaaggattcggcgggcaagcgggtgtaatcagcagccatccgttcttgggcatggtggcttccgaccgcggggaccccgagagtctcttgtcggccgagtagcagccaggaaggagagactgggatggttttttatctgttgctttcttaaatcaagggccgccgggccggagatggatggagggaccggggatttgggaactcgaaaacgagctgagggaagggagcctgtggaaatagactggagtctgggtagtgtcgtttcctagagaatggtctcgaagtaacttctcggtaaagtcttcacggaatttccagaccacacttgcccactgggaggcttttaggacccgagacgtgtgcaggcttttccaggttcggccaaaatgaagtttaatccctttgtgacttccgaccgaagcaagaatcgcaaaaggcatttcaatgcaccttcccacattcgaaggaagattatgtcttcccctctttccaaagagctgagacagaagtacaacgtgcgatccatgcccatccgaaaggatgatgaagttcaggttgtacgtggacactataaaggtcagcaaattggcaaagtagtccaggtttacaggaagaaatatgttatctacattgaacgggtgcagcgggaaaaggctaatggcacaactgtccacgtaggcattcaccccagcaaggtggttatcactag

SEQ ID NO: 176492 - DNA, 722 bp, Homo sapiens
  Payload ID: 14645
  Gene Symbol: RPL26L1
  Gene Name: ribosomal protein L26-like 1
  Uniprot ID: Q9UNX3
  ENST ID: ENST00000265100
  CDS Start-End: 55-492
acttccggccctgcgcactcagggtctgaggcagctagtagccggagggtcaccatgaagttcaatcccttcgttacctcggaccgcagtaaaaaccgcaaacgtcacttcaatgccccctcacacgtgcgcaggaagatcatgtcatccccgctctccaaggagctgcggcagaagtacaatgtccgctccatgcccatccgcaaggacgacgaggtccaggtagttcgaggacactacaaaggtcagcaaattggcaaggtagtccaggtgtacagaaagaaatatgtcatctacatcgagcgggtgcagcgtgagaaggccaacggcacaactgtccacgtgggcattcacccaagcaaggtggttatcaccaggctaaaactggacaaggatcggaaaaaaattcttgaacgcaaagccaagtctcgacaagttggaaaagagaaaggcaaatataaagaagaacttattgagaaaatgcaggaataaatagaacctgttgtgcaaccacggtttaaccggagattttgaggctagggtgtgtttctttcgaacttttcggaatgtctggaacatttcatttcctgttttgttacctgtgcctctgtaaatctacttttgcaattttaagtaataattttatgaataaaaatgggaaatgcttcctaattccacatagtatttgcattgttttataaataaattccacttactatcaa

SEQ ID NO: 176493 - DNA, 695 bp, Homo sapiens
  Payload ID: 14645
  Gene Symbol: RPL26L1
  Gene Name: ribosomal protein L26-like 1
  Uniprot ID: Q9UNX3
  ENST ID: ENST00000519974
  CDS Start-End: 83-520
ggcgaacgaaacgcggagctcgggagcgacccggcggggccaggcacgggcagaagggccaagagggccacagagggtcaccatgaagttcaatcccttcgttacctcggaccgcagtaaaaaccgcaaacgtcacttcaatgccccctcacacgtgcgcaggaagatcatgtcatccccgctctccaaggagctgcggcagaagtacaatgtccgctccatgcccatccgcaaggacgacgaggtccaggtagttcgaggacactacaaaggtcagcaaattggcaaggtagtccaggtgtacagaaagaaatatgtcatctacatcgagcgggtgcagcgtgagaaggccaacggcacaactgtccacgtgggcattcacccaagcaaggtggttatcaccaggctaaaactggacaaggatcggaaaaaaattcttgaacgcaaagccaagtctcgacaagttggaaaagagaaaggcaaatataaagaagaacttattgagaaaatgcaggaataaatagaacctgttgtgcaaccacggtttaaccggagattttgaggctagggtgtgtttctttcgaacttttcggaatgtctggaacatttcatttcctgttttgttacctgtgcctctgtaaatctacttttgcaattttaagtaataattttatgaataaaaatgggaaatgctt

SEQ ID NO: 176494 - DNA, 742 bp, Homo sapiens
  Payload ID: 14645
  Gene Symbol: RPL26L1
  Gene Name: ribosomal protein L26-like 1
  Uniprot ID: Q9UNX3
  ENST ID: ENST00000521476
  CDS Start-End: 125-562
cacgccgccggccgccgtttagtcccagagatagaaaaaagtagaggtaggagggcgcggcggctcacgcctgtaatcccagcactttggaaggccgaggcgggcggatcacgagagggtcaccatgaagttcaatcccttcgttacctcggaccgcagtaaaaaccgcaaacgtcacttcaatgccccctcacacgtgcgcaggaagatcatgtcatccccgctctccaaggagctgcggcagaagtacaatgtccgctccatgcccatccgcaaggacgacgaggtccaggtagttcgaggacactacaaaggtcagcaaattggcaaggtagtccaggtgtacagaaagaaatatgtcatctacatcgagcgggtgcagcgtgagaaggccaacggcacaactgtccacgtgggcattcacccaagcaaggtggttatcaccaggctaaaactggacaaggatcggaaaaaaattcttgaacgcaaagccaagtctcgacaagttggaaaagagaaaggcaaatataaagaagaacttattgagaaaatgcaggaataaatagaacctgttgtgcaaccacggtttaaccggagattttgaggctagggtgtgtttctttcgaacttttcggaatgtctggaacatttcatttcctgttttgttacctgtgcctctgtaaatctacttttgcaattttaagtaataattttatgaataaaaatgggaaatgcttcctaa

SEQ ID NO: 176495 - DNA, 233 bp, Homo sapiens
  Payload ID: 14645
  Gene Symbol: RPL26L1
  Gene Name: ribosomal protein L26-like 1
  ENST ID: ENST00000519522
  CDS Start-End: 118-233
accctgccctatgtgtcgcgggaacacatgtcaccccacagctctctttgagtgacctcccgaccacccattcctgcctaaccctagcattccttcctcagcctcaagagggtcaccatgaagttcaatcccttcgttacctcggaccgcagtaaaaaccgcaaacgtcacttcaatgccccctcacacgtgcgcaggaagatcatgtcatccccgctctccaaggagctgcg

SEQ ID NO: 176496 - DNA, 679 bp, Homo sapiens
  Payload ID: 14645
  Gene Symbol: RPL26L1
  Gene Name: ribosomal protein L26-like 1
  Uniprot ID: Q9UNX3
  ENST ID: ENST00000519239
  CDS Start-End: 65-502
agtagccgggtgagtggaggctggagttttctcggacagtgaactctaccgccccagggtcaccatgaagttcaatcccttcgttacctcggaccgcagtaaaaaccgcaaacgtcacttcaatgccccctcacacgtgcgcaggaagatcatgtcatccccgctctccaaggagctgcggcagaagtacaatgtccgctccatgcccatccgcaaggacgacgaggtccaggtagttcgaggacactacaaaggtcagcaaattggcaaggtagtccaggtgtacagaaagaaatatgtcatctacatcgagcgggtgcagcgtgagaaggccaacggcacaactgtccacgtgggcattcacccaagcaaggtggttatcaccaggctaaaactggacaaggatcggaaaaaaattcttgaacgcaaagccaagtctcgacaagttggaaaagagaaaggcaaatataaagaagaacttattgagaaaatgcaggaataaatagaacctgttgtgcaaccacggtttaaccggagattttgaggctagggtgtgtttctttcgaacttttcggaatgtctggaacatttcatttcctgttttgttacctgtgcctctgtaaatctacttttgcaattttaagtaataattttatgaataaaaatgggaaatgcttcc

SEQ ID NO: 176497 - DNA, 493 bp, Homo sapiens
  Payload ID: 14645
  Gene Symbol: RPL26L1
  Gene Name: ribosomal protein L26-like 1
  ENST ID: ENST00000519156
  CDS Start-End: 110-493
gtagagcctttgttgggggatgaggagtgtcttgggtcgagaacaggcccctgtaacccactgagcgccccttcattccgtctctctccgccctttgtagagggtcaccatgaagttcaatcccttcgttacctcggaccgcagtaaaaaccgcaaacgtcacttcaatgccccctcacacgtgcgcaggaagatcatgtcatccccgctctccaaggagctgcggcagaagtacaatgtccgctccatgcccatccgcaaggacgacgaggtccaggtagttcgaggacactacaaaggtcagcaaattggcaaggtagtccaggtgtacagaaagaaatatgtcatctacatcgagcgggtgcagcgtgagaaggccaacggcacaactgtccacgtgggcattcacccaagcaaggtggttatcaccaggctaaaactggacaaggatcggaaaaaaattcttgaacgcaaagccaagtctcgacaagtt

SEQ ID NO: 176498 - DNA, 490 bp, Homo sapiens
  Payload ID: 14646
  Gene Symbol: RPL27
  Gene Name: ribosomal protein L27
  Uniprot ID: P61353
  ENST ID: ENST00000253788
  CDS Start-End: 41-451
ctttcctttttgctggtagggccgggtggttgctgccgaaatgggcaagttcatgaaacctgggaaggtggtgcttgtcctggctggacgctactccggacgcaaagctgtcatcgtgaagaacattgatgatggcacctcagatcgcccctacagccatgctctggtggctggaattgaccgctacccccgcaaagtgacagctgccatgggcaagaagaagatcgccaagagatcaaagataaaatcttttgtgaaagtgtataactacaatcacctaatgcccacaaggtactctgtggatatccccttggacaaaactgtcgtcaataaggatgtcttcagagatcctgctcttaaacgcaaggcccgacgggaggccaaggtcaagtttgaagagagatacaagacaggcaagaacaagtggttcttccagaaactgcggttttagatgctttgttttgatcattaaaaattataaagaaaaaaa

SEQ ID NO: 176499 - DNA, 697 bp, Homo sapiens
  Payload ID: 14646
  Gene Symbol: RPL27
  Gene Name: ribosomal protein L27
  Uniprot ID: P61353
  ENST ID: ENST00000589913
  CDS Start-End: 275-685
tagaagcttgggttgaatctttcaatccgctgccatccgcggcttgggggtcgaaggtccgggcggcgccgggtgcattccttccctaggtctctggcggctacgtatccgatcctgtcctgcgagcagggccctcgggcggccttgaccaaggcgacagtgaacacagtctgaagttccggcccaagacctgggcttgctggcaggagtcagctctgggcatctttggctttacggatttttaagtggccctttctccttgctctctgcagaaatgggcaagttcatgaaacctgggaaggtggtgcttgtcctggctggacgctactccggacgcaaagctgtcatcgtgaagaacattgatgatggcacctcagatcgcccctacagccatgctctggtggctggaattgaccgctacccccgcaaagtgacagctgccatgggcaagaagaagatcgccaagagatcaaagataaaatcttttgtgaaagtgtataactacaatcacctaatgcccacaaggtactctgtggatatccccttggacaaaactgtcgtcaataaggatgtcttcagagatcctgctcttaaacgcaaggcccgacgggaggccaaggtcaagtttgaagagagatacaagacaggcaagaacaagtggttcttccagaaactgcggttttagatgctttgtttt

SEQ ID NO: 176500 - DNA, 460 bp, Homo sapiens
  Payload ID: 14646
  Gene Symbol: RPL27
  Gene Name: ribosomal protein L27
  ENST ID: ENST00000586277
  CDS Start-End: 1-434
gacgcaaagctgtcatcgtgaaggtatcagcctcgcgggactctgcgtccttgcatgccgggaccaggctggctgcggcggggcgggcaggcttggaattcaagaacattgatgatggcacctcagatcgcccctacagccatgctctggtggctggaattgaccgctacccccgcaaagtgacagctgccatgggcaagaagaagatcgccaagagatcaaagataaaatcttttgtgaaagtgtataactacaatcacctaatgcccacaaggtactctgtggatatccccttggacaaaactgtcgtcaataaggatgtcttcagagatcctgctcttaaacgcaaggcccgacgggaggccaaggtcaagtttgaagagagatacaagacaggcaagaacaagtggttcttccagaaactgcggttttagatgctttgttttgatcattaaaaatt

SEQ ID NO: 176501 - DNA, 585 bp, Homo sapiens
  Payload ID: 14646
  Gene Symbol: RPL27
  Gene Name: ribosomal protein L27
  Uniprot ID: P61353
  ENST ID: ENST00000589037
  CDS Start-End: 146-556
attcgaatacttgagctgccgcgccctgcgtttccctcatgagcttcttccgcccgcaacacgagactcagcaccacacaatcagcgtggcaaagcctgaagggcgggacaggaagtgaggtcactcctcaccggggtgaaagaaatgggcaagttcatgaaacctgggaaggtggtgcttgtcctggctggacgctactccggacgcaaagctgtcatcgtgaagaacattgatgatggcacctcagatcgcccctacagccatgctctggtggctggaattgaccgctacccccgcaaagtgacagctgccatgggcaagaagaagatcgccaagagatcaaagataaaatcttttgtgaaagtgtataactacaatcacctaatgcccacaaggtactctgtggatatccccttggacaaaactgtcgtcaataaggatgtcttcagagatcctgctcttaaacgcaaggcccgacgggaggccaaggtcaagtttgaagagagatacaagacaggcaagaacaagtggttcttccagaaactgcggttttagatgctttgttttgatcattaaaaattata

SEQ ID NO: 176502 - DNA, 569 bp, Homo sapiens
  Payload ID: 14646
  Gene Symbol: RPL27
  Gene Name: ribosomal protein L27
  ENST ID: ENST00000590864
  CDS Start-End: 299-541
tctagtaagccgttccagatgcttcctgatggagataaacactgttctgtttctctttggtcatttctcatagctttctgtgatttttctctttataatggtggatcttggagacctgagggtggaaatattttttggacactgcactacctctaacacagggcctaaataggccctcagtgaataacaaatgtaattcttactcatttagaacattgatgatggcacctcagatcgcccctacagccatgctctggtggctggaattgaccgctacccccgcaaagtgacagctgccatgggcaagaagaagatcgccaagagatcaaagataaaatcttttgtgaaagtgtataactacaatcacctaatgcccacaaggtactctgtggatatccccttggacaaaactgtcgtcaataaggatgtcttcagagatcctgctcttaaacgcaaggcccgacgggaggccaaggtcaagtttgaagagagatacaagacaggcaagaacaagtggttcttccagaaactgcggttttagatgctttgttttgatcattaaaaattat

SEQ ID NO: 176503 - DNA, 318 bp, Homo sapiens
  Payload ID: 14646
  Gene Symbol: RPL27
  Gene Name: ribosomal protein L27
  ENST ID: ENST00000588830
  CDS Start-End: 39-161
ttcctttttgctggtagggccgggtggttgctgccgaaatgggcaagttcatgaaacctgggaaggtggtgcttgtcctggctggacgctactccggacgcaaagctgtcatcgtgaaggtactctgtggatatccccttggacaaaactgtcgtcaataaggatgtcttcagagatcctgctcttaaacgcaaggcccgacgggaggccaaggtcaagtttgaagagagatacaagacaggcaagaacaagtggttcttccagaaactgcggttttagatgctttgttttgatcattaaaaattataaagaaaaaaa

SEQ ID NO: 176504 - DNA, 4916 bp, Homo sapiens
  Payload ID: 14647
  Gene Symbol: RPL27A
  Gene Name: ribosomal protein L27a
  Uniprot ID: P46776
  ENST ID: ENST00000314138
  CDS Start-End: 404-850
cggctcagggctggcgcatttggtgaggagctcagacaacgaggcccttagggtcggcttaggcggttccctgaccaaggcgccagaaaagggcctggctcaagcaagcacgggcggcgtgcagtacagcacacctagccccgattcttcaacagttctcgccctccgagcctagcacaacgagcctcaccgaaaccgtacaccgccaccaggacactccgtgatgggggatcaccaccctcagaaagaggaagcgactagcaggcgcgcaatcccgcgagaccaggaggccccgcccgaagcccggcctctgtgaccggaagtgaggcgttttgccccgcccccgtggccgatacctcgcgagacttggcgaaggccttcctttttcgtctgggctgccaacatgccatccagactgaggaagacccggaaacttaggggccacgtgagccacggccacggccgcataggcaagcaccggaagcaccccggcggccgcggtaatgctggtggtctgcatcaccaccggatcaacttcgacaaataccacccaggctactttgggaaagttggtatgaagcattaccacttaaagaggaaccagagcttctgcccaactgtcaaccttgacaaattgtggactttggtcagtgaacagacacgggtgaatgctgctaaaaacaagactggggctgctcccatcattgatgtggtgcgatcgggctactacaaagttctgggaaagggaaagctcccaaagcagcctgtcatcgtgaaggccaaattcttcagcagaagagctgaggagaagattaagagtgttgggggggcctgtgtcctggtggcttgaagccacatggagggagtttcattaaatgctaactactttttccttgtggtgtgagtgtaggttcttcagtggcacctctacatcctgtgtgcattgggagcccaggttctagtacttagggtatgaagacatggggtcctctcctgacttccctcaaatatatggtaaacgtaagaccaacacagacgttggccagttaaacatttctgtttataaagtcagaataatacctgttgatcactgaaaggcctgcatgtattgtactctgaattttacagtgaatgagagaatgtaccctaattgttcaacagggctcaaaaggaaagattccattttgatgggtcacattctaaagaggggcagtgtgataggaatgagatggtcctttaggacttaagttctcagcccaaggtttttccacgtggccccctcatcttttttttttttttaaacggagtctctcttgccaggctggagtgcagtggcacgatctcggctcactgcagcctccgcctcccaggttaagcgattctcctgcctcagcttcctgactaactgggattacaggcgcccaccaccatgcccagctaatttttgtattttcagtagagatggggtttcaccatgttggccatgctggtctctaactcctaacctcaagtgatctgcccacatcggcctccaaaagttctgggattatagtgtgagccactgcgcccggccatggctccttaatcttgatccaaattattgttacatccagaatgtgatgaatcaaaatctcgagatgggggtccagcaatctgaaatttcagtatgccagggcttttctgtatgtcaaagtgggtttgaaatagttaatttttcttctagtctgaaatgtatcgggaaaatttggaaatcctgaaggctggaaattgaaataagtttttctaggatttgtgtctcttgctattggaaaactgatggtgaccaattcatgtttacaaataagatcctcatagatctcggtaaattataatttgctacagttttatggttcttcctgtgattttgagctttttttgacccaaaataatacagtctaaaactatagacaaataagatggcacttagactcctgggttttagttagtggaggtttccttagtgcactgtggggtcataataagccgagaaccatggctgtctatgggacacatctgtcaggacaacctttagaggatgttggggatcaaatagaaggcacagagaagcactgaattggcttacataagaataggctagaattacaagtagtgaaacctcgattcagctggacaattttaaacaaatgtatcatttggcttgtatcttctgttgtgctggagaagttagaaataagggctctccagaccagcctgaccaacctggagaaaccttgtctctactaaatacacaaaattagccaggcgtggtggcacatgcctgtaatcccagctactttggaggctgagccaggagaatctccaggaggcggaggttgctgtgagccgagatcgtgccattgcactccagcttgggcaacaagagtgaaactctgtccaccccccccaaaaaaagtaagggctctccattagggcccatagaggacttgtaatatggaacctgaatccaaggatcccacaataagtggtcagtagttcatgatgaattaaaagactcaatatttggtcttcacccaatacctgtgtgacttttagtcctaatttcctcatctttaaaatttcagtgaaagtgcctacctgaggattgtgtagattaaaatggaaaccgtgcacttaattttttgttttgttttgagacggagtctcgctctgtcgcccaggctggagtgcagtggtgcgatctcagatcactgcaagctccgcctcctaggttcagaccattctcctgcctcagcttcccaagtagctgggactacaggcgcccgccactgcgcccggctaattttttgcatttttagtagagacagggtttcaccgtgttagccaggatggtctcgatctcctgatctgcccgcctcagcctcccaaagtgctgggattacaggcatgagccaccgcgcccggcccaggcacttaatttttgtgtttgacttagtaacttaagtgcaaactattacgggagcagatggagtcaattggccttcatgtgattgtcagtgggaaattggtccaagcagagggaatactggttcaggaaactggtttgggaaggttaggcaaacgggaagtgctatggtggagagaaagattactctggccgggctgtaaaggacggctacaatgggaggctgaaggcagaaccaagaaaatgggagtgagtatggaaaaggtacgattcagacggcataatggacgggacttggagactgaattgtagtgggccgaccacaaaatgataaggcatggaaggaagtagagtttggggggaaggatccctagtcccttaatggctaccttcttccccaggagttgttaggccatccgatcccctggcctgggaaagaaacactgatttcgttgctggcttgttcactcaccagaagctacagctactaacagttctaaaaactgtttcatgtgatgaggaacagacgaaaatagttttgagccctaagtccgccgattccagtgctttcttgaacccgcatttactaaaatattttcatgactgccaagctttgaatagcctgctgtgttcatggaggctcatactggcgatctctagtggctggctaaagcttgaattgcaaaagatctaatttctggtctaatgtatatatgccttaaatatagttgcgttcaaacgtgggagctgcaggtgcaacttgattttatgacaaatggctgccacataatttgcacaagcagtgctcgtcaagggcagctaaatcaggcgagctttcaatcaaaataaatgtactactaaaccctacttagcggctaactagcccaagagcagacagcccacggacggactgcaagtcggaagcgcgggcggaagctgtgcagcgcccacctggtggctccatcggccgcgttcatcagtcagcacgacccgacctcagtggcgtcctcacaacacagaccggaccttgggtcttaccccggcacctgagaaccacttccggtgagtagcttctacttccggagacgatgactcccccgcgtcccagaccggaagaagcccggcggagaccggcctcgctcggccacttccggcaagggcggagccggccagtggtgcgcgagcgcagataactcccctggagaggcgggatgttcaactccacccctggtccttgggcggccgtgggtccccttcgaagcggaggaatggccaacctcgccgcacttcgagcccctttagggtgcgtttaagaacagtgggcgtggcctttacgtaaatcttcgagatgggaacctccagaatttgtctcaattgtctaaaaggtaatgagcgtcagcgacattcaagggcactttgggctaaaaaagaaagtgcttgtacacggatggaaatattctagaagaacataaaaggaatttcctcttaggaggttagggaaatgagcacgaagtatgttttggtgcagttttttgttcaacccaatgcgtattttcatattgagaggcaatataaatggagcgaaagtatcttgagaaaaaaaaaaaaactaccagaacttgccgttgctgaaaagtaatattttctctttcgagagttttcatggccttttaaattacacccccacctccacaggcaaataaatttgttttggaatgcataccacatcatctggctctagaaacgtattttgtgtagctcccctagcaagaatataggttaaagcgtaaatttaattcctggctctattttacatcccaatttttattttcctctcattcccactttacgttgtttcaaataacctagtttgtgtatccctgtaagtcattttggtataaagtaggttataagtgtacatgcgaaaagatgtttttaacaaaaatgtaactga

SEQ ID NO: 176505 - DNA, 519 bp, Homo sapiens
  Payload ID: 14647
  Gene Symbol: RPL27A
  Gene Name: ribosomal protein L27a
  ENST ID: ENST00000526562
  CDS Start-End: 202-477
gccatccagactgaggaagacccggaaacttaggggccacgtgagccacggccacggccgcataggcaagcaccggaagcaccccggcggccgcggtaatgctggtggtctgcatcaccaccggatcaacttcgacaaatatgtgtatgaaggtggttgttacctcttcctagccacccaggctactttgggaaagttggtatgaagcattaccacttaaagaggaaccagagcttctgcccaactgtcaaccttgacaaattgtggactttggtcagtgaacagacacgggtgaatgctgctaaaaacaagactggggctgctcccatcattgatgtggtgcgatcgggctactacaaagttctgggaaagggaaagctcccaaagcagcctgtcatcgtgaaggccaaattcttcagcagaagagctgaggagaagattaagagtgttgggggggcctgtgtcctggtggcttgaagccacatggagggagtttcattaaatgctaactactttttc

SEQ ID NO: 176506 - DNA, 558 bp, Homo sapiens
  Payload ID: 14647
  Gene Symbol: RPL27A
  Gene Name: ribosomal protein L27a
  ENST ID: ENST00000524496
  CDS Start-End: 242-517
ttcctttttcgtctgggctgccaacatgccatccagactgaggaagacccggaaacttaggggccacgtgagccacggccacggccgcataggcatgagccatcacaccggccccacgtagctttgtattcctgcaggcaagcaccggaagcaccccggcggccgcggtaatgctggtggtctgcatcaccaccggatcaacttcgacaaataccacccaggctactttgggaaagttggtatgaagcattaccacttaaagaggaaccagagcttctgcccaactgtcaaccttgacaaattgtggactttggtcagtgaacagacacgggtgaatgctgctaaaaacaagactggggctgctcccatcattgatgtggtgcgatcgggctactacaaagttctgggaaagggaaagctcccaaagcagcctgtcatcgtgaaggccaaattcttcagcagaagagctgaggagaagattaagagtgttgggggggcctgtgtcctggtggcttgaagccacatggagggagtttcattaaatgctaactacttttt

SEQ ID NO: 176507 - DNA, 878 bp, Homo sapiens
  Payload ID: 14647
  Gene Symbol: RPL27A
  Gene Name: ribosomal protein L27a
  ENST ID: ENST00000530022
  CDS Start-End: 561-836
caacatggtaggtgtttcgtttcttgcctcctcttccttgccggcggagacccctaagctgtattcccattgcccctagtcatccactccctaccatggtcggggcttccaggctgcgcatggccgcctgcggggcagggtggccggcgcgggcccggggcggggctcccggagccgtgtgttaggcccgcggttcggatctctaggacacgcgggcccctgcgctaccgtggtgagacctcacggccctgagcggatcggtaccctcagctttcccaaacgctccagaagttaggtctttgacccacaggcttacaggaccatctcggctggcgggcatcgccccctgcccctaattccttaggccttaccaccaagctttttccacacagccatccagactgaggaagacccggaaacttaggggccacgtgagccacggccacggccgcataggcaagcaccggaagcaccccggcggccgcggtaatgctggtggtctgcatcaccaccggatcaacttcgacaaataccacccaggctactttgggaaagttggtatgaagcattaccacttaaagaggaaccagagcttctgcccaactgtcaaccttgacaaattgtggactttggtcagtgaacagacacgggtgaatgctgctaaaaacaagactggggctgctcccatcattgatgtggtgcgatcgggctactacaaagttctgggaaagggaaagctcccaaagcagcctgtcatcgtgaaggccaaattcttcagcagaagagctgaggagaagattaagagtgttgggggggcctgtgtcctggtggcttgaagccacatggagggagtttcattaaatgctaactactttttc

SEQ ID NO: 176508 - DNA, 867 bp, Homo sapiens
  Payload ID: 14647
  Gene Symbol: RPL27A
  Gene Name: ribosomal protein L27a
  ENST ID: ENST00000531978
  CDS Start-End: 27-353
cttcctttttcgtctgggctgccaacatgccatccagactgaggaagacccggaaacttaggggccacgtgagccacggccacggccgcataggcaagcaccggaagcaccccggcggccgcggtaatgctggtggtctgcatcaccaccggatcaacttcgacaaataccacccaggctactttgggaaagttggtatgaagcattaccacttaaagaggaaccagagcttctgcccaactgtcaaccttgacaaattgtggactttggtcagtgaacagacacgggtgaatgctgctaaaaacaagactggggctgctcccatcattgatgtggtgcgatcggtaagttaattggatgtttttctgtacttccataccttcccttacaaaactctggcttaatctaatccacttatataatctgtacttcccagttacctaccagacattgatattcttcctgtggtagaattatcataggtagttccctatccgtagcagtgcctactgtcactgcccaggttgtatcaggtttgcatttcgtgcttgaactatagctggttttcactgagcacagctcttggcccttcatgttctccagataatagaatcctaatatgttccattgatactcagtgccatgcattatctgaagagattttcccccaaaacagatgtattatgtctgtccttgcgggggttctggtccctgtgtcagtcttaactctcatgaatatagaggtagtgttaagaggccagaaccctagggacgctttaaattcacttcccagcctatttaatgtccattgagtagttctggtggtcaggaaggtggttgtcttcttttgcttagcagggggtattt

SEQ ID NO: 176509 - DNA, 805 bp, Homo sapiens
  Payload ID: 14647
  Gene Symbol: RPL27A
  Gene Name: ribosomal protein L27a
  ENST ID: ENST00000530913
  CDS Start-End: 488-763
attgcctgagtgtgctagagtcctcgaagagtaactgctgaccttattcactggctgtgggccttatggcacagtcagtcaccaggttagagacatgcttcacattcacctacccacaaactagtggatgataaattttggctattcagaagacgtttattataggagtatgtagattttccatagagtgctgttatgtgacttgaattttagtctcggccctgcctctgacattgtcggtggtttatcctggttccaggaaataagactagccttttcctcatgatagtctttggtggtttttaaaacagttgtttaagtcaacagatgtatcatatgcctgacactgctctacaccagtgaataatttacactctaatagggggtggtaactataaagatgataaacatagcatcttaattggagtgtgtatgaaggtggttgttacctcttcctagccacccaggctactttgggaaagttggtatgaagcattaccacttaaagaggaaccagagcttctgcccaactgtcaaccttgacaaattgtggactttggtcagtgaacagacacgggtgaatgctgctaaaaacaagactggggctgctcccatcattgatgtggtgcgatcgggctactacaaagttctgggaaagggaaagctcccaaagcagcctgtcatcgtgaaggccaaattcttcagcagaagagctgaggagaagattaagagtgttgggggggcctgtgtcctggtggcttgaagccacatggagggagtttcattaaatgctaactactttttc

SEQ ID NO: 176510 - DNA, 406 bp, Homo sapiens
  Payload ID: 14647
  Gene Symbol: RPL27A
  Gene Name: ribosomal protein L27a
  ENST ID: ENST00000532359
  CDS Start-End: 23-364
ctttttcgtctgggctgccaacatgccatccagactgaggaagacccggaaacttaggggccacgtgagccacggccacggccgcataggcaagcaccggaagcaccccggcggccgcggtaatgctggtggtctgcatcaccaccggatcaacttcgacaaatatgaacagacacgggtgaatgctgctaaaaacaagactggggctgctcccatcattgatgtggtgcgatcgggctactacaaagttctgggaaagggaaagctcccaaagcagcctgtcatcgtgaaggccaaattcttcagcagaagagctgaggagaagattaagagtgttgggggggcctgtgtcctggtggcttgaagccacatggagggagtttcattaaatgctaactactttttc

SEQ ID NO: 176511 - DNA, 651 bp, Homo sapiens
  Payload ID: 14647
  Gene Symbol: RPL27A
  Gene Name: ribosomal protein L27a
  ENST ID: ENST00000534599
  CDS Start-End: 23-148
ctttttcgtctgggctgccaacatgccatccagactgaggaagacccggaaacttaggggccacgtgagccacggccacggccgcatagtagagtcgggggtttctccgtgttggccaggctggtctcgaactcctgacctcaggtgatctaccccccctcgtcctcctaaaatgctgggattacaggcatgagccatcacaccggccccacgtagctttgtattcctgcaggcaagcaccggaagcaccccggcggccgcggtaatgctggtggtctgcatcaccaccggatcaacttcgacaaataccacccaggctactttgggaaagttggtatgaagcattaccacttaaagaggaaccagagcttctgcccaactgtcaaccttgacaaattgtggactttggtcagtgaacagacacgggtgaatgctgctaaaaacaagactggggctgctcccatcattgatgtggtgcgatcgggctactacaaagttctgggaaagggaaagctcccaaagcagcctgtcatcgtgaaggccaaattcttcagcagaagagctgaggagaagattaagagtgttgggggggcctgtgtcctggtggcttgaagccacatggagggagtttcattaaatgctaactacttt

SEQ ID NO: 176512 - DNA, 297 bp, Homo sapiens
  Payload ID: 14647
  Gene Symbol: RPL27A
  Gene Name: ribosomal protein L27a
  ENST ID: ENST00000525981
  CDS Start-End: 1-128
ggaagacccggaaacttaggggccacgtgagccacggccacggccgcataggcaagcaccggaagcaccccggcggccgcggtaatgctggtggtctgcatcaccaccggatcaacttcgacaaataggctactacaaagttctgggaaagggaaagctcccaaagcagcctgtcatcgtgaaggccaaattcttcagcagaagagctgaggagaagattaagagtgttgggggggcctgtgtcctggtggcttgaagccacatggagggagtttcattaaatgctaactacttttt

SEQ ID NO: 176513 - DNA, 4796 bp, Homo sapiens
  Payload ID: 14648
  Gene Symbol: RPL28
  Gene Name: ribosomal protein L28
  Uniprot ID: P46779
  ENST ID: ENST00000344063
  CDS Start-End: 630-1043
gggagggcgaactgcaagagggctgccaggattagccgagggattccgaatgaagacggagtatttccgaacatacacacctctcccaagagcgtttccggagggttccgaaaatacccgagcgggcctcggcgccctcattggccatcaccgcgagggcttacgaagaccggaaatatccaaaggtgccggggctaggcttatatagttcacgcattcaccagttcattcataaaacaaatgtttgttgagcgcccatcatatgccaatcacagtgacaagtgctgggtgagcaatactggagagataacgctgaggtatgggtcccaggacctctcgaattggagccactcggaaatccagcggtagagtttcgaaaacttccgaacggttcccggaatacgctctcggccctctaaccgaagagttccgaatattcccgagcgttgagcgaattttcggcggaagcagccgaacatcatcgagccgcctcggaggtggggaccgacaactcctgtcgtgcccgcccggagaggaagcggaaatgcgtgtacggtattaaaggcgtcgcctcgcccctcgccttcctctttccgtctcaggtcgccgctgcgaagggagccgccgccatgtctgcgcatctgcaatggatggtcgtgcggaactgctccagtttcctgatcaagaggaataagcagacctacagcactgagcccaataacttgaaggcccgcaattccttccgctacaacggactgattcaccgcaagactgtgggcgtggagccggcagccgacggcaaaggtgtcgtggtggtcattaagcggagatccggccagcggaagcctgccacctcctatgtgcggaccaccatcaacaagaatgctcgcgccacgctcagcagcatcagacacatgatccgcaagaacaagtaccgccccgacctgcgcatggcagccatccgcagggccagcgccatcctgcgcagccagaagcctgtgatggtgaagaggaagcggacccgccccaccaagagctcctgagccccctgcccccagagcaataaagtcagctggctttctcacctgcctcgactgggcctccctttttgaaacgctctggggagctctggccctgtgtgttgtcattcaggccatgtcatcaaaactctgcatgtcaccttgtccatctggaggtgatgtcaatggctggccatgcaggaggggtggggtagctgccttgtccctggtgagggcaagggtcactgtcttcacagaaaaagtttgctgacttgtgattgagacctactgtcccattgtgaggtggcctgaagaatcccagctggggcagtggcttccattcagaagaagaaaggccttttctagcccagaagggtgcaggctgagggctgggccctgggccctggtgctgtagcacggtttggggacttggggtgttcccaagacctgggggacgacagacatcacgggaggaagatgagatgacttttgcatccagggagtgggtgcagccacatttggaggggatgggctttacttgatgcaacctcatctctgagatgggcaacttggtgggtggtggcttataactgtaagggagatggcagccccagggtacagccagcaggcattgagcagccttagcattgtccccctactcccgtcctccaggtgtccccatccctcccctgtctctttgagctggctcttgtcacttaggtctcatctcagtggccgctcctgggccaccctgtcacccaagctttcctgattgcccagccctcttgtttcctttggcctgtttgctccctagtgtttattacagcttgtgaggccaggagtttgagaccatcctaggcaacataatgagacaccgtctctaaaataaaattagctgggtgtggtggtgcaccgcctgtggtcccagctcctcagaggttgagtagaggctgaggtgagcggagcacttgagccaagagtatgaggctgcagtgagcccatgagccccaccactacactccagcctggaagacaccatgacacacagtgaggcctggatggggaaagagtcctgctgttgatcctcacatgtttcctgggcacctaactctgtcagccactgccagggaccaaggatccagcatccatggcacccctggttcctgccatcctggggtacccgattcaaagaaggactctgctccctgtctgagaccacccccggctctgactgagagtaaggggactgtcagggcctcgacttgccattggttggggtcgtacggggctgggagccctgcgttttgaggcagaccactgcccttccgacctcagtcctgtctgctccagtcttgcccagctcgaaggagagcagatctgaccacttgccagcccctgtctgctgtgaattaccatttcctttgtccttcccttagttgggtctattagctcagattgagaggtgttgccttaaaactgagttgggtgacttggtacctgctcaggaccccccgcactgtcccaatcccactcaggcccacctccagctggcctcactccgctggtgacttcgtacctgctcaggagcccccactgtcccagtcccactcaggcccatctctggctggcctcactgcgctgggactccgccttcataaggagagctcactgctcacgttagtagatggccccttctcgtgaggcctctcccctggcacctgcttcagttgtcctccacagcactgatttgcagcccacaagctggcaggtttatctgtctcatgtttgtcttgtgctggtgggcaaggggtttgtctagcacaccagcatataatgagatgcttgatgaatggtgcatattgaatgtataaagcccaccggtcctgagagtttgctcactggagactttctggagatggagtctcgctctgttgcccaggctggcgagtgcaatggcgcgatcttggctcactgcagcctccacctcctgggttcaagcgattctcctgcctcagcctcccgagtagctgggattacaggtgggtgtcaccacacccagctcagtattgtatttttagcagagatggggtttcaccattttgcccaggctggtttggaactcctgacttcaaattacccacctgcctcagcctcccaaagtgctggcattacaggcgctcgaggctttctgatgtggctgctgctgctcagaaggccttgtccttaaccacctccttgcctgccctggaggcttgtgcctctaggccccaccccctgtggagtcctgctggctttctccatccctatctgaatcctccctgctgtgtggcctcccctggtctcatccgtaacacagcccagcttagtgggcctctgttcctgcgggtggccagcctgtctgtgtggctgggctggggaggccacgtctggtatctgaatgctatcggtgggttggggtggaggaaccaggagagggctggagggagggagatggtctcagccccacagagtttggagtcctcagtgtgctgagcaaacgtggagacaccatttccctcctctagacctcatcttggagagagagatgttggatggggccatctattccagctttattcacacaaatcatgtctgttggcctggaaattggaaaaccagttaaaccaaaaacatgatattaagaaaacaggcaggctcaccatagtaaaaatgctgaaagccaaagacaaaattgggagaacaaaagaaaagcgtcttgtcacatacagaaggtccctgataaagttagtagctgccctcatcagaaaccaggcccaggcagtggggacacatccagagtgctgaaagaacctcccccaggtcatcctatccccaagagtgatgcccggcagcattcccagctcagggctaatggttcacggaagccaggaatcaaactgcctgggttccagtcccagctctgccagttatgcccagctgtggggacttgggcagctcgtttagtagcaccgtgcctcagtttcccatatgtaaaaggccattttgagtgcctttcacagccctgcataaggcaggtgtctcagtgttcactgctgtctctccagctcttagtccagtagctgcatggtgagtgagcgtagggcgcaccctggaaggctgccaagcccaaagttgtgcagagcgctggggactccagactccccacagcagcagagactcgggactgaggcatcctctgttcacaggacatgctggcatctactgggtcagggctctgctgctcggtggctgtgcaaccttgggcaagttcctcaacctctctgtgtcttcgtaccctcatctgtaacatgcgtgtcgatagaccctactactcagggttgatgagaagattaaatgtgcaaaacctgcttgactgtgcccacaaatcctgattgtaggaataaattaatgactttttataaatattttgatcagatggactcatgatcacagatgtcttcacatgcctatgactaatttgtacacaaactaatgctcgtgtttcccaagcacctggaagacatgccagatccatgtgcagtaatgcctggtggctccaggtctgccccgccgtcctgtggggctgtgagctttcccagcctcctgcccgtgtttgtgaatatcattctgtcctcagctgcatttccagcccaggctgtttggcgctgcccaggaatggtatcaattcccctgtttctcttgtagccagttactagaataaaatcatctactttaaaa

SEQ ID NO: 176514 - DNA, 573 bp, Homo sapiens
  Payload ID: 14648
  Gene Symbol: RPL28
  Gene Name: ribosomal protein L28
  Uniprot ID: P46779
  ENST ID: ENST00000428193
  CDS Start-End: 43-252
ctctttccgtctcaggtcgccgctgcgaagggagccgccgccatgtctgcgcatctgcaatggatggtcgtgcggaactgctccagtttcctgatcaagaggaataagcagacctacagcactgagcccaataacttgaaggcccgcaattccttccgctacaacggactgattcaccgcaagactgtgggcgtggagccggcagccgacggcaaaggtgtcgtggtggtcattaagcggagatccgagtgagtttttctcaggtccttgattggaactgcctcagagccaagggtccttttactcagtggcagcaacaaacgcagtctgttggctagtgatcctcctgtctcagggacacgtagtccagggagcagccaattgcttggcacttggggaccccgttctggggagtcctgaaagctttcacctcttggattgccgaatacatgggtggcccttcctagactaagggactggcctgagtgaggctgggcctctcagccaagctgatgttgaaccactgctgtggggatgggcctggggttcctgggaagctgttcatacccattg

SEQ ID NO: 176515 - DNA, 590 bp, Homo sapiens
  Payload ID: 14648
  Gene Symbol: RPL28
  Gene Name: ribosomal protein L28
  Uniprot ID: P46779
  ENST ID: ENST00000431533
  CDS Start-End: 43-306
ctctttccgtctcaggtcgccgctgcgaagggagccgccgccatgtctgcgcatctgcaatggatggtcgtgcggaactgctccagtttcctgatcaagaggaataagcagacctacagcactgagcccaataacttgaaggcccgcaattccttccgctacaacggactgattcaccgcaagactgtgggcgtggagccggcagccgacggcaaaggtgtcgtggtggtcattaagcggagatccggtgagttttgtctggtttgggccagagagcggcccctttcccgggtctgggagctgtgattttttactgtcaggcaggaagagcggtaactgccatcgcggcgggcatccctggcgccagggtgttggtctgggtaccggcttccctctcggccgacttgtcagctctgtgagccgcgcgcgtctgagcccgtgtcctcacctgtaaagtggagaaatgaaaaaggacctgaacttcctcggtggttgttgagagttaaggcacggggttgatgttttcagatgaaattctcaaagcaagtcagggtggggatggatggtttcatcccacaggtgggaagatt

SEQ ID NO: 176516 - DNA, 670 bp, Homo sapiens
  Payload ID: 14648
  Gene Symbol: RPL28
  Gene Name: ribosomal protein L28
  ENST ID: ENST00000560055
  CDS Start-End: 39-551
ttccgtctcaggtcgccgctgcgaagggagccgccgccatgtctgcgcatctgcaatggatggtcgtgcggaactgctccagtttcctgatcaagaggaataagcagacctacagcactgagcccaataacttgaaggcccgcaattccttccgctacaacggactgattcaccgcaagactgtgggcgtggagccggcagccgacggcaaaggtgtcgtggtggtcattaagcggagatccggccagcggaagcctgccacctcctatgtgcggaccaccatcaacaagaatgctcgcgccacgctcagcagcatcagacacatgatccgcaagaacaagtaccgccccgacctgcgcatgcttgcgggaagggttgggaggcagcaggctgtaagcagcctggagcaccagcctagaccaggacgcctccacctcagcaacaccgcagccaggtcattctgtgtcatggagccatctcgtacgctgcaggatttgggcagcacccttggcctccacccactagatgctagtggcacccccgagttgtgacaaccctttctggtctcctgacaatgcataataccccttggggggcaaaatcacctctggctgagaaacactggtttatgaaccctatcgctattaaaaaaccactgaactgtatactt

SEQ ID NO: 176517 - DNA, 616 bp, Homo sapiens
  Payload ID: 14648
  Gene Symbol: RPL28
  Gene Name: ribosomal protein L28
  Uniprot ID: P46779
  ENST ID: ENST00000558815
  CDS Start-End: 43-552
ctctttccgtctcaggtcgccgctgcgaagggagccgccgccatgtctgcgcatctgcaatggatggtcgtgcggaactgctccagtttcctgatcaagaggaataagcagacctacagcactgagcccaataacttgaaggcccgcaattccttccgctacaacggactgattcaccgcaagactgtgggcgtggagccggcagccgacggcaaaggtgtcgtggtggtcattaagcggagatccggccagcggaagcctgccacctcctatgtgcggaccaccatcaacaagaatgctcgcgccacgctcagcagcatcagacacatgatccgcaagaacaagtaccgccccgacctgcgcatggacatgctggcatctactgggtcagggctctgctgctcggtggctgtgcaaccttgggcaagttcctcaacctctctgtgtcttcgtaccctcatctgtaacatgcgtgtcgatagaccctactactcagggttgatgagaagattaaatgtgcaaaacctgcttgactgtgcccacaaatcctgattgtaggaataaattaatgactttttataaatattttgatcagatggactcatgatcacagatg

SEQ ID NO: 176518 - DNA, 1204 bp, Homo sapiens
  Payload ID: 14648
  Gene Symbol: RPL28
  Gene Name: ribosomal protein L28
  Uniprot ID: P46779
  ENST ID: ENST00000560583
  CDS Start-End: 41-532
ctttccgtctcaggtcgccgctgcgaagggagccgccgccatgtctgcgcatctgcaatggatggtcgtgcggaactgctccagtttcctgatcaagaggaataagcagacctacagcactgagcccaataacttgaaggcccgcaattccttccgctacaacggactgattcaccgcaagactgtgggcgtggagccggcagccgacggcaaaggtgtcgtggtggtcattaagcggagatccggccagcggaagcctgccacctcctatgtgcggaccaccatcaacaagaatgctcgcgccacgctcagcagcatcagacacatgatccgcaagaacaagtaccgccccgacctgcgcatggtgagctggggtttggggatcaggcttggggagactggccagtgctgtggggaagggcctcccactactggttgcaatatgggctggagagggatggattcttgctttcagcctactccccacacccagcattggcctagggggcggcttgtggagtgtatgggctgagccttgctctgctcccccgcccccaggcagccatccgcagggccagcgccatcctgcgcagccagaagcctgtgatggtgaagaggaagcggacccgccccaccaagagctcctgagccccctgcccccagagcaataaagtcagctggctttctcacctgcctcgactgggcctccctttttgaaacgctctggggagctctggccctgtgtgttgtcattcaggccatgtcatcaaaactctgcatgtcaccttgtccatctggaggtgatgtcaatggctggccatgcaggaggggtggggtagctgccttgtccctggtgagggcaagggtcactgtcttcacagaaaaagtttgctgacttgtgattgagacctactgtcccattgtgaggtggcctgaagaatcccagctggggcagtggcttccattcagaagaagaaaggccttttctagcccagaagggtgcaggctgagggctgggccctgggccctggtgctgtagcacggtttggggacttggggtgttcccaagacctgggggacgacagacatcacgggaggaagatgagatgacttttgcatccagggagtgggtgcagccacatttggaggggatgggctttacttgatgcaacctcatctctgagatgggcaacttggtgggtgg

SEQ ID NO: 176519 - DNA, 444 bp, Homo sapiens
  Payload ID: 14648
  Gene Symbol: RPL28
  Gene Name: ribosomal protein L28
  ENST ID: ENST00000558131
  CDS Start-End: 9-278
ccgccgccatgtctgcgcatctgcaatggatggtcgtgcggaactgctccagtttcctgatcaagaggaataagcagacctacagcactgagcccaataacttgaaggcccgcaattccttccgctacaacggactgattcaccgcaagactgtgggcgtggagccggcagccgacggcaaaggtgtcgtggtggccagcggaagcctgccacctcctatgtgcggaccaccatcaacaagaatgctcgcgccacgctcagcagcatcagacacatgatccgcaagaacaagtaccgccccgacctgcgcatggcagccatccgcagggccagcgccatcctgcgcagccagaagcctgtgatggtgaagaggaagcggacccgccccaccaagagctcctgagccccctgcccccagagcaataaagtcagctggctttctca

SEQ ID NO: 176520 - DNA, 852 bp, Homo sapiens
  Payload ID: 14648
  Gene Symbol: RPL28
  Gene Name: ribosomal protein L28
  Uniprot ID: P46779
  ENST ID: ENST00000559463
  CDS Start-End: 398-811
gggaggtgagcgttcgtcttcctcgcgtggtcgccatctccggcccgccgcgcactccctctcagtcctctgcctgccttctccccttgcgcctcaagggtcattggcggaccccaacccctccccgtgaagtcgttgtgaattttcaagttattttcccctcactctcattcgccgcagctagtctcggctgcctgaattcggtcccgccgccttaggtcactcagtcccgcctgacaagagttctaggtcgctgtctgccctcaggggtctcccattcacccaagttcccagtcgctctcttcctctgctgtccgagcgtggcccgtggcctaacgctgctttagttctctgtgtctgacgctttccctgtgcccgtttccccgcagccgccgccatgtctgcgcatctgcaatggatggtcgtgcggaactgctccagtttcctgatcaagaggaataagcagacctacagcactgagcccaataacttgaaggcccgcaattccttccgctacaacggactgattcaccgcaagactgtgggcgtggagccggcagccgacggcaaaggtgtcgtggtggtcattaagcggagatccggccagcggaagcctgccacctcctatgtgcggaccaccatcaacaagaatgctcgcgccacgctcagcagcatcagacacatgatccgcaagaacaagtaccgccccgacctgcgcatggcagccatccgcagggccagcgccatcctgcgcagccagaagcctgtgatggtgaagaggaagcggacccgccccaccaagagctcctgagccccctgcccccagagcaataaagtcagctggctttctca

SEQ ID NO: 176521 - DNA, 671 bp, Homo sapiens
  Payload ID: 14648
  Gene Symbol: RPL28
  Gene Name: ribosomal protein L28
  ENST ID: ENST00000558752
  CDS Start-End: 2-340
catgtctgcgcatctgcaatggatggtcgtgcggaactgctccagtttcctgatcaagaggaataagcagacctacagcactgagcccaataacttgaaggcccgcaattccttccgctacaacggactgattcaccgcaagactgtgggcgtggagccggcagccgacggcaaaggtgtcgtggtggtcattaagcggagatccggcaggaagagcggtaactgccatcgcggcgggcatccctggcgccagggtgttggtctgggtaccggcttccctctcggccgacttgtcagctctgtgagccgcgcgcgtctgagcccgtgtcctcacctgtaaagtggagaaatgaaaaaggacctgaacttcctcggtggttgttgagagttaaggcacggggttgatgttttcagatgaaattctcaaagcaagtcagggtggggatggatggtttcatcccacaggtgggaagattgaggcacaacaggggaggggccctcgctaccacacttaggaggggacaggctgggttggttgcagccatttgattcccattttgcctgtgtaggttagagaagaggtcttggggaccccactccatacattgtgctgtcaggtgcaggcctttttggggattccctgaatgttcgtgtgagtcgggggtctctaa

SEQ ID NO: 176522 - DNA, 723 bp, Homo sapiens
  Payload ID: 14649
  Gene Symbol: RPL29
  Gene Name: ribosomal protein L29
  Uniprot ID: P47914
  ENST ID: ENST00000294189
  CDS Start-End: 95-574
ttccggcgttgttgaccctatttcccgtgctgcaccgcagcccctttctcttccggttctaggcgcttcgggagccgcggcttatggtgcagacatggccaagtccaagaaccacaccacacacaaccagtcccgaaaatggcacagaaatggtatcaagaaaccccgatcacaaagatacgaatctcttaagggggtggaccccaagttcctgaggaacatgcgctttgccaagaagcacaacaaaaagggcctaaagaagatgcaggccaacaatgccaaggccatgagtgcacgtgccgaggctatcaaggccctcgtaaagcccaaggaggttaagcccaagatcccaaagggtgtcagccgcaagctcgatcgacttgcctacattgcccaccccaagcttgggaagcgtgctcgtgcccgtattgccaaggggctcaggctgtgccggccaaaggccaaggccaaggccaaggccaaggatcaaaccaaggcccaggctgcagccccagcttcagttccagctcaggctcccaaacgtacccaggcccctacaaaggcttcagagtagatatctctgccaacatgaggacagaaggactggtgcgaccccccacccccgcccctgggctaccatctgcatggggctggggtcctcctgtgctatttgtacaaataaacctgaggcaggatttgttagcctctgtctatgatcctggg

SEQ ID NO: 176523 - DNA, 551 bp, Homo sapiens
  Payload ID: 14649
  Gene Symbol: RPL29
  Gene Name: ribosomal protein L29
  Uniprot ID: P47914
  ENST ID: ENST00000475248
  CDS Start-End: 46-525
acgggtggcggcggggcgcgggctgcggagaggactggtgcagacatggccaagtccaagaaccacaccacacacaaccagtcccgaaaatggcacagaaatggtatcaagaaaccccgatcacaaagatacgaatctcttaagggggtggaccccaagttcctgaggaacatgcgctttgccaagaagcacaacaaaaagggcctaaagaagatgcaggccaacaatgccaaggccatgagtgcacgtgccgaggctatcaaggccctcgtaaagcccaaggaggttaagcccaagatcccaaagggtgtcagccgcaagctcgatcgacttgcctacattgcccaccccaagcttgggaagcgtgctcgtgcccgtattgccaaggggctcaggctgtgccggccaaaggccaaggccaaggccaaggccaaggatcaaaccaaggcccaggctgcagccccagcttcagttccagctcaggctcccaaacgtacccaggcccctacaaaggcttcagagtagatatctctgccaacatgaggacagaa

SEQ ID NO: 176524 - DNA, 670 bp, Homo sapiens
  Payload ID: 14649
  Gene Symbol: RPL29
  Gene Name: ribosomal protein L29
  Uniprot ID: P47914
  ENST ID: ENST00000479017
  CDS Start-End: 71-550
tgccatccgcgacttacgggtggcggcggggcgcgggctgcggagaggactggtgaccgaccgtgcagacatggccaagtccaagaaccacaccacacacaaccagtcccgaaaatggcacagaaatggtatcaagaaaccccgatcacaaagatacgaatctcttaagggggtggaccccaagttcctgaggaacatgcgctttgccaagaagcacaacaaaaagggcctaaagaagatgcaggccaacaatgccaaggccatgagtgcacgtgccgaggctatcaaggccctcgtaaagcccaaggaggttaagcccaagatcccaaagggtgtcagccgcaagctcgatcgacttgcctacattgcccaccccaagcttgggaagcgtgctcgtgcccgtattgccaaggggctcaggctgtgccggccaaaggccaaggccaaggccaaggccaaggatcaaaccaaggcccaggctgcagccccagcttcagttccagctcaggctcccaaacgtacccaggcccctacaaaggcttcagagtagatatctctgccaacatgaggacagaaggactggtgcgaccccccacccccgcccctgggctaccatctgcatggggctggggtcctcctgtgctatttgtacaaataaacctgaggcagg

SEQ ID NO: 176525 - DNA, 537 bp, Homo sapiens
  Payload ID: 14649
  Gene Symbol: RPL29
  Gene Name: ribosomal protein L29
  Uniprot ID: P47914
  ENST ID: ENST00000492277
  CDS Start-End: 59-537
cgggtggcggcggggcgcgggctgcggagaggactggtgaccgaccgtgtgtgcagacatggccaagtccaagaaccacaccacacacaaccagtcccgaaaatggcacagaaatggtatcaagaaaccccgatcacaaagatacgaatctcttaagggggtggaccccaagttcctgaggaacatgcgctttgccaagaagcacaacaaaaagggcctaaagaagatgcaggccaacaatgccaaggccatgagtgcacgtgccgaggctatcaaggccctcgtaaagcccaaggaggttaagcccaagatcccaaagggtgtcagccgcaagctcgatcgacttgcctacattgcccaccccaagcttgggaagcgtgctcgtgcccgtattgccaaggggctcaggctgtgccggccaaaggccaaggccaaggccaaggccaaggatcaaaccaaggcccaggctgcagccccagcttcagttccagctcaggctcccaaacgtacccaggcccctacaaaggcttcagagta

SEQ ID NO: 176526 - DNA, 880 bp, Homo sapiens
  Payload ID: 14649
  Gene Symbol: RPL29
  Gene Name: ribosomal protein L29
  ENST ID: ENST00000481629
  CDS Start-End: 34-216
ggcgcttcgggagccgcggcttatggtgcagacatggccaagtccaagaaccacaccacacacaaccagtcccgaaaatggcacagaaatggtatcaagaaaccccgatcacaaagatacgaatctcttaagggggtgagtgcactgaatcacatggaagtgtcttttcttggttccaggtgcacagtcaaggcctctcatgtagtttttctctagctttggcttctgcctgagcacagcctaactggcccacccaaagcctgcaattcctttttctaccctaccagacccataataaagctttccttggtctccacagcctgaagtgtaaccctctggtcagggtgtaacctgcctcctgagggcagtttggctatctcccttgcttggcagtggcacttagggtaaggagtggccttgtctgagtgcgtgcagggcacattcccacactgaccagccttatgacctccatctgacccagtgctggagttggggtcagcttctcttcctgtgtcagggggttctaaggattagctgagaaggctggagggtctaggggagagctgagcatgtccccagtctgttccttccctttacttttgctctctgttccgtggagtgaatcacaaactctgagcctcagtttccccatatcccaccttggctataagtcttttggaccagacttggtatttaattgacaccttcttctaaagaggggagggggtgtccctgaggggatgtcaggaaaaaacttggtcgaacccctgctgtaggaagttgaagccccacaaccttggcagacagggcagcaaagcagcttgtaattttgttcttgaaggaggtctgcacagcattacccaggtggcgtattggctcc

SEQ ID NO: 176527 - DNA, 742 bp, Homo sapiens
  Payload ID: 14649
  Gene Symbol: RPL29
  Gene Name: ribosomal protein L29
  Uniprot ID: P47914
  ENST ID: ENST00000466397
  CDS Start-End: 142-621
gcttatggtgagtgttggccgcgcggcatccgatgccatccgcgacttacgggtggcggcggggcgcgggctgcggagaggactggtgaccgaccgtgtgtctgtcgggagcaaaagctgcggggtgggaatggtgcagacatggccaagtccaagaaccacaccacacacaaccagtcccgaaaatggcacagaaatggtatcaagaaaccccgatcacaaagatacgaatctcttaagggggtggaccccaagttcctgaggaacatgcgctttgccaagaagcacaacaaaaagggcctaaagaagatgcaggccaacaatgccaaggccatgagtgcacgtgccgaggctatcaaggccctcgtaaagcccaaggaggttaagcccaagatcccaaagggtgtcagccgcaagctcgatcgacttgcctacattgcccaccccaagcttgggaagcgtgctcgtgcccgtattgccaaggggctcaggctgtgccggccaaaggccaaggccaaggccaaggccaaggatcaaaccaaggcccaggctgcagccccagcttcagttccagctcaggctcccaaacgtacccaggcccctacaaaggcttcagagtagatatctctgccaacatgaggacagaaggactggtgcgaccccccacccccgcccctgggctaccatctgcatggggctggggtcctcctgtgctatttgtacaaataaacctgaggcagga

SEQ ID NO: 176528 - DNA, 719 bp, Homo sapiens
  Payload ID: 14649
  Gene Symbol: RPL29
  Gene Name: ribosomal protein L29
  ENST ID: ENST00000480306
  CDS Start-End: 34-147
ggcgcttcgggagccgcggcttatggtgcagacatggccaagtccaagaaccacaccacacacaaccagtcccgaaaatggcacagaaatggtatcaagaaaccccgatcacaaagatacgaatctcttaaggggcctgaagtgtaaccctctggtcagggtgtaacctgcctcctgagggcagtttggctatctcccttgcttggcagtggcacttagggtggaccccaagttcctgaggaacatgcgctttgccaagaagcacaacaaaaagggcctaaagaagatgcaggccaacaatgccaaggccatgagtgcacgtgccgaggctatcaaggccctcgtaaagcccaaggaggttaagcccaagatcccaaagggtgtcagccgcaagctcgatcgacttgcctacattgcccaccccaagcttgggaagcgtgctcgtgcccgtattgccaaggggctcaggctgtgccggccaaaggccaaggccaaggccaaggccaaggatcaaaccaaggcccaggctgcagccccagcttcagttccagctcaggctcccaaacgtacccaggcccctacaaaggcttcagagtagatatctctgccaacatgaggacagaaggactggtgcgaccccccacccccgcccctgggctaccatctgcatggggctggggtcctcctgtgctatttgtacaaataaacctgaggcagga

SEQ ID NO: 176529 - DNA, 713 bp, Homo sapiens
  Payload ID: 14649
  Gene Symbol: RPL29
  Gene Name: ribosomal protein L29
  Uniprot ID: P47914
  ENST ID: ENST00000495383
  CDS Start-End: 114-593
cgcgcggcatccgatgccatccgcgacttacgggtggcggcggggcgcgggctgcggagaggactggtgaccgaccgtgtgtctgtcgggagcaaaagctgcggggtgcagacatggccaagtccaagaaccacaccacacacaaccagtcccgaaaatggcacagaaatggtatcaagaaaccccgatcacaaagatacgaatctcttaagggggtggaccccaagttcctgaggaacatgcgctttgccaagaagcacaacaaaaagggcctaaagaagatgcaggccaacaatgccaaggccatgagtgcacgtgccgaggctatcaaggccctcgtaaagcccaaggaggttaagcccaagatcccaaagggtgtcagccgcaagctcgatcgacttgcctacattgcccaccccaagcttgggaagcgtgctcgtgcccgtattgccaaggggctcaggctgtgccggccaaaggccaaggccaaggccaaggccaaggatcaaaccaaggcccaggctgcagccccagcttcagttccagctcaggctcccaaacgtacccaggcccctacaaaggcttcagagtagatatctctgccaacatgaggacagaaggactggtgcgaccccccacccccgcccctgggctaccatctgcatggggctggggtcctcctgtgctatttgtacaaataaacctgaggcagg

SEQ ID NO: 176530 - DNA, 1442 bp, Homo sapiens
  Payload ID: 14650
  Gene Symbol: RPL3
  Gene Name: ribosomal protein L3
  Uniprot ID: P39023
  ENST ID: ENST00000216146
  CDS Start-End: 175-1386
gaacgaaagctaggagcggaagagcgtgcgtggaaatggcgctcggtacgtgcccccgacctgtcgtctgccgcgggggcgcgctcgcacgccggaaggggcggggccagatttggctttatatagcggacccgtaaggccgaccggcctctaccggcgggatttgatggcgtgatgtctcacagaaagttctccgctcccagacatgggtccctcggcttcctgcctcggaagcgcagcagcaggcatcgtgggaaggtgaagagcttccctaaggatgacccgtccaagccggtccacctcacagccttcctgggatacaaggctggcatgactcacatcgtgcgggaagtcgacaggccgggatccaaggtgaacaagaaggaggtggtggaggctgtgaccattgtagagacaccacccatggtggttgtgggcattgtgggctacgtggaaacccctcgaggcctccggaccttcaagactgtctttgctgagcacatcagtgatgaatgcaagaggcgtttctataagaattggcataaatctaagaagaaggcctttaccaagtactgcaagaaatggcaggatgaggatggcaagaagcagctggagaaggacttcagcagcatgaagaagtactgccaagtcatccgtgtcattgcccacacccagatgcgcctgcttcctctgcgccagaagaaggcccacctgatggagatccaggtgaacggaggcactgtggccgagaagctggactgggcccgcgagaggcttgagcagcaggtacctgtgaaccaagtgtttgggcaggatgagatgatcgacgtcatcggggtgaccaagggcaaaggctacaaaggggtcaccagtcgttggcacaccaagaagctgccccgcaagacccaccgaggcctgcgcaaggtggcctgtattggggcatggcatcctgctcgtgtagccttctctgtggcacgcgctgggcagaaaggctaccatcaccgcactgagatcaacaagaagatttataagattggccagggctaccttatcaaggacggcaagctgatcaagaacaatgcctccactgactatgacctatctgacaagagcatcaaccctctgggtggctttgtccactatggtgaagtgaccaatgactttgtcatgctgaaaggctgtgtggtgggaaccaagaagcgggtgctcaccctccgcaagtccttgctggtgcagacgaagcggcgggctctggagaagattgaccttaagttcattgacaccacctccaagtttggccatggccgcttccagaccatggaggagaagaaagcattcatgggaccactgaagaaagaccgaattgcaaaggaagaaggagcttaatgccaggaacagattttgcagttggtggggtctcaataaaagttattttccactga

SEQ ID NO: 176531 - DNA, 1205 bp, Homo sapiens
  Payload ID: 14650
  Gene Symbol: RPL3
  Gene Name: ribosomal protein L3
  ENST ID: ENST00000402527
  CDS Start-End: 388-1205
ctctaccggcgggatttgatggcgtgatggtatgtgttgtaatggcggccgtttcattgtcaccggcgtcggcacggctgaatccgcgacgcatcgccgccatcccgtcttggccggcgccgggggtttgctttaggggcacgggcgacccagcggggacttcagtctggcctattttctggaaagtcgagaggcttgtgaagagcgcttggaggactggctttgggcctgcagtctcacagaaagttctccgctcccagacatgggtccctcggcttcctgcctcggaagcgcagcagcaggcatcgtgggaaggtgaagagcttccctaaggatgacccgtccaagccggtccacctcacagccttcctgggatacaaggctggcatgactcacatcgtgcgggaagtcgacaggccgggatccaaggtgaacaagaaggaggtggtggaggctgtgaccattgtagagacaccacccatggtggttgtgggcattgtgggctacgtggaaacccctcgaggcctccggaccttcaagactgtctttgctgagcacatcagtgatgaatgcaagaggcgtttctataagaattggcataaatctaagaagaaggcctttaccaagtactgcaagaaatggcaggatgaggatggcaagaagcagctggagaaggacttcagcagcatgaagaagtactgccaagtcatccgtgtcattgcccacacccagatgcgcctgcttcctctgcgccagaagaaggcccacctgatggagatccaggtgaacggaggcactgtggccgagaagctggactgggcccgcgagaggcttgagcagcaggtacctgtgaaccaagtgtttgggcaggatgagatgatcgacgtcatcggggtgaccaagggcaaaggctacaaaggggtcaccagtcgttggcacaccaagaagctgccccgcaagacccaccgaggcctgcgcaaggtggcctgtattggggcatggcatcctgctcgtgtagccttctctgtggcacgcgctgggcagaaaggctaccatcaccgcactgagatcaacaagaagatttataagattggccagggctaccttatcaaggacggcaagctgatcaagaacaatgcctccactgactatgacctatctgacaagagcatcaaccctctgggtggctttgtccactatggtga

SEQ ID NO: 176532 - DNA, 1289 bp, Homo sapiens
  Payload ID: 14650
  Gene Symbol: RPL3
  Gene Name: ribosomal protein L3
  ENST ID: ENST00000401609
  CDS Start-End: 176-1231
cggtgatttttttcccacctagtctcacagaaagttctccgctcccagacatgggtccctcggcttcctgcctcggaagcgcagcagcaggcatcgtgggaaggtgaagagcttccctaaggatgacccgtccaagccggtccacctcacagccttcctgggatacaaggctggcatgactcacatcgtgcgggaagtcgacaggccgggatccaaggtgaacaagaaggaggtggtggaggctgtgaccattgtagagacaccacccatggtggttgtgggcattgtgggctacgtggaaacccctcgaggcctccggaccttcaagactgtctttgctgagcacatcagtgatgaatgcaagaggcgtttctataagaattggcataaatctaagaagaaggcctttaccaagtactgcaagaaatggcaggatgaggatggcaagaagcagctggagaaggacttcagcagcatgaagaagtactgccaagtcatccgtgtcattgcccacacccagatgcgcctgcttcctctgcgccagaagaaggcccacctgatggagatccaggtgaacggaggcactgtggccgagaagctggactgggcccgcgagaggcttgagcagcaggtacctgtgaaccaagtgtttgggcaggatgagatgatcgacgtcatcggggtgaccaagggcaaaggctacaaaggggtcaccagtcgttggcacaccaagaagctgccccgcaagacccaccgaggcctgcgcaaggtggcctgtattggggcatggcatcctgctcgtgtagccttctctgtggcacgcgctgggcagaaaggctaccatcaccgcactgagatcaacaagaagatttataagattggccagggctaccttatcaaggacggcaagctgatcaagaacaatgcctccactgactatgacctatctgacaagagcatcaaccctctgggtggctttgtccactatggtgaagtgaccaatgactttgtcatgctgaaaggctgtgtggtgggaaccaagaagcgggtgctcaccctccgcaagtccttgctggtgcagacgaagcggcgggctctggagaagattgaccttaagttcattgacaccacctccaagtttggccatggccgcttccagaccatggaggagaagaaagcattcatgggaccactgaagaaagaccgaattgcaaaggaagaaggagcttaatgccaggaacagattttgcagttggtggggtctcaataaaagttattttccactgaca

SEQ ID NO: 176533 - DNA, 782 bp, Homo sapiens
  Payload ID: 14650
  Gene Symbol: RPL3
  Gene Name: ribosomal protein L3
  ENST ID: ENST00000427905
  CDS Start-End: 1-782
ggtatgtgttgtaatggcggccgtttcattgtcaccggcgtcggcacggctgaatccgcgacgcatcgccgccatcccgtcttggccggcgccggggtctcacagaaagttctccgctcccagacatgggtccctcggcttcctgcctcggaagcgcagcagcaggcatcgtgggaaggtgaagagcttccctaaggatgacccgtccaagccggtccacctcacagccttcctgggatacaaggctggcatgactcacatcgtgcgggaagtcgacaggccgggatccaaggtgaacaagaaggaggtggtggaggctgtgaccattgtagagacaccacccatggtggttgtgggcattgtgggctacgtggaaacccctcgaggcctccggaccttcaagactgtctttgctgagcacatcagtgatgaatgcaagaggcgtttctataagaattggcataaatctaagaagaaggcctttaccaagtactgcaagaaatggcaggatgaggatggcaagaagcagctggagaaggacttcagcagcatgaagaagtactgccaagtcatccgtgtcattgcccacacccagatgcgcctgcttcctctgcgccagaagaaggcccacctgatggagatccaggtgaacggaggcactgtggccgagaagctggactgggcccgcgagaggcttgagcagcaggtacctgtgaaccaagtgtttgggcaggatgagatgatcgacgtcatcggggtgaccaagggcaaaggctacaaag

SEQ ID NO: 176534 - DNA, 916 bp, Homo sapiens
  Payload ID: 14650
  Gene Symbol: RPL3
  Gene Name: ribosomal protein L3
  ENST ID: ENST00000453303
  CDS Start-End: 1-916
cagatgatgaacttattgacgggcggacagaaactgtgtgctgattgtcacgttctgatttggctctgcggagttctttggccttctcacagaaagttctccgctcccagacatgggtccctcggcttcctgcctcggaagcgcagcagcaggcatcgtgggaaggtgaagagcttccctaaggatgacccgtccaagccggtccacctcacagccttcctgggatacaaggctggcatgactcacatcgtgcgggaagtcgacaggccgggatccaaggtgaacaagaaggaggtggtggaggctgtgaccattgtagagacaccacccatggtggttgtgggcattgtgggctacgtggaaacccctcgaggcctccggaccttcaagactgtctttgctgagcacatcagtgatgaatgcaagaggcgtttctataagaattggcataaatctaagaagaaggcctttaccaagtactgcaagaaatggcaggatgaggatggcaagaagcagctggagaaggacttcagcagcatgaagaagtactgccaagtcatccgtgtcattgcccacacccagatgcgcctgcttcctctgcgccagaagaaggcccacctgatggagatccaggtgaacggaggcactgtggccgagaagctggactgggcccgcgagaggcttgagcagcaggtacctgtgaaccaagtgtttgggcaggatgagatgatcgacgtcatcggggtgaccaagggcaaaggctacaaaggggtcaccagtcgttggcacaccaagaagctgccccgcaagacccaccgaggcctgcgcaaggtggcctgtattggggcatggcatcctgctcgtgtagccttctctgtggcacgcgctgggcagaaaggctaccatcaccgcactg

SEQ ID NO: 176535 - DNA, 711 bp, Homo sapiens
  Payload ID: 14650
  Gene Symbol: RPL3
  Gene Name: ribosomal protein L3
  ENST ID: ENST00000420536
  CDS Start-End: 27-569
ctctaccggcgggatttgatggcgtgatgtctcacagaaagttctccgctcccagacatgggtccctcggcttcctgcctcggaagcgcagcagcaggcatcgtgggaaggtgaagagcttccctaaggatgacccgtccaagccggtccacctcacagccttcctgggatacaaggctggcatgactcacatcgtgcgggaagtcgacaggccgggatccaaggtgaacaagaaggaggtggtggaggctgtgaccattgtagagacaccacccatggtggttgtgggcattgtgggctacgtggaaacccctcgaggcctccggaccttcaagactgtctttgctgagcacatcagtgatgaatgcaagaggcgtttctataagaattgctccgctcggctctgcccgatgagctccatccaggctccgcttgctggtggaaaaggctccttagaagccggcaatgagctccatccccacgcggtgccagtgtgccttccgctcacccctcggaggggtgatgaaggcctgcacctggtcccctccccaactctgctctgctcctgaaggcataaatctaagaagaaggcctttaccaagtactgcaagaaatggcaggatgaggatggcaagaagcagctggagaaggacttcagcagcatgaagaagtactgccaagtcatccgtgtcattgcccacacccagatgc

SEQ ID NO: 176536 - DNA, 543 bp, Homo sapiens
  Payload ID: 14651
  Gene Symbol: RPL30
  Gene Name: ribosomal protein L30
  Uniprot ID: P62888
  ENST ID: ENST00000287038
  CDS Start-End: 116-463
agttccggctctgccgtgaagagctttgcattgtgggaagtctttcctttctcgttccccggccatcttagcggctgctgttggttgggggccgtcccgctcctaaggcaggaagatggtggccgcaaagaagacgaaaaagtcgctggagtcgatcaactctaggctccaactcgttatgaaaagtgggaagtacgtcctggggtacaagcagactctgaagatgatcagacaaggcaaagcgaaattggtcattctcgctaacaactgcccagctttgaggaaatctgaaatagagtactatgctatgttggctaaaactggtgtccatcactacagtggcaataatattgaactgggcacagcatgcggaaaatactacagagtgtgcacactggctatcattgatccaggtgactctgacatcattagaagcatgccagaacagactggtgaaaagtaaaccttttcacctacaaaatttcacctgcaaaccttaaacctgcaaaattttcctttaataaaatttgcttgttttaaaaa

SEQ ID NO: 176537 - DNA, 440 bp, Homo sapiens
  Payload ID: 14651
  Gene Symbol: RPL30
  Gene Name: ribosomal protein L30
  ENST ID: ENST00000396070
  CDS Start-End: 70-360
ctttctcgttccccggccatcttagcggctgctgttggttgggggccgtcccgctcctaaggcaggaagatggtggccgcaaagaagacgaaaaagtcgctggagtcgatcaactctaggctccaactcgttatgaaaagtgggaagtacgtcctggggtacaagcagactctgaagatgatcagacaaggcaaagcgaaattggtcattctcgctaacaactgcccagctttgagtggcaataatattgaactgggcacagcatgcggaaaatactacagagtgtgcacactggctatcattgatccaggtgactctgacatcattagaagcatgccagaacagactggtgaaaagtaaaccttttcacctacaaaatttcacctgcaaaccttaaacctgcaaaattttcctttaataaaatttgcttgttttaaaaa

SEQ ID NO: 176538 - DNA, 575 bp, Homo sapiens
  Payload ID: 14651
  Gene Symbol: RPL30
  Gene Name: ribosomal protein L30
  Uniprot ID: P62888
  ENST ID: ENST00000521291
  CDS Start-End: 148-495
gctgttggtgagtgggctcctaccgaccgaggtttaggcagcgcggggagctttgcgggttgccatttgtaactccggatcctaaaattcctgtcctgttctctgtctcttctaggttgggggccgtcccgctcctaaggcaggaagatggtggccgcaaagaagacgaaaaagtcgctggagtcgatcaactctaggctccaactcgttatgaaaagtgggaagtacgtcctggggtacaagcagactctgaagatgatcagacaaggcaaagcgaaattggtcattctcgctaacaactgcccagctttgaggaaatctgaaatagagtactatgctatgttggctaaaactggtgtccatcactacagtggcaataatattgaactgggcacagcatgcggaaaatactacagagtgtgcacactggctatcattgatccaggtgactctgacatcattagaagcatgccagaacagactggtgaaaagtaaaccttttcacctacaaaatttcacctgcaaaccttaaacctgcaaaattttcctttaataaaatttgcttgttttaaaaa

SEQ ID NO: 176539 - DNA, 1129 bp, Homo sapiens
  Payload ID: 14651
  Gene Symbol: RPL30
  Gene Name: ribosomal protein L30
  ENST ID: ENST00000521726
  CDS Start-End: 788-1129
ttttaaaaaattagacctgtttatcgcgctctcagtgcaaactcggctcacaagttcacgctaacacagtcacaaaaggcgagttttgggaaactcgagcagggcgccaccgttctccaggggacaggtaacttgggtgaccgcaggggtgaggacacagctgcttctaccaagcggagagtaaatgcgggtgctgcggcgcatcggagtcacccacaaggctctccaagagccgcgcctcaggacaaagatgaattcagcggcattgagaccgtggtcgcagccgccgcagcctcttctcatctaccctcccacctcaccttcagtcggcttttcgaactccctccgggttctaagcgcctcgattagttagaccgcagctcgcagcagaacagcaacacaacgccgcgaagcttaaaggcccgcagagggggaaaagaacacccccgccgtcattcttttttttccttctttgagacagagtctcactctgtcgcccaggctgagtgcagtggcgcgatcatggctcactgcagcctcgacctaccgagctcaagcgacctctccgcctcagcctccggcgtagctgggagtagctaggactactggagcgcgccaccacgcccggctaatttcttttttatttcttttttatttttttgtagagacaggggtggtctatgttgtccaggctggccttgagctggacgcaacagatcttcccgcctcaacctccgaaagtgctgggattaaaggttgggggccgtcccgctcctaaggcaggaagatggtggccgcaaagaagacgaaaaagtcgctggagtcgatcaactctaggctccaactcgttatgaaaagtgggaagtacgtcctggggtacaagcagactctgaagatgatcagacaaggcaaagcgaaattggtcattctcgctaacaactgcccagctttgaggaaatctgaaatagagtactatgctatgttggctaaaactggtgtccatcactacagtggcaataatattgaactgggcacagcatgcggaaaatactacagagtgtgcacactggctatcattgatccaggtgactctgacatcattagaagcatgccagaacagactggtgaa

SEQ ID NO: 176540 - DNA, 274 bp, Homo sapiens
  Payload ID: 14651
  Gene Symbol: RPL30
  Gene Name: ribosomal protein L30
  ENST ID: ENST00000523172
  CDS Start-End: 118-273
tcctttctcgttccccggccatcttagcggctgctgttggttgggggccgtcccgctcctaaggcaggaagatggtggccgcaaagaagacggaaatctgaaatagagtactatgctatgttggctaaaactggtgtccatcactacagtggcaataatattgaactgggcacagcatgcggaaaatactacagagtgtgcacactggctatcattgatccaggtgactctgacatcattagaagcatgccagaacagactggtgaaaagtaaa

SEQ ID NO: 176541 - DNA, 614 bp, Homo sapiens
  Payload ID: 14651
  Gene Symbol: RPL30
  Gene Name: ribosomal protein L30
  ENST ID: ENST00000518850
  CDS Start-End: 71-241
cctttctcgttccccggccatcttagcggctgctgttggttgggggccgtcccgctcctaaggcaggaagatggtggccgcaaagaagacgaaaaagtcgctggagtcgatcaactctaggctccaactcgttatgaaaagtgggaagtacgtcctggggtacaagcagactctgaagatgatcagacaaggcaaagcgaaattggtcattctcgctaacaactgcccagctttgaggtaatcgaagagactgaacgggcttcgcctaccgcgaattcatcgtgaacgaatatacaggagtgtaaacttgtaatctgagtaccatgaactcgaacacttgcaggataattacggaaatctgaaatagagtactatgctatgttggctaaaactggtgtccatcactacagtggcaataatattgaactgggcacagcatgcggaaaatactacagagtgtgcacactggctatcattgatccaggtgactctgacatcattagaagcatgccagaacagactggtgaaaagtaaaccttttcacctacaaaatttcacctgcaaaccttaaacctgcaaaattttcctttaataaaatttgcttgttttaaaaa

SEQ ID NO: 176542 - DNA, 1865 bp, Homo sapiens
  Payload ID: 14652
  Gene Symbol: RPL31
  Gene Name: ribosomal protein L31
  Uniprot ID: P62899
  ENST ID: ENST00000264258
  CDS Start-End: 602-979
ctcagatctccctgtcgtgtcatctcacatctgtcatctctcaggtcatatccaacacactgggccacccacgcacagggacgacgcgacagccctgtggctccaccgcacaggacagccacgactggcaatcctgtgccggccctgctcgacgcaagcacctccagcgccgggttgcgtcttagtgaccctgggaccgccagccaggcaccgcgcccgacgcaggctcagtcagtgttggtcggatgcatgaatgaatgggaaaaacgaagtctctctctccctggccctgctcccatacatctgtaggcctaggtcttggttttatccgaagacttagagaagggacgcaagttccttcgcggagccagaaggaatccgtcgagaagcgggacctcaagctcgcggcccaaaagcgcggccccgccacgacgcctgctagctggccccacttcggcgcgcgccgcttacatcatagctcgcctctccccttccctagccacacccccttgcctggcgacccggaagttgtacttgcaactgcggctttccttctcccacaatccttcgcgctcttcctttccaacttggacgctgcagaatggctcccgcaaagaagggtggcgagaagaaaaagggccgttctgccatcaacgaagtggtaacccgagaatacaccatcaacattcacaagcgcatccatggagtgggcttcaagaagcgtgcacctcgggcactcaaagagattcggaaatttgccatgaaggagatgggaactccagatgtgcgcattgacaccaggctcaacaaagctgtctgggccaaaggaataaggaatgtgccataccgaatccgtgtgcggctgtccagaaaacgtaatgaggatgaagattcaccaaataagctatatactttggttacctatgtacctgttaccactttcaaaaatctacagacagtcaatgtggatgagaactaatcgctgatcgtcagatcaaataaagttataaaattgccttcatgtttttgttctttttagttgcaacataatgtacttgtataccctatcctaattatgggatcatttgaagagcttttcccaaattgatggcctgtgctgccttctccccatcccctggggttttaaagtgatttcaaactgcaacctagttttagaaccactgttctgggtagttgggatactgaaggcatattgttaattattctacttgtatgttttgctaattctaagataagcatttttccagaaaccaggatgtagaatccagttgccattgacatcttaacattttaggaaacaactttaaaatgatatactatctatctatctatctgtagcatcttaaaggtaatgaaattaatgtggcagtaggtcttttaagcttctgcctacatccatattgagtatagttgttgtcttctaaaataattaattgatttttggtgagataaccagattcatattttaagccttttgtaatggccccgtggtacctggagtcaaggttcagaagtaaaaagttccttaaggtatcaataacaaaaatttgtattaatagttcagtcctaaagcagtgttgctgagattatgtttcaccagcatttacaagctgtatgttaaatgctgccataaagaggtctctgaagccgtagggcacacccaaggcagggctgagaagtacctagtagtgttgcaccacccaaaaaccatggatgggcagcagcaacatctccagcttacccattcactgccacagtctacagcttaagacacttaactacaaggtaaaagaaaaggaccaagtaaatacaaaaagtttcttattaaaaaacttggaagccaa

SEQ ID NO: 176543 - DNA, 770 bp, Homo sapiens
  Payload ID: 14652
  Gene Symbol: RPL31
  Gene Name: ribosomal protein L31
  ENST ID: ENST00000409650
  CDS Start-End: 24-386
ctttccaacttggacgctgcagaatggctcccgcaaagaagggtggcgagaagaaaaagggccgttctgccatcaacgaagtggtaacccgagaatacaccatcaacattcacaagcgcatccatggagtgggcttcaagaagcgtgcacctcgggcactcaaagagattcggaaatttgccatgaaggagatgggaactccagatgtgcgcattgacaccaggctcaacaaagctgtctgggccaaaggaataaggaatgtgccataccgaatccgtgtgcggctgtccagaaaacgtaatgaggatgaagattcaccaaataagctatatactttggttacctatgtacctgttaccactttcaaaaattgtcaccatcagtgagaaaccgaacaagaagaggaaagcaaatggcattttcttctctacttggtgaaaagtcattatagaggattcgaacggttccaatgctcgcaattctacttcaagcatgtgctcattctacatatcaacccctttttcactgacaaatgtaatgttgacaatctaggctaatgggactagattttgaatccaatcaacactttttcatataaagttttcagaataacaaagctttccctcattcatacagatattgctgtactaatctataattatgttttagaattcaaattataacactgactaaacatcactaatgaaacatttgtgacctccttttttccgaagtttaatttttgctttgaattcatattttatcagtat

SEQ ID NO: 176544 - DNA, 825 bp, Homo sapiens
  Payload ID: 14652
  Gene Symbol: RPL31
  Gene Name: ribosomal protein L31
  Uniprot ID: P62899
  ENST ID: ENST00000409733
  CDS Start-End: 410-787
ctttccaacttggacgctgcagagtgagtatgggtggcggagtctgggctcctggaatccagccccatcctcctttgggattgtgctaactgggaccgcaaaatctctcccgagccagcccggggctccggttgtggggagatgggaatacaccctgcttttaaaggctcccagagcctgaggaagaaagtgaccaggcttaggggagccggagcggcagggatttccgggtcggaggcatctgaggggcgcaggggcgcgggtgcgtgggccactgggtgaccgacttagcctggccagactctcagcacctggaagcgccccgagagtgacagcgtgaggctgggagggaggacttggcttgagcttgttaaactctgctctgagcctccttgtcgcctgcatttagatggctcccgcaaagaagggtggcgagaagaaaaagggccgttctgccatcaacgaagtggtaacccgagaatacaccatcaacattcacaagcgcatccatggagtgggcttcaagaagcgtgcacctcgggcactcaaagagattcggaaatttgccatgaaggagatgggaactccagatgtgcgcattgacaccaggctcaacaaagctgtctgggccaaaggaataaggaatgtgccataccgaatccgtgtgcggctgtccagaaaacgtaatgaggatgaagattcaccaaataagctatatactttggttacctatgtacctgttaccactttcaaaaatctacagacagtcaatgtggatgagaactaatcgctgatcgtcagatcaaataaagttataaaattgcc

SEQ ID NO: 176545 - DNA, 1110 bp, Homo sapiens
  Payload ID: 14652
  Gene Symbol: RPL31
  Gene Name: ribosomal protein L31
  Uniprot ID: P62899
  ENST ID: ENST00000409028
  CDS Start-End: 34-420
cgcgctcttcctttccaacttggacgctgcagaatggctcccgcaaagaagggtggcgagaagaaaaagggccgttctgccatcaacgaagtggtaacccgagaatacaccatcaacattcacaagcgcatccatggagtgggcttcaagaagcgtgcacctcgggcactcaaagagattcggaaatttgccatgaaggagatgggaactccagatgtgcgcattgacaccaggctcaacaaagctgtctgggccaaaggaataaggaatgtgccataccgaatccgtgtgcggctgtccagaaaacgtaatgaggatgaagattcaccaaataagctatatactttggttacctatgtacctgttaccactttcaaaatttctgtgctaaacagtgttacagtcgccaagagcccataaagggagccctcctggaagtggatgaggccttgggtctcggctcttcattgcttcctgagctgcagcagatgcctttacaaccaagctcaccgaggacgtctgtctcccatattaccctggcagagggccaggcctgttctacacggccggggtttcaacaaggtactgatgtcttctgcccttgcctcttcgacaggcaagtaataagacttaagtgaagagaattctttaggcacacaaattcacatttgatgtaatctcattatacttcctgatctgtgattgaaaactttcatttcgtaactagtatgtctgtcccacctttaaaaagtttttcattatgaaagtaagtatttgttagaattaagtctatttaaatgaaaaaaacttagatatgagtctgcatggcctcaggaaaatgatgttttaaaatagagattttaggttgtctgcactctagcttttttgtcgttttcttaaggcttttttaactgcatcaaaaattcagatacgaaacatacactaaaaaataatacatcatatcttaatttccactgaacttgatttaaattcagagttacacagtatgaatatcacaatcagatatgttcaaaaaggtctgaacaattgattttctgaaaccatgaaggactacaaatgcttctaataaatcaatgtaattaaaatgtc

SEQ ID NO: 176546 - DNA, 817 bp, Homo sapiens
  Payload ID: 14652
  Gene Symbol: RPL31
  Gene Name: ribosomal protein L31
  ENST ID: ENST00000409038
  CDS Start-End: 24-416
ctttccaacttggacgctgcagaatggctcccgcaaagaagggtggcgagaagaaaaagggccgttctgccatcaacgaagtggtaacccgagaatacaccatcaacattcacaagcgcatccatggagtgggcttcaagaagcgtgcacctcgggcactcaaagagattcggaaatttgccatgaaggagatgggaactccagatgtgcgcattgacaccaggctcaacaaagctgtctgggccaaaggaataaggaatgtgccataccgaatccgtgtgcggctgtccagaaaacgtaatgaggatgaagattcaccaaataagctatatactttggttacctatgtacctgttaccactttcaaaagtcttcaaaacgatgatctcttcaaaacagattgtcaccatcagtgagaaaccgaacaagaagaggaaagcaaatggcattttcttctctacttggtgaaaagtcattatagaggattcgaacggttccaatgctcgcaattctacttcaagcatgtgctcattctacatatcaacccctttttcactgacaaatgtaatgttgacaatctaggctaatgggactagattttgaatccaatcaacactttttcatataaagttttcagaataacaaagctttccctcattcatacagatattgctgtactaatctataattatgttttagaattcaaattataacactgactaaacatcactaatgaaacatttgtgacctccttttttccgaagtttaatttttgctttgaattcatattttatcagtatgtgttaatataatgtca

SEQ ID NO: 176547 - DNA, 2328 bp, Homo sapiens
  Payload ID: 14652
  Gene Symbol: RPL31
  Gene Name: ribosomal protein L31
  ENST ID: ENST00000409711
  CDS Start-End: 12-251
cctgcatttagatggctcccgcaaagaagggtggcgagaagaaaaagggccgttctgccatcaacgaagtggtaacccgagaatacaccatcaacattcacaagcgcatccatggagtgggcttcaagaagcgtgcacctcgggcactcaaagagattcggaaatttgccatgaaggagatgggaactccagatgtgcgcattgacaccaggctcaacaaagctgtctgggccaaaggaataaggtgctaaagttatctgtattcgaaggtgaacttttgcaatgacaccagcttcacttaaccctgcaagagcccatatcagttcagtaatttggttaatgcatgtggaagtataaaaaaaaaaaatactgtgaccgtgacttagggtgtgtagtatctgcagggaagccccttaatttagtggcttatgaactgagacccaagggaaggagccagcagtgtagggtgggaaagagcattgcagagagaggaagcttggcaggatctgggagcggggtggtgaacgcaggtaaagtggaataaatcactgtgagcccagtggaggagggaggggtgagggtcgctctagacatcatggcaagtccaccaggagagaagtggttcttggcctgcggcagttttacctgtccttcccggggttgtggcgggggtggggggcagtgttttttgtcactactgagggatactgtgggccagggactactaaacatcctacaactcatggggctgctccctcaacaaaaaattgcctagctcagatgttagttctcatgttgggggaccctgctctaaagtggaaccagaaagcaggggaggcttgtgctgtaaaggacgtcatgaggtgccagaacagaagtggagtgaggggcagctagaggaatgatgacagtgtggactagttgattctggaaacgggttgggggaggactgtctgcatctgtgtggtatttaaaccttaggattaagtgagatgaacaagacagggacctgagacctagctcttctgtgggtggacattgaagggtgcagcaggagaggtgtcctccgatgcctgccttgggataagaggaatgggattacaggagccaagagaagtcctgagtttataggaatcggggcctagaacaatacccggcatcgatagaggaaagagaatcagctgtgatgctacggagagggtaagacaggacaaggggattgcatgtggaagatagagaaatagagtatgcgcctgtggcagagtttttaacactgttttttgttcgttttgagatggagttaatgttgcccaggctggagcgcaatggcgtagtctcagctcactgcaacctccacctcctgggttccagctattttcctgcctcagcctcccaagtagctgggattacaggcagccgccaccacgcctggctcttagttttgcatttttagtagagaggggttttaccatgttggccagggtgatctcgaactcctgacctcagatgatgcacccacctcagcctcccaaagtgctggggttacaggggcaagccaccatgccgtttcttcatattttaatgtaacagaaaaatcacgtaacaaagtttctggtgatagacaaaagactaacacatttggaccatttggacccagatatctgcttaggattaaccggttgggtatcaatggtggctaccttaacatgtcttcaaacaagcatccctcctgtggtaacagcatttaatgttcacctgggggttatgtttcattttccagggaactgtaagttctaggttggtcagagtagagcaaaggacagcattagaagcaggcatatgagatatgtgaatacagctagtggctgcttggttgaaaggaggcattgacttcagcaacacaattatgtttttattaggaatgtgccataccgaatccgtgtgcggctgtccagaaaacgtaatgaggatgaagattcaccaaataagctatatactttggttacctatgtacctgttaccactttcaaaagtaagttctccatcccataaagccatttaaattcattagaaaaatgtccttacctcttaaaatgtgaattcatctgttaagctaggggtgacacacgtcattgtaccctttttaaattgttggtgtgggaagatgctaaagaatgcaaaactgatccatatctgggatgtaaaaaggttgtggaaaatagaatgcccagacccgtctacaaaaggtttttagagttgaaatatgaaatgtgatgtgggtatggaaattgactgttacttcctttacagatctacagacagtcaatg

SEQ ID NO: 176548 - DNA, 641 bp, Homo sapiens
  Payload ID: 14652
  Gene Symbol: RPL31
  Gene Name: ribosomal protein L31
  ENST ID: ENST00000409000
  CDS Start-End: 88-327
tggcgacccggaagttgtacttgcaactgcggctttccttctcccacaatccttcgcgctcttcctttccaacttggacgctgcagaatggctcccgcaaagaagggtggcgagaagaaaaagggccgttctgccatcaacgaagtggtaacccgagaatacaccatcaacattcacaagcgcatccatggagtgggcttcaagaagcgtgcacctcgggcactcaaagagattcggaaatttgccatgaaggagatgggaactccagatgtgcgcattgacaccaggctcaacaaagctgtctgggccaaaggaataaggtgctaaagttatctgtattcgaaggtgaacttttgcaatgacaccagcttcacttaaccctgcaagagcccatatcagttcagtaatttggttaatgcatgtggaagtataaaaaaaaaaaatactgtgaccgtgacttagggtgtgtagtatctgcagggaagccccttaatttagtggcttatgaactgagacccaagggaaggagccagcagtgtagggtgggaaagagcattgcagagagaggaagcttggcaggatctgggagcggggtggtgaacgcaggtaaagtggaataaatcactgtgagcccagtggag

SEQ ID NO: 176549 - DNA, 716 bp, Homo sapiens
  Payload ID: 14652
  Gene Symbol: RPL31
  Gene Name: ribosomal protein L31
  Uniprot ID: P62899
  ENST ID: ENST00000409320
  CDS Start-End: 24-389
ctttccaacttggacgctgcagaatggctcccgcaaagaagggtggcgagaagaaaaagggccgttctgccatcaacgaagtggtaacccgagaatacaccatcaacattcacaagcgcatccatggagtgggcttcaagaagcgtgcacctcgggcactcaaagagattcggaaatttgccatgaaggagatgggaactccagatgtgcgcattgacaccaggctcaacaaagctgtctgggccaaaggaataaggaatgtgccataccgaatccgtgtgcggctgtccagaaaacgtaatgaggatgaagattcaccaaataagctatatactttggttacctatgtacctgttaccactttcaaaagtaagttctccatcccataaagccatttaaattcattagaaaaatgtccttacctcttaaaatgtgaattcatctgttaagctaggggtgacacacgtcattgtaccctttttaaattgttggtgtgggaagatgctaaagaatgcaaaactgatccatatctgggatgtaaaaaggttgtggaaaatagaatgcccagacccgtctacaaaaggtttttagagttgaaatatgaaatgtgatgtgggtatggaaattgactgttacttcctttacagatctacagacagtcaatgtggatgagaactaatcgctgatcgtcagatcaaataaagttataaaattgc

SEQ ID NO: 176550 - DNA, 781 bp, Homo sapiens
  Payload ID: 14652
  Gene Symbol: RPL31
  Gene Name: ribosomal protein L31
  ENST ID: ENST00000419276
  CDS Start-End: 6-245
gcagaatggctcccgcaaagaagggtggcgagaagaaaaagggccgttctgccatcaacgaagtggtaacccgagaatacaccatcaacattcacaagcgcatccatggagtgggcttcaagaagcgtgcacctcgggcactcaaagagattcggaaatttgccatgaaggagatgggaactccagatgtgcgcattgacaccaggctcaacaaagctgtctgggccaaaggaataaggtgctaaagttatctgtattcgaaggtgaacttttgcaatgacaccagcttcacttaaccctgcaagagcccatatcagaatgtgccataccgaatccgtgtgcggctgtccagaaaacgtaatgaggatgaagattcaccaaataagctatatactttggttacctatgtacctgttaccactttcaaaagtaagttctccatcccataaagccatttaaattcattagaaaaatgtccttacctcttaaaatgtgaattcatctgttaagctaggggtgacacacgtcattgtaccctttttaaattgttggtgtgggaagatgctaaagaatgcaaaactgatccatatctgggatgtaaaaaggttgtggaaaatagaatgcccagacccgtctacaaaaggtttttagagttgaaatatgaaatgtgatgtgggtatggaaattgactgttacttcctttacagatctacagacagtcaatgtggatgagaactaatcgctgatcgtcagatcaaataaagttataaaattgccttca

SEQ ID NO: 176551 - DNA, 717 bp, Homo sapiens
  Payload ID: 14652
  Gene Symbol: RPL31
  Gene Name: ribosomal protein L31
  ENST ID: ENST00000441435
  CDS Start-End: 1-326
gccgttctgccatcaacgaagtggtaacccgagaatacaccatcaacattcacaagcgcatccatggagtgggcttcaagaagcgtgcacctcgggcactcaaagagattcggaaatttgccatgaaggagatgggaactccagatgtgcgcattgacaccaggctcaacaaagctgtctgggccaaaggaataaggaatgtgccataccgaatccgtgtgcggctgtccagaaaacgtaatgaggatgaagattcaccaaataagctatatactttggttacctatgtacctgttaccactttcaaaattttttttttaaggtgagttgaagtcttgggaatagactgaaaactaacaaaaccggccccatcgctgaggaccaggtgagcctcttcagaatgcatcatttccacccatactaaatgactacatcatctctttggacatcccaattcacaaaagtctgaagtagttcccagtaactgcagggttcttgaccatttcaatgtcctctgtccacaggatgggacaaaaacaagggcagatgctgtagtctgcaagctcatatcctcaaagagaccaaaatgccatttataattttactgtcatattcactgcagccatgttatttaaatagtcattacagaatcatgaaaataaccacaagaacttttaagtgtgaaataaaggtctcataaatttctgttccttaaaa

SEQ ID NO: 176552 - DNA, 357 bp, Homo sapiens
  Payload ID: 14652
  Gene Symbol: RPL31
  Gene Name: ribosomal protein L31
  ENST ID: ENST00000456292
  CDS Start-End: 12-357
cctgcatttagatggctcccgcaaagaagggtggcgagaagaaaaagggccgttctgccatcaacgaagtggtaacccgagaatacaccatcaacattcacaagcgcatccatggagtgggcttcaagaagcgtgcacctcgggcactcaaagagattcggaaatttgccatgaaggagatgggaactccagatgtgcgcattgacaccaggctcaacaaagctgtctgggccaaaggaataaggaatgtgccataccgaatccgtgtgcggctgtccagaaaacgtaatgaggatgaagattcaccaaataagctatatactttggttacctatgtacctgttaccactttcaaaa

SEQ ID NO: 176553 - DNA, 567 bp, Homo sapiens
  Payload ID: 14653
  Gene Symbol: RPL32
  Gene Name: ribosomal protein L32
  ENST ID: ENST00000273223
  CDS Start-End: 59-520
cccttctctcttcctcggcgctgcctacggaggtggcagccatctccttctcggcatcatggccgccctcagaccccttgtgaagcccaagatcgtcaaaaagagaaccaagaagttcatccggcaccagtcagaccgatatgtcaaaattaaggaagagttcgcactctgcacagacgctaacccacctgtgtattatttccttcagcgtaactggcggaaacccagaggcattgacaacagggttcgtagaagattcaagggccagatcttgatgcccaacattggttatggaagcaacaaaaaaacaaagcacatgctgcccagtggcttccggaagttcctggtccacaacgtcaaggagctggaagtgctgctgatgtgcaacaaatcttactgtgccgagatcgctcacaatgtttcctccaagaaccgcaaagccatcgtggaaagagctgcccaactggccatcagagtcaccaaccccaatgccaggctgcgcagtgaagaaaatgagtaggcagctcatgtgcacgttttctgtttaaataaatgtaaaaactgcca

SEQ ID NO: 176554 - DNA, 1734 bp, Homo sapiens
  Payload ID: 14653
  Gene Symbol: RPL32
  Gene Name: ribosomal protein L32
  Uniprot ID: P62910
  ENST ID: ENST00000396953
  CDS Start-End: 1293-1700
gcgctgcctacggaggtggcagccatctccttctcggtaagtgttaatccgtggcaatccgcattcctgcgggattcatctggccccgtcgcccagtggtgcggaggcctccccttcagcgcggtagtgtctgtgggtattgttattgtcagcttactggagcgtgtacaggaacagaacgaagccgccgagttgatagggctttgcgtcccagagcctcctgccctccgcctgtattcagagctgcgggctgcttgtttgttccttggcggtggagggtgctagttgaggccagacttcggggtctcctgggggccgtgggacgaccaggggtggcccagcttgacagctttcagctgggatctgtggatcccagcgctcaccaatgtcggcccacgtgtattcgttcatgccatggccggcttcttccgctgcagtctctggcccgagggctgctgctgcgggaccgccaaggaaagacgagctgtaggtcggctggtccagctgcaggcagaaattctggtagtatctctgggaatatgaagatgcaactgcccccaccttgccttcgaggatatcatgggccagaaggcagagtcgttttgaatacgtggttcattgagtacccactctgggccagttgatggctgcgaagagagcagaaggggtgctgctgtaggaaatcaatggctcggaagaccacactgaggaaggtgtgagttgatactggaagatctccaggtttgaggcatcttcagaggtatatggtggttttgtgtgtgttgagggtgtggtagcgcagcagctccctagggaattagaaggttttattgaacatttaccctgtgacaggcactgcaggcattcagcgcgcagtgtcatcttcattttacaggtgaggaaaagactcaggttcaagtagatggtcaaggccagtactaccggaaggaccatctgggggttcggacactggtggggtgggatttgctgccccttgcaaattgagagtgtcttggggtcagttttgatttgctcagctgttggcattctttgggctctgagtgggtgaggtgacccttgacctcctgggatcgcatctggagagtgcctagtattctgccagcttcggaaagggagggaaagcaagcctggcagaggcacccattccattcccagcttgctccgtagctggcgattggaagacactctgcgacagtgttcagtccctgggcaggaaagcctccttccaggattcttcctcacctggggccgcttcttccccaaaaggcatcatggccgccctcagaccccttgtgaagcccaagatcgtcaaaaagagaaccaagaagttcatccggcaccagtcagaccgatatgtcaaaattaagcgtaactggcggaaacccagaggcattgacaacagggttcgtagaagattcaagggccagatcttgatgcccaacattggttatggaagcaacaaaaaaacaaagcacatgctgcccagtggcttccggaagttcctggtccacaacgtcaaggagctggaagtgctgctgatgtgcaacaaatcttactgtgccgagatcgctcacaatgtttcctccaagaaccgcaaagccatcgtggaaagagctgcccaactggccatcagagtcaccaaccccaatgccaggctgcgcagtgaagaaaatgagtaggcagctcatgtgcacgttttctgtttaaataaat

SEQ ID NO: 176555 - DNA, 1749 bp, Homo sapiens
  Payload ID: 14653
  Gene Symbol: RPL32
  Gene Name: ribosomal protein L32
  Uniprot ID: P62910
  ENST ID: ENST00000396957
  CDS Start-End: 194-601
aggggttacgacccatcagcccttgcgcgccaccgtcccttctctcttcctcggcgctgcctacggaggtggcagccatctccttctcgctggcgattggaagacactctgcgacagtgttcagtccctgggcaggaaagcctccttccaggattcttcctcacctggggccgcttcttccccaaaaggcatcatggccgccctcagaccccttgtgaagcccaagatcgtcaaaaagagaaccaagaagttcatccggcaccagtcagaccgatatgtcaaaattaagcgtaactggcggaaacccagaggcattgacaacagggttcgtagaagattcaagggccagatcttgatgcccaacattggttatggaagcaacaaaaaaacaaagcacatgctgcccagtggcttccggaagttcctggtccacaacgtcaaggagctggaagtgctgctgatgtgcaacaaatcttactgtgccgagatcgctcacaatgtttcctccaagaaccgcaaagccatcgtggaaagagctgcccaactggccatcagagtcaccaaccccaatgccaggctgcgcagtgaagaaaatgagtaggcagctcatgtgcacgttttctgtttaaataaatgtaaaaactgccatctggcatcttccttccttgattttaagtcttcagcttcttggccaacttagtttgccacagagattgttcttttgcttaagcccctttggaatctcccatttggaggggatttgtaaaggacactcagtccttgaacaggggaatgtggcctcaagtgcacagactagccttagtcatctccagttgaggctgggtatgaggggtacagacttggccctcacaccaggtaggttctgagacacttgaagaagcttgtggctcccaagccacaagtagtcattcttagccttgcttttgtaaagttaggtgacaagttattccatgtgatgcttgtgagaattgagaaaatatgcatggaaatatccagatgaatttcttacacagattcttacgggatgcctaaattgcatcctgtaacttctgtccaaaaagaacaggatgatgtacaaattgctcttccaggtaatccaccacggttaactggaaaagcactttcagtctcctataaccctcccaccagctgctgcttcaggtataatgttacagcagtttgccaaggcggggacctaactggtgacaattgagcctcttgactggtactcagaatttagtgacacgtggtcctgattttttttggagacggggtcttgctctcacccaggctgggagtgcagtggcacactgactacagccttgacctccccaggctcaggtgatcttcccacctcagccttccaagtagctgggactacagatgcacacctccaaacctgggtagtttttgaagtttttttgtagaggtggtctagccatgttgcctaggctcccgaactcctgagctcaagcaatcctgcttcagcctcccaaagtactgggattacaggcatcttctgtagtatataggtcatgagggatatgggatgtggtacttatgagacagaaatgcttacaggatgtttttctgtaaccatcctggtcaacttagcagaaatgctgcgctgggtataataaagcttttctacttctagtctagacaggaatcttacagattgtctcctgttcaaaacctagtcataaatatttataatgcaaactggtc

SEQ ID NO: 176556 - DNA, 620 bp, Homo sapiens
  Payload ID: 14653
  Gene Symbol: RPL32
  Gene Name: ribosomal protein L32
  Uniprot ID: P62910
  ENST ID: ENST00000435983
  CDS Start-End: 169-576
ccttctctcttcctcggcgctgcctacggaggtggcagccatctccttctcgcttgctccgtagctggcgattggaagacactctgcgacagtgttcagtccctgggcaggaaagcctccttccaggattcttcctcacctggggccgcttcttccccaaaaggcatcatggccgccctcagaccccttgtgaagcccaagatcgtcaaaaagagaaccaagaagttcatccggcaccagtcagaccgatatgtcaaaattaagcgtaactggcggaaacccagaggcattgacaacagggttcgtagaagattcaagggccagatcttgatgcccaacattggttatggaagcaacaaaaaaacaaagcacatgctgcccagtggcttccggaagttcctggtccacaacgtcaaggagctggaagtgctgctgatgtgcaacaaatcttactgtgccgagatcgctcacaatgtttcctccaagaaccgcaaagccatcgtggaaagagctgcccaactggccatcagagtcaccaaccccaatgccaggctgcgcagtgaagaaaatgagtaggcagctcatgtgcacgttttctgtttaaataaatgtaaaaactg

SEQ ID NO: 176557 - DNA, 555 bp, Homo sapiens
  Payload ID: 14653
  Gene Symbol: RPL32
  Gene Name: ribosomal protein L32
  ENST ID: ENST00000457131
  CDS Start-End: 156-555
cttctctcttcctcggcgctgcctacggaggtggcagccatctccttctcgctggcgattggaagacactctgcgacagtgttcagtccctgggcaggaaagcctccttccaggattcttcctcacctggggccgcttcttccccaaaaggcatcatggccgccctcagaccccttgtgaagcccaagatcgtcaaaaagagaaccaagaagttcatccggcaccagtcagaccgatatgtcaaaattaagcgtaactggcggaaacccagaggcattgacaacagggttcgtagaagattcaagggccagatcttgatgcccaacattggttatggaagcaacaaaaaaacaaagcacatgctgcccagtggcttccggaagttcctggtccacaacgtcaaggagctggaagtgctgctgatgtgcaacaaatcttactgtgccgagatcgctcacaatgtttcctccaagaaccgcaaagccatcgtggaaagagctgcccaactggccatcagagtcaccaaccccaatgccaggctgcgcagtgaagaaa

SEQ ID NO: 176558 - DNA, 439 bp, Homo sapiens
  Payload ID: 14653
  Gene Symbol: RPL32
  Gene Name: ribosomal protein L32
  ENST ID: ENST00000434963
  CDS Start-End: 254-439
ctgcgaagagagcagaaggggtgctgctgtaggaaatcaatggctcggaagaccacactgaggaaggtgtgagttgatactggaagatctccaggtttgaggcatcttcagaggtatatggtggttttgtgtgtgttgagggtgtggtagcgcagcagctccctagggaattagaaggttttattgaacatttaccctgtgacaggcactgcaggcattcagcgcgcagtgtcatcttcattttacaggcatcatggccgccctcagaccccttgtgaagcccaagatcgtcaaaaagagaaccaagaagttcatccggcaccagtcagaccgatatgtcaaaattaagcgtaactggcggaaacccagaggcattgacaacagggttcgtagaagattcaagggccagatcttgatgcccaacattggttatggaagc

SEQ ID NO: 176559 - DNA, 2117 bp, Homo sapiens
  Payload ID: 14653
  Gene Symbol: RPL32
  Gene Name: ribosomal protein L32
  Uniprot ID: P62910
  ENST ID: ENST00000429711
  CDS Start-End: 101-508
ggacccaggggttacgacccatcagcccttgcgcgccaccgtcccttctctcttcctcggcgctgcctacggaggtggcagccatctccttctcggcatcatggccgccctcagaccccttgtgaagcccaagatcgtcaaaaagagaaccaagaagttcatccggcaccagtcagaccgatatgtcaaaattaagcgtaactggcggaaacccagaggcattgacaacagggttcgtagaagattcaagggccagatcttgatgcccaacattggttatggaagcaacaaaaaaacaaagcacatgctgcccagtggcttccggaagttcctggtccacaacgtcaaggagctggaagtgctgctgatgtgcaacaaatcttactgtgccgagatcgctcacaatgtttcctccaagaaccgcaaagccatcgtggaaagagctgcccaactggccatcagagtcaccaaccccaatgccaggctgcgcagtgaagaaaatgagtaggcagctcatgtgcacgttttctgtttaaataaatgtaaaaactgccatctggcatcttccttccttgattttaagtcttcagcttcttggccaacttagtttgccacagagattgttcttttgcttaagcccctttggaatctcccatttggaggggatttgtaaaggacactcagtccttgaacaggggaatgtggcctcaagtgcacagactagccttagtcatctccagttgaggctgggtatgaggggtacagacttggccctcacaccaggtaggttctgagacacttgaagaagcttgtggctcccaagccacaagtagtcattcttagccttgcttttgtaaagttaggtgacaagttattccatgtgatgcttgtgagaattgagaaaatatgcatggaaatatccagatgaatttcttacacagattcttacgggatgcctaaattgcatcctgtaacttctgtccaaaaagaacaggatgatgtacaaattgctcttccaggtaatccaccacggttaactggaaaagcactttcagtctcctataaccctcccaccagctgctgcttcaggtataatgttacagcagtttgccaaggcggggacctaactggtgacaattgagcctcttgactggtactcagaatttagtgacacgtggtcctgattttttttggagacggggtcttgctctcacccaggctgggagtgcagtggcacactgactacagccttgacctccccaggctcaggtgatcttcccacctcagccttccaagtagctgggactacagatgcacacctccaaacctgggtagtttttgaagtttttttgtagaggtggtctagccatgttgcctaggctcccgaactcctgagctcaagcaatcctgcttcagcctcccaaagtactgggattacaggcatcttctgtagtatataggtcatgagggatatgggatgtggtacttatgagacagaaatgcttacaggatgtttttctgtaaccatcctggtcaacttagcagaaatgctgcgctgggtataataaagcttttctacttctagtctagacaggaatcttacagattgtctcctgttcaaaacctagtcataaatatttataatgcaaactggtcatttttgggattttgtttttgagactcattctgtcaccccggctggagtgcagtggcttgatcttggctccctgcaacttctgcctcctgggttcaggcgattcgattaacaattggagacgagtcgtgcagaggaaagaagtaacttagaatctaatctttattaacctgggatatcacagaaaatacttgggcctgccacttgtatttctttgtcctcaatactgaacactagacacatttgaaaccttcctcagaaggaaacaaaccaactggttatgcctgggtggtggcatggaagatgcccattgttgcccaatttgctaataagtattttgaaattagaaatgaaacatgaggtccaagcctgtccagttccctacccaacccattcctcctccctggaaaaaagaaacccgtatcatcttccaaatttctgattcatcactgccacttaaaaa

SEQ ID NO: 176560 - DNA, 529 bp, Homo sapiens
  Payload ID: 14654
  Gene Symbol: RPL34
  Gene Name: ribosomal protein L34
  Uniprot ID: P49207
  ENST ID: ENST00000394665
  CDS Start-End: 133-486
gttgtctgcaggtatggatgttgttctcttttccctgtctttatttccttaccaatcggctgccatccgaggagctgaggaagcctagagctctcagaagcagtcctttgagctggtgtaggggcactcagaatggtccagcgtttgacataccgacgtaggctttcctacaatacagcctctaacaaaactaggctgtcccgaacccctggtaatagaattgtttacctttataccaagaaggttgggaaagcaccaaaatctgcatgtggtgtgtgcccaggcagacttcgaggggttcgtgctgtaagacctaaagttcttatgagattgtccaaaacaaagaaacatgtcagcagggcctatggtggttccatgtgtgctaaatgtgttcgtgacaggatcaagcgtgctttccttatcgaggagcagaaaatcgttgtgaaagtgttgaaggcacaagcacagagtcagaaagctaaataaaaaaatgaaacttttttgagtaataaaaatgaaaagacgctgt

SEQ ID NO: 176561 - DNA, 441 bp, Homo sapiens
  Payload ID: 14654
  Gene Symbol: RPL34
  Gene Name: ribosomal protein L34
  Uniprot ID: P49207
  ENST ID: ENST00000394667
  CDS Start-End: 45-398
cttttttcttcctcttccggggacgttgtctgcaggcactcagaatggtccagcgtttgacataccgacgtaggctttcctacaatacagcctctaacaaaactaggctgtcccgaacccctggtaatagaattgtttacctttataccaagaaggttgggaaagcaccaaaatctgcatgtggtgtgtgcccaggcagacttcgaggggttcgtgctgtaagacctaaagttcttatgagattgtccaaaacaaagaaacatgtcagcagggcctatggtggttccatgtgtgctaaatgtgttcgtgacaggatcaagcgtgctttccttatcgaggagcagaaaatcgttgtgaaagtgttgaaggcacaagcacagagtcagaaagctaaataaaaaaatgaaacttttttgagtaataaaaatgaaaagacgctgt

SEQ ID NO: 176562 - DNA, 853 bp, Homo sapiens
  Payload ID: 14654
  Gene Symbol: RPL34
  Gene Name: ribosomal protein L34
  Uniprot ID: P49207
  ENST ID: ENST00000394668
  CDS Start-End: 67-420
ccgaggagctgaggaagcctagagctctcagaagcagtcctttgagctggtgtaggggcactcagaatggtccagcgtttgacataccgacgtaggctttcctacaatacagcctctaacaaaactaggctgtcccgaacccctggtaatagaattgtttacctttataccaagaaggttgggaaagcaccaaaatctgcatgtggtgtgtgcccaggcagacttcgaggggttcgtgctgtaagacctaaagttcttatgagattgtccaaaacaaagaaacatgtcagcagggcctatggtggttccatgtgtgctaaatgtgttcgtgacaggatcaagcgtgctttccttatcgaggagcagaaaatcgttgtgaaagtgttgaaggcacaagcacagagtcagaaagctaaataaaaaaatgaaacttttttgagtaataaaaatgaaaagacgctgtccaatagaaaaagttggtgtgctggagctacctcacctcagcttgagagagccagttgtgtgcatctctttccagttttgcatccagtgacgtctgcttggcatcttgagattgttatggtgagagtatttacacctcagcaaatgctgcaaaatcctgttttcccccagagagctggaggttaaatactaccagcacatccctagatactactcaagttacagtatatgatcactaatatagtatgctcttggtaccaggagctctgatatatatctggtacatgtttgataatgacttgattgttattataagtacttattaatacttcgattctgtaaagagtttagggtttgattttataaaatccaaaatgagccttttattgaa

SEQ ID NO: 176563 - DNA, 549 bp, Homo sapiens
  Payload ID: 14654
  Gene Symbol: RPL34
  Gene Name: ribosomal protein L34
  Uniprot ID: P49207
  ENST ID: ENST00000506397
  CDS Start-End: 156-509
tttccttaccaatcggctgccatccgaggagctgaggaagcctagagctctcagaagcagtcctttgagctggtgtagggcggtgtttctccaactgggctcgtggcacttttctggacaccactccaaacaaaattagactctgagcactcagaatggtccagcgtttgacataccgacgtaggctttcctacaatacagcctctaacaaaactaggctgtcccgaacccctggtaatagaattgtttacctttataccaagaaggttgggaaagcaccaaaatctgcatgtggtgtgtgcccaggcagacttcgaggggttcgtgctgtaagacctaaagttcttatgagattgtccaaaacaaagaaacatgtcagcagggcctatggtggttccatgtgtgctaaatgtgttcgtgacaggatcaagcgtgctttccttatcgaggagcagaaaatcgttgtgaaagtgttgaaggcacaagcacagagtcagaaagctaaataaaaaaatgaaacttttttgagtaataaaaatgaaaagacgc

SEQ ID NO: 176564 - DNA, 560 bp, Homo sapiens
  Payload ID: 14654
  Gene Symbol: RPL34
  Gene Name: ribosomal protein L34
  Uniprot ID: P49207
  ENST ID: ENST00000502534
  CDS Start-End: 42-395
ttttcttcctcttccggggacgttgtctgcaggcactcagaatggtccagcgtttgacataccgacgtaggctttcctacaatacagcctctaacaaaactaggctgtcccgaacccctggtaatagaattgtttacctttataccaagaaggttgggaaagcaccaaaatctgcatgtggtgtgtgcccaggcagacttcgaggggttcgtgctgtaagacctaaagttcttatgagattgtccaaaacaaagaaacatgtcagcagggcctatggtggttccatgtgtgctaaatgtgttcgtgacaggatcaagcgtgctttccttatcgaggagcagaaaatcgttgtgaaagtgttgaaggcacaagcacagagtcagaaagctaaataaaaaaatgaaacttttttgagtaataaaaatgaaaagacgctgctggagtacaatggcaggatctcggctcaccgcaccctctgccttccaggttcaagtgattctcctgcctcagcctcccaagtagctgggattataggcatgtgccaccatgcctggctaatt

SEQ ID NO: 176565 - DNA, 455 bp, Homo sapiens
  Payload ID: 14655
  Gene Symbol: RPL35
  Gene Name: ribosomal protein L35
  Uniprot ID: P42766
  ENST ID: ENST00000348462
  CDS Start-End: 50-421
cttcctctttccctcggagcgggcggcggcgttggcggcttgtgcagcaatggccaagatcaaggctcgagatcttcgcgggaagaagaaggaggagctgctgaaacagctggacgacctgaaggtggagctgtcccagctgcgcgtcgccaaagtgacaggcggtgcggcctccaagctctctaagatccgagtcgtccggaaatccattgcccgtgttctcacagttattaaccagactcagaaagaaaacctcaggaaattctacaagggcaagaagtacaagcccctggacctgcggcctaagaagacacgtgccatgcgccgccggctcaacaagcacgaggagaacctgaagaccaagaagcagcagcggaaggagcggctgtacccgctgcggaagtacgcggtcaaggcctgaggggcgcattgtcaataaagcacagctggctgag

SEQ ID NO: 176566 - DNA, 493 bp, Homo sapiens
  Payload ID: 14655
  Gene Symbol: RPL35
  Gene Name: ribosomal protein L35
  ENST ID: ENST00000373570
  CDS Start-End: 4-294
gcaatggccaagatcaaggctcgagatcttcgcgggaagaagaaggaggagctgctgaaacagctggacgacctgaaggtggagctgtcccagctgcgcgtcgccaaagtgacaggcggtgcggcctccaagctctctaagatccgagtcgtccggaaatccattgcccgtgttctcacagttattaaccagactcagaaagaaaacctcaggaaattctacaaggcagcagctggtgggccctgcatacagatggacagagtactgcctcagcccccagcatgctcttgctaaccagagccgagggcaagaagtacaagcccctggacctgcggcctaagaagacacgtgccatgcgccgccggctcaacaagcacgaggagaacctgaagaccaagaagcagcagcggaaggagcggctgtacccgctgcggaagtacgcggtcaaggcctgaggggcgcattgtcaataaagcacagctggctgagactg

SEQ ID NO: 176567 - DNA, 692 bp, Homo sapiens
  Payload ID: 14655
  Gene Symbol: RPL35
  Gene Name: ribosomal protein L35
  ENST ID: ENST00000493018
  CDS Start-End: 24-314
cggcgttggcggcttgtgcagcaatggccaagatcaaggctcgagatcttcgcgggaagaagaaggaggagctgctgaaacagctggacgacctgaaggtggagctgtcccagctgcgcgtcgccaaagtgacaggcggtgcggcctccaagctctctaagatccgagtcgtccggaaatccattgcccgtgttctcacagttattaaccagactcagaaagaaaacctcaggaaattctacaaggcagcagctggtgggccctgcatacagatggacagagtactgcctcagcccccagcatgctcttgctaaccagagccgaggtaatggtaactacccccggggcttggtgggtgctgcgtgccctgtactaggttgtcatgtgactgtcctcgtgactgggaatcgggcagtggaaggagcactgagttgggagtcacttgactgagatgcaagccccggctcttccacagctttgccaagacttggacactcagcccagtagggcaagaagtacaagcccctggacctgcggcctaagaagacacgtgccatgcgccgccggctcaacaagcacgaggagaacctgaagaccaagaagcagcagcggaaggagcggctgtacccgctgcggaagtacgcggtcaaggcctgaggggcgcattgtcaataaagcacagctggctgaga

SEQ ID NO: 176568 - DNA, 340 bp, Homo sapiens
  Payload ID: 14655
  Gene Symbol: RPL35
  Gene Name: ribosomal protein L35
  ENST ID: ENST00000629845
  CDS Start-End: 50-340
cttcctctttccctcggagcgggcggcggcgttggcggcttgtgcagcaatggccaagatcaaggctcgagatcttcgcgggaagaagaaggaggagctgctgaaacagctggacgacctgaaggtggagctgtcccagctgcgcgtcgccaaagtgacaggcggtgcggcctccaagctctctaagatccgagtcgtccggaaatccattgcccgtgttctcacagttattaaccagactcagaaagaaaacctcaggaaattctacaaggcagcagctggtgggccctgcatacagatggacagagtactgcctcagcccccagcatgctcttgctaa

SEQ ID NO: 176569 - DNA, 517 bp, Homo sapiens
  Payload ID: 14656
  Gene Symbol: RPL35A
  Gene Name: ribosomal protein L35a
  ENST ID: ENST00000442341
  CDS Start-End: 236-517
ctttcctcagcttttctcccccagccattgcataaaagtcttacgtgtgtgtttctctttaaggcttcatttcttttcctgagtgttgcctactgataacggcatgcattttctcaggcttttctgagagtcatttttgtgactcctgtcccttagttttgtcttcattctgaagtttgcttagataccagctgttctctgaggcctgctgggaacgggacttctaaaaggaactatgtctggaaggctgtggtccaaggccatttttgctggctataagcggggtctccggaaccaaagggagcacacagctcttcttaaaattgaaggtgtttacgcccgagatgaaacagaattctatttgggcaagagatgcgcttatgtatataaagcaaagaacaacacagtcactcctggcggcaaaccaaacaaaaccagagtcatctggggaaaagtaactcgggcccatggaaacagtggcatggttcgtgccaaattccgaagcaatcttcctgct

SEQ ID NO: 176570 - DNA, 549 bp, Homo sapiens
  Payload ID: 14656
  Gene Symbol: RPL35A
  Gene Name: ribosomal protein L35a
  Uniprot ID: P18077
  ENST ID: ENST00000448864
  CDS Start-End: 139-471
tcttaccgccatcttggctcctgtggaggtgagtgaagggtctgctgctgaaatttgggggcaaataaccggagtaggtttgttcctgtgccttggcgagtcgccggcctgctgggaacgggacttctaaaaggaactatgtctggaaggctgtggtccaaggccatttttgctggctataagcggggtctccggaaccaaagggagcacacagctcttcttaaaattgaaggtgtttacgcccgagatgaaacagaattctatttgggcaagagatgcgcttatgtatataaagcaaagaacaacacagtcactcctggcggcaaaccaaacaaaaccagagtcatctggggaaaagtaactcgggcccatggaaacagtggcatggttcgtgccaaattccgaagcaatcttcctgctaaggccattggacacagaatccgagtgatgctgtacccctcaaggatttaaactaacgaaaaatcaataaataaatgtggatttgtgctcttgtatttttaagtggattaaaaaacttactaccttaaa

SEQ ID NO: 176571 - DNA, 442 bp, Homo sapiens
  Payload ID: 14656
  Gene Symbol: RPL35A
  Gene Name: ribosomal protein L35a
  ENST ID: ENST00000429437
  CDS Start-End: 49-216
cttggctcctgtggaggcctgctgggaacgggacttctaaaaggaactatgtctggaaggctgtggtccaaggccatttttgctggctataagcggggtctccggaaccaaagggagcacacagctcttcttaaaattgaaggtgtttacgcccgagatgaaacagaattctatttgggcaagagatgcgcttatgtatataaagcaaagaagtaagtttatgacactgcaacacagtcactcctggcggcaaaccaaacaaaaccagagtcatctggggaaaagtaactcgggcccatggaaacagtggcatggttcgtgccaaattccgaagcaatcttcctgctaaggccattggacacagaatccgagtgatgctgtacccctcaaggatttaaactaacgaaaaatcaataaataaatgtggatttgtgctcttgta

SEQ ID NO: 176572 - DNA, 564 bp, Homo sapiens
  Payload ID: 14656
  Gene Symbol: RPL35A
  Gene Name: ribosomal protein L35a
  ENST ID: ENST00000439255
  CDS Start-End: 15-188
ttctaaaaggaactatgtctggaaggctgtggtccaaggccatttttgctggctataagcggggtctccggaaccaaagggagcacacagctcttcttaaaattgaaggtgtttacgcccgagatgaaacagaattctatttgggcaagagatgcgcttatgtatataaagcaaagaactgggattaaccccttggtgtcttcagtctttcttccggccaggacacacactccttggccccagtgcctgcgctagtcatcccgtgatcacttcatggcatttcccctccctttccagtctttgttccatggtcacctcagtgagaccttccttggctatttaaaatggcagcaacacagtcactcctggcggcaaaccaaacaaaaccagagtcatctggggaaaagtaactcgggcccatggaaacagtggcatggttcgtgccaaattccgaagcaatcttcctgctaaggccattggacacagaatccgagtgatgctgtacccctcaaggatttaaactaacgaaaaatcaataaataaatgtggatttgtgctcttgta

SEQ ID NO: 176573 - DNA, 1437 bp, Homo sapiens
  Payload ID: 14656
  Gene Symbol: RPL35A
  Gene Name: ribosomal protein L35a
  Uniprot ID: P18077
  ENST ID: ENST00000464167
  CDS Start-End: 268-600
cttgttcccaagtagtacattttgcagcctaccaagatgaaaggacttaggaaaataattgtaagagtgctattgaatgtggcttatttcagtgcgaagccgatttccgaggattgtttttctggcgtttggagaagatgcctaaattgagggcggagtcgaaagatgtttaatcccacaaggccacgcggcggggcctcgtccttctcttaccgccatcttggctcctgtggaggcctgctgggaacgggacttctaaaaggaactatgtctggaaggctgtggtccaaggccatttttgctggctataagcggggtctccggaaccaaagggagcacacagctcttcttaaaattgaaggtgtttacgcccgagatgaaacagaattctatttgggcaagagatgcgcttatgtatataaagcaaagaacaacacagtcactcctggcggcaaaccaaacaaaaccagagtcatctggggaaaagtaactcgggcccatggaaacagtggcatggttcgtgccaaattccgaagcaatcttcctgctaaggccattggacacagaatccgagtgatgctgtacccctcaaggatttaaactaacgaaaaatcaataaataaatgtggatttgtgctcttgtatttttaagtggattaaaaaacttactaccttaaattgatttgctacatgcttaaaatgatagaggttgctcagcatttttggagtacaagggggtcagagagacatgtgatgaaaattacagggcgagtacagagatttagaagggaacgggttttaatgcgagtatctttgacagagtcttgctctgttgcccatgctggagtgtagtggtgctcgctgcagcctcacattcaaaggctcaagcaatcctcccttggcctttgaagtagctgggaccacaggctcatgccaccatccctgggtcatttttaaattttttgtagagagggtctgactcttgcctatgctggcttcaaactcctgggctcaagcaatcctccttccttggcctctcctgaagtgctgggatacagttatgagccaccacacctgccaagtgctttgtgatactatgcatttgttcaatgcagattgggaaacttaaaatttgaatggagattatgttgatgggctttggcagttcatttggatagactgggatgagaagctcttgggacttgtgactggacaaagcattccagtatattaaaataaaattaagccatattactccactcataaaaagcaatcctatggtaggtacatggaggttgggaatagtgcacggaaaggtggcagctttctttggcttcatgttttaatctggtaaagttcaagattgcactttaagcaggcctcctaaatattttagatttcttggggatatgctaaaataaaacaactaaggcatca

SEQ ID NO: 176574 - DNA, 707 bp, Homo sapiens
  Payload ID: 14657
  Gene Symbol: RPL36
  Gene Name: ribosomal protein L36
  Uniprot ID: Q9Y3U8
  ENST ID: ENST00000347512
  CDS Start-End: 135-452
gaagactccagccgccagggggagcgcgtgccgttcttgcctctctggcctgcgcctcctgagccgagtagatatcccggagttccgcgcggcgccagcccttccgccacggccgtctctggagagcagcagccatggccctacgctaccctatggccgtgggcctcaacaagggccacaaagtgaccaagaacgtgagcaagcccaggcacagccgacgccgcgggcgtctgaccaaacacaccaagttcgtgcgggacatgattcgggaggtgtgtggctttgccccgtacgagcggcgcgccatggagttactgaaggtctccaaggacaaacgggccctcaaatttatcaagaaaagggtggggacgcacatccgcgccaagaggaagcgggaggagctgagcaacgtactggccgccatgaggaaagctgctgccaagaaagactgagcccctcccctgccctctccctgaaataaagaacagcttgacagaagccctggctctcctgctgtccgtgggtgggtgtgggtgtgtcgggggcccgcagtcccctgtctggtgcccgctctgagccacaccctctccgggtgctgcctggtcgtgaatcaaaagccgtggcccgcccacccttcccggggcagcaggtgaggaagccgccgtactgcaaatgactttaatcattaaatagcttctatgccacac

SEQ ID NO: 176575 - DNA, 556 bp, Homo sapiens
  Payload ID: 14657
  Gene Symbol: RPL36
  Gene Name: ribosomal protein L36
  Uniprot ID: Q9Y3U8
  ENST ID: ENST00000394580
  CDS Start-End: 193-510
ggagagcagcaggtaagtggtttcccgcactgccggtatccgccgccatccggactcccgggtcctctgtgcaggttggaggatggttggttgtggcgagcgaggctgaaggagccgggacgcggggctctgggcctcgggaactgagccggtactcacctccgccccttctccccgtcgctgtccgcagccatggccctacgctaccctatggccgtgggcctcaacaagggccacaaagtgaccaagaacgtgagcaagcccaggcacagccgacgccgcgggcgtctgaccaaacacaccaagttcgtgcgggacatgattcgggaggtgtgtggctttgccccgtacgagcggcgcgccatggagttactgaaggtctccaaggacaaacgggccctcaaatttatcaagaaaagggtggggacgcacatccgcgccaagaggaagcgggaggagctgagcaacgtactggccgccatgaggaaagctgctgccaagaaagactgagcccctcccctgccctctccctgaaataaagaacagcttgacagaa

SEQ ID NO: 176576 - DNA, 449 bp, Homo sapiens
  Payload ID: 14657
  Gene Symbol: RPL36
  Gene Name: ribosomal protein L36
  Uniprot ID: Q9Y3U8
  ENST ID: ENST00000579649
  CDS Start-End: 86-403
actgtggtgcccaaggagaagaaaagtggtttcccgcactgccggtatccgccgccatccggactcccgggtcctctgtgcagccatggccctacgctaccctatggccgtgggcctcaacaagggccacaaagtgaccaagaacgtgagcaagcccaggcacagccgacgccgcgggcgtctgaccaaacacaccaagttcgtgcgggacatgattcgggaggtgtgtggctttgccccgtacgagcggcgcgccatggagttactgaaggtctccaaggacaaacgggccctcaaatttatcaagaaaagggtggggacgcacatccgcgccaagaggaagcgggaggagctgagcaacgtactggccgccatgaggaaagctgctgccaagaaagactgagcccctcccctgccctctccctgaaataaagaacagcttgacagaa

SEQ ID NO: 176577 - DNA, 239 bp, Homo sapiens
  Payload ID: 14657
  Gene Symbol: RPL36
  Gene Name: ribosomal protein L36
  ENST ID: ENST00000582463
  CDS Start-End: 36-239
ccttccgccacggccgtctctggagagcagcagccatggccctacgctaccctatggccgtgggcctcaacaagggccacaaagtgaccaagaacgtgagcaagcccaggcacagccgacgccgcgggagggagcaccttgagagcggcgcggggcagcgggtttggggttctgacgcaggagtaggagttcgctcatggagctggcccgaggttgcggtgtgtgaggttgagggattt

SEQ ID NO: 176578 - DNA, 874 bp, Homo sapiens
  Payload ID: 14657
  Gene Symbol: RPL36
  Gene Name: ribosomal protein L36
  Uniprot ID: Q9Y3U8
  ENST ID: ENST00000577222
  CDS Start-End: 545-862
cgagaagagaggaccgtgggggcgttcgcgtggctcccagcccgggaccccacccccgctggacagtgggggaaactgaggcctgagcggagtgaccaccccggctatggccagccagcctccagggagcgcgagtgctgctgacaggggccaacgctggtgttggtgaggagctggcctatcactacgcgcgtctgggctcccacctggtgctcactgcccacactgaggctctcctgcagaagggtcggcccgaaataggcggagttgggattcgaactcatttcacaggcagagggaggagagcagccatagccacctccactggttccgactccagctcccgggctcgcaggagtaaacgcgcatgctcagggagctcggtcgcgcatgctcagcgcaacggcggggaagactccagccgccagggggagcgcgtgccgttcttgcctctctggcctgcgcctcctgagccgagtagatatcccggagttccgcgcggcgccagcccttccgccacggccgtctctggagagcagcagccatggccctacgctaccctatggccgtgggcctcaacaagggccacaaagtgaccaagaacgtgagcaagcccaggcacagccgacgccgcgggcgtctgaccaaacacaccaagttcgtgcgggacatgattcgggaggtgtgtggctttgccccgtacgagcggcgcgccatggagttactgaaggtctccaaggacaaacgggccctcaaatttatcaagaaaagggtggggacgcacatccgcgccaagaggaagcgggaggagctgagcaacgtactggccgccatgaggaaagctgctgccaagaaagactgagcccctcccctg

SEQ ID NO: 176579 - DNA, 452 bp, Homo sapiens
  Payload ID: 14657
  Gene Symbol: RPL36
  Gene Name: ribosomal protein L36
  ENST ID: ENST00000579446
  CDS Start-End: 25-309
ggccgtctctggagagcagcagccatggccctacgctaccctatggccgtgggcctcaacaagggccacaaagtgaccaagaacgtgagcaagcccaggcacagccgacgccgcgggcgtctgaccaaacacaccaagttcgtgcgggacatgattcgggaggtgtgtggctttgccccgtacgagcggcgcgccatggagttactgaaggtctccaaggacaaacgggccctcaaatttatcaagaaaagggtaggtgggcgctgccggccgaggggcggggtgggatgggagtcagggccgggctgacggcggcctcgtccctggcaggtggggacgcacatccgcgccaagaggaagcgggaggagctgagcaacgtactggccgccatgaggaaagctgctgccaagaaagactgagcccctcccctgccctctccctgaaataaaga

SEQ ID NO: 176580 - DNA, 433 bp, Homo sapiens
  Payload ID: 14658
  Gene Symbol: RPL36A
  Gene Name: ribosomal protein L36a
  ENST ID: ENST00000372849
  CDS Start-End: 29-241
tttccgcgccgatagcgctcacgcaagcatggttaacgtccctaaaacccgccggactttctgtaagaagtgtggcaagcaccaaccccataaagtgacacagtacaagaagggcaaggattctctgtacgcccagggaaagcggcgttatgacaggaagcagagtggctatggtgggcaaactaagccgattttccggaaaaagaggcaaaaaattgaggaatgtgccctgctttcctaagaactgaagtgctaaaactacaaagaagattgtgctaaggcttgagtgcgttgagcccaactgcagatctaagagaatgctggctattaaaagatgcaagcattttgaactgggaggagataagaagagaaagggccaagtgatccagttctaagtgtcatcttttattatgaagacaataaaatcttgagt

SEQ ID NO: 176581 - DNA, 691 bp, Homo sapiens
  Payload ID: 14658
  Gene Symbol: RPL36A
  Gene Name: ribosomal protein L36a
  ENST ID: ENST00000392994
  CDS Start-End: 56-394
acttccgtttgcctcgcggtttctttctttccgcgccgatagcgctcacgcaagcatggttaacgtccctaaaacccgccggactttctgtaagaagtgtggcaagcaccaaccccataaagtgacacagtacaagaagggcaaggattctctgtacgcccagggaaagcggcgttatgacaggaagcagagtggctatggtgggcaaactaagccgattttccggaaaaaggctaaaactacaaagaagattgtgctaaggcttgagtgcgttgagcccaactgcagatctaagagaatgctggctattaaaagatgcaagcattttgaactgggaggagataagaagagaaaggtatataattatgggtggaaggtgcaatctttttcatagctttattatttgaaaaggtgaacatctattcattgtggcatagagctcaggggtaatcctctaaaaatattagatctatagctaaagatatgtgaggtcttttgctacaaggaggaaaggaagaatgaggcagcttaacagcatggtgagtattttaggaacagataatgttcttaatggggcagtagttcatggcaaaatacaaaacaacttttttctgttctgttacagggccaagtgatccagttctaagtgtcatcttttattatgaagacaataaaatcttgagtttatgtt

SEQ ID NO: 176582 - DNA, 910 bp, Homo sapiens
  Payload ID: 14658
  Gene Symbol: RPL36A
  Gene Name: ribosomal protein L36a
  ENST ID: ENST00000427805
  CDS Start-End: 113-541
gtcggggtgagtggaccaccctttaggcggagtccttccttaagctcccgcccgcggctccgaactgagtcctctcagccgcccgagggcgctgcgctgagccttacactctatgattgctcctaccgactcccatgaggaagtgcgatcgggaacctcctatatacttccgtttgcctcgcggtttctttctttccgcgccgatagcgctcacgcaagcatggttaacgtccctaaaacccgccggactttctgtaagaagtgtggcaagcaccaaccccataaagtgacacagtacaagaagggcaaggattctctgtacgcccagggaaagcggcgttatgacaggaagcagagtggctatggtgggcaaactaagccgattttccggaaaaaggctaaaactacaaagaagattgtgctaaggcttgagtgcgttgagcccaactgcagatctaagagaatgctggctattaaaagatgcaagcattttgaactgggaggagataagaagagaaagggccaagtgatccagttctaagtgtcatcttttattatgaagacaataaaatcttgagtttatgttcacttcatttgtttgctgttcatcttttgggagggaataagctagagccatcaatacaattccgcttgtggggaaatttatgcctcttactggtactacttgttttgcattgaagctgactggttgagttcacatcatatgttgcaattttctaatttggcacttcaatcactaggggccttatgaggcagtttgtcattatgcaatggttattggttatcatgtgagtagacacatttcaggctaatagggagaagtcagtaacacattcatagtgaatatgagatgtctttgctaagagttaagtgtcagatctttgttata

SEQ ID NO: 176583 - DNA, 429 bp, Homo sapiens
  Payload ID: 14658
  Gene Symbol: RPL36A
  Gene Name: ribosomal protein L36a
  Uniprot ID: P83881
  ENST ID: ENST00000553110
  CDS Start-End: 62-382
ctatatacttccgtttgcctcgcggtttctttctttccgcgccgatagcgctcacgcaagcatggttaacgtccctaaaacccgccggactttctgtaagaagtgtggcaagcaccaaccccataaagtgacacagtacaagaagggcaaggattctctgtacgcccagggaaagcggcgttatgacaggaagcagagtggctatggtgggcaaactaagccgattttccggaaaaaggctaaaactacaaagaagattgtgctaaggcttgagtgcgttgagcccaactgcagatctaagagaatgctggctattaaaagatgcaagcattttgaactgggaggagataagaagagaaagggccaagtgatccagttctaagtgtcatcttttattatgaagacaataaaatcttgagtttatgttca

SEQ ID NO: 176584 - DNA, 399 bp, Homo sapiens
  Payload ID: 14658
  Gene Symbol: RPL36A
  Gene Name: ribosomal protein L36a
  ENST ID: ENST00000471855
  CDS Start-End: 275-352
cggggccaggaattgaagtgatgggttcaaagaggttaacgtccctaaaacccgccggactttctgtaagaagtgtggcaagcaccaaccccataaagtgacacagtacaagaagggcaaggattctctgtacgcccagggaaagcggcgttatgacaggaagcagagtggctatggtgggcaaactaagccgattttccggaaaaaggctaaaactacaaagaagattgtgctaaggcttgagtgcgttgagcccaactgcagatctaagagaatgctggctattaaaagatgcaagcattttgaactgggaggagataagaagagaaagggccaagtgatccagttctaagtgtcatcttttattatgaagacaataaaatcttgagtttatgttca

SEQ ID NO: 176585 - DNA, 881 bp, Homo sapiens
  Payload ID: 14658
  Gene Symbol: RPL36A
  Gene Name: ribosomal protein L36a
  ENST ID: ENST00000614077
  CDS Start-End: 47-475
gagtcctctcagccgcccgagggcgctgcgctgagccttacactctatgattgctcctaccgactcccatgaggaagtgcgatcgggaacctcctatatacttccgtttgcctcgcggtttctttctttccgcgccgatagcgctcacgcaagcatggttaacgtccctaaaacccgccggactttctgtaagaagtgtggcaagcaccaaccccataaagtgacacagtacaagaagggcaaggattctctgtacgcccagggaaagcggcgttatgacaggaagcagagtggctatggtgggcaaactaagccgattttccggaaaaaggctaaaactacaaagaagattgtgctaaggcttgagtgcgttgagcccaactgcagatctaagagaatgctggctattaaaagatgcaagcattttgaactgggaggagataagaagagaaagggccaagtgatccagttctaagtgtcatcttttattatgaagacaataaaatcttgagtttatgttcacttcatttgtttgctgttcatcttttgggagggaataagctagagccatcaatacaattccgcttgtggggaaatttatgcctcttactggtactacttgttttgcattgaagctgactggttgagttcacatcatatgttgcaattttctaatttggcacttcaatcactaggggccttatgaggcagtttgtcattatgcaatggttattggttatcatgtgagtagacacatttcaggctaatagggagaagtcagtaacacattcatagtgaatatgagatgtctttgctaagagttaagtgtcagatctttgttataacagttaatttaataaagaattttggcattgttcttc

SEQ ID NO: 176586 - DNA, 746 bp, Homo sapiens
  Payload ID: 14659
  Gene Symbol: RPL36AL
  Gene Name: ribosomal protein L36a-like
  Uniprot ID: Q969Q0
  ENST ID: ENST00000298289
  CDS Start-End: 161-481
attggtttgcagtactgtcgctcaggtgcagttcccacttccgcctgtttcttccctttcctgttaggcgagagctgcgaaaggcgagagctgcgaagggccaggtgtcgggcgctgtttctcgttttcatcatatagacaaaacagccctgctgcaaagatggtcaacgtacctaaaacccgaagaaccttctgtaagaagtgtggcaagcatcagcctcacaaagtgacacagtataagaagggcaaggattctttgtatgcccagggaaggaggcgctatgatcggaagcagagtggctatggtgggcagacaaagccaattttccggaagaaggctaagaccacaaagaagattgtgctaaggctggaatgtgttgagcctaactgcagatccaagaggatgctggccattaagagatgcaagcattttgaactgggaggagataagaagagaaagggccaagtgatccagttctaaactttgggatatttttcttcaattttgaagagaaaatggtgaagccatagaaaagttacccgagggaaaataaatacagtgatattcttacgcaaactttttgtggtttttacttataaatagaattccatgtttagtgtagtcccacctcaaactttactaacaagtttatatatgtatgaagggaaaatactactttactactttttgttttctggtcaatttcaaatgttgaatgaattcataaacattgagcagcttagaa

SEQ ID NO: 176587 - DNA, 7686 bp, Homo sapiens
  Payload ID: 14660
  Gene Symbol: RPL37
  Gene Name: ribosomal protein L37
  Uniprot ID: P61927
  ENST ID: ENST00000274242
  CDS Start-End: 151-444
ctcttgaccccacctacactacgacgacggacgctcgagaacgctgcaccgcgccccgcaggaagtgcttccctgggcggaagcttctgagcgtgatatagcggaagtgccttctcttccggtctttctggtctcggccgcagaagcgagatgacgaagggaacgtcatcgtttggaaagcgtcgcaataagacgcacacgttgtgccgccgctgtggctctaaggcctaccaccttcagaagtcgacctgtggcaaatgtggctaccctgccaagcgcaagagaaagtataactggagtgccaaggctaaaagacgaaataccaccggaactggtcgaatgaggcacctaaaaattgtataccgcagattcaggcatggattccgtgaaggaacaacacctaaacccaagagggcagctgttgcagcatccagttcatcttaagaatgtcaacgattagtcatgcaataaatgttctggttttaaaaaatacatatctggttttggtaaggtatttttaatcaattaggcttgtagtatcagtgaaatactgtaggtttagggactgggctagcttcatatcagatttacttgttaagtgactgttttggaatgtttacttttggactgggtttgtaacacggttaaaggcaatgagaaacaagcagaattccaggagtccttgaagcagagggcactggaagacaatatagcagattaaaatagcacagctcatgtggcataggtgggtattttagatgtttgagtaaatttgaaagagtatgatgtttaaattacctttagcaacatgttcatctgctatgctgtcatgactagggggatgattattagtcacatagagcttgggagtaccactggaaacgtatgggtaggagtttaggtggcttctgtttttcaaaagatgatcttatcctagtatctgtaatgctcacttggcacacctgacttgtgggctgtgtgtaaggtggctagctaagtgaaaaaagcctgctaggtgtgagtcaacttaagaatatgtaaataggtttgagaaaaagtagggcttgggtgcaagtaaagattgagcaggaaataaaggaaaatcaagtataatccctgagatttgtagactaaaggcaatgatgtgggactacttggtcgaatttttttagccctcaacttggtaattgggtgtttctgtgttaaagcactgaaacttgctgtcgtgccttcctagttttcgtggtttattgacagggttgggggttttttttgtttttttaaaatgaagggacaaagtcaactggactgctgagtgagagggcaggggcagttgaagggaacatgaattgctggaacagctacataaaatagtgatgtagccaagtcatgctatttaaattataattctccactgtgtttagaataacatctgaggttcttaacctggccttggaagggtatcacttttacttgtaacctggaatggctttataatgtgctagctaattgctactctcatcttgtattttaactcctaatttacccttcaggtctcagcttcagaacattcacttataaagaaaccctgctgattaaatctctcttgggcttcctcccgaaatgtgagactatactttaaagatgtatggttagagtccaattgccattgcctttcttgtttacagatagtgcaatggcgcaatcctggctcactgcagcctctaattcctgggctcaagtcaagtggttctcctgcctcagccttctgagtagctgggactacagatgcacaccaccacacctggctaatttttgtgttttttgtagagatggagattcactcgactaattctttttgtattcttagtagagactgggtttcaacatgttgaccaggctggtctcgaactcgacctcgtgatccgccgcctcggcctcccaaagtgctaggattacaggcgtgagccaccactcccggctgtcatcatcaaattttcaagtgaagatagtctgttgaagattgaacaatgaccttgaaagacagctgagttgctgtgggtataatgtaaagctggtgaagtttggccagtttgggcttcagaagtctaagtctagtgaaggtaccctgacccccatataaacaacccttgaggccggtgtggtggctcacggctgtaatcctggcactttgggaggccgaggtgggcggatcacaaggtcaagagatcgagatcaccctggcccacatggtgagaccccaactctactaaaaatacaaaaattagctgggtgtggtggcatgtgcctgtagtcttagctacttgagaggctgaggcaggagaatcgcttgaacctgggaggcagaggttgcagtgagctgagatcatgccactgtgctccagcctggtggcacagtgagactccacctcaaaaaaaaaaaaaaatccttgaactaatgactcaaattttcaaatgaaacaaaataagcagtggatcttgcattggagatggagttaaactatgttgcccaggctggtcttggactcctggtttcaagtgatcctctcatcttggcctcccaaagtgctgggattacagggacgagccaccacaccccacctattgtctatatttctatctttaacagcacttcagtcctgccttaagttatagttatgtatagatacccattatactttaaatttttcagcagaaattatgcttttatcttctctgcagtgttatatgttggtgtgcaaaaatgttaaatttatttttcctaagtaccccatctgcttttcaactctgtcctctgcctgaaaagcctccctccagcccctacttccctcccatcttagttcacaaagtcaggttgatttgcccccagctgtcaaagcagactacctgtttccacatgtaactggttatgttctgtaaagttacaaaaatagaaaggttgaatctgtggcggccgggtacggtagctcacgtcctatagtcgcagcactttgggaggccaaggtgggcagttcacgtgaggtggggagttcgagaccagcctgaccaacatggagaaaccccgtctctactaaaaatacaaaaatattagccgggcgtggtggtgcatgcctgtaatcccagctactagggaggctgaggcaggagaattgcttgaacctgggagacggaggttgcggtgagctgcagaggcctcacctctaattgagacacaattatatattgttgatatatatatatatatatatacacacacacacacacactatgatggataaatgcatgagtttctgtgagagcattggaaaggagtttgtcactcaataggtgaagccaggctaagatttaagctgagccagggaggacttgaaggaatcatgatgagagagaaggtaagtggctttgccagcaatgaaacagctgacataatggtaaccagtcagaggagggcataactatgaaactggacaccttggttgtcaggttagaaggatggggtgtagggttggtaagaaaagaattcagggaagagcagcgatcagattatgaagaatttgtcttgagaaattacagaggatttaaaccagaatgttaggaatagttattctagcaagatgaatgtggaaagtgttagtgtgcatgtgatgagtcttgaagctggaaactaggtaacaggttcttaaatagttcatgtgaaaatcatgacagactaaggcagtggctgtggggctgtccgggagttctctacagaaaacatctaaaacttgaatgtgcaagtgagtagctaacttccaagcttcccatttctgtataatttaagcatgaaaatgagaacactgagatttgataggcatgtagaagtcagagtaagcaagagggcttgagttcatcgatgaacttcagtaactatccttgacttagtattggtggaaaccatttgtgaatttacagactccaaaaacaaaaagataatttagagtctcaaagtaagatttggggagatgtccattggagacagaagtggagagagggagaagttcatttgttgacatatttatgtatggtgcacctactgtgtgccaagccatgttagagatacagtgggagcaaaaccagatgtgttttctgccctctgactccagtggttgcagaattagcccaggaactagaattggatggagtcacacaaaccaaggaaggggattgtttgaggggggcactcagtcacatgtggctgaggccaaagagaatgaagatatattttaaaattctggatttggcaaaatttaggctagtctttacttttcataaacctctctcatgttagagcagcaaagaaaaaccagtttgccaagaggtcacgagattgggcagtgaggaatggggagtttagtttaaaagacaacactagatacttttggaagtttacctattctgtggttcccttttattgactaaatggtgcccttcattcatgaagcaagtatctatttagtgactactatgtgtcaaaagctatctaggcccagaaacttttaagtggaaaacaaaacaaagaccctgccctgacagatttcaatcatgtatatactgtatgtatgtttgtggaaggtgacataatagacaattgcagatagtgataagtgtgtaagacaaggataccacgagcgtaatagacagtggggatggaggaacctttagaaggttggttaagttgaatgataaggagccattcttttgtctttacctgaatgacttatcattcagccctttttgagttttgggttgcttgcagagtttaaccttgcctgtaattgaaacttaattttgtaatagcataacttcatgtaagaaaagcaaagcaatacattacagaattattttactgaagaacttgtttcagagaaagaggctgtttcacatttattagcacatttggattatatttaggtgttttatttttttttaaacaaaggagtttggatcataatacaagagaagcacagggcaaagacactgcataacctcaagaactaagaatggaaggactggccaggcctggtggtgcacacctgtaatcccagctactcaggaggctgaggcgagagaatcgcttgagcctggggggcagaggttgcagtgagctgagagaacggcgggcggcagagcgagactccatctcaaaaaaaaaaaaggataaaggaaggacttaagcaaaatcttccttgtaagtagaaggatgttttgacaagaaaagttgcaatggaaaaatggttctcatgtacacgagtatgtagaataagcatcgtgtgtggattggattcagatcaaaacattgcttttatgtttgtgtctttatacggtgggagtataccctggtgccccaggatgaagacttgacctgacccatgtatttttagattactcacagataacaaaaagtattttcatcatgattagttgcgaaaacagttttatttcaataggtaaaacgtgcagtcctatgtaatcgtcagaaggtaatcttaattatagcttgggtgtgctttaaactgcaagctggcagtggagggcacgattcctctgatttcagctttctccttatacttttctggagctgtgagctgcaagttaactcagtgggattaaagtgtagactggaggtacaaaaggtgaggagtgaggagatagggtagttcttccttggctggctggcttcataatccctgggccccgcagataattaaatcgactttttctgtctcaggcatttgtatgacctctttggaggttccctgctgggtagttatccttgtatctgatggacccatctcaatttaaaatactctgccaggttcggaggttcatgcttgtcatcccagcactttgggaggctcagaggtgccattggcttgagcccaagagtttgagaccagcctgggcaacctggtgaaacctcttctccattaaaaatacaaaaaattagccaggcatggtggtatgtgcctgtagtcccagctactcagggagctgaggtggaaggattgcttgagcctgggaggtcaaggctgcagtgaaccttgattgtgccactgcactccagcctggatgacaaagaccctgtctcaagaaaagtctgtaattctttcctaacccttagtatccagcctcagtcctgaggttttctttacctctgggggctattttatgccggctctctcctgagtgtcacacatctggtcctcaggaaacattctcacatccctggcctgaaaaaaacaatttcagggagatcgcatggcagcagccctctctgggctccccagctaaatggttgtacgaaacacatttcaaagctctctgaagggcttccttgaagttcctttcactgggtttcaaagtagaaggtagtaactcctttgtccaagaaggctgaattgagcacttaacaattctccaaagaaatttcttcattggtctctatcctagaccccttctgtatccttgatatggctgaggattctaaaaaatgaccagtcttacatgggagggctgggatataaaaaataaaataataaataatgataaaaactgaaaactgaccacgttcttggatatgttttctttgggttgtgtgtgtgtgtgagacttttgatagttacccaaagtaggaaaaatcccattctaataaggttatatttatgtagctctgcaaataaacatctagcaaatgtaaaaagtattttctttgccttaaaaatgattaaaattatttgaactcctgaggagtgttatatgaataaaattagtaagttatttggaggaaagttattttttaaaaagacaactggtaaaacagtacaggagaaaggccagcttcctcaagtgaggacagttgtttagaattgactgaggagcggccgggtgcggaggctcacatctgtaatcccacacgccttgggaggctctgaggcgggtagatcacctgaggtcaggagtttgagaccagcctggccaacatggcgaaaccccgtctccactaaaaatacaaaaattagccaggtgcagtggcacacacctgtaatcccagctactccgaaggctgaggcaggaggatcacctgagcccaggaagttgagactgcagtgagctgagattgcaccactgcactccagcctcagtgacagcgagactgtctcaaaaaaagaaaaaagtgactgaggaggaagaggccaggtggcaaatggaacagaatcaccaaagggtgaacaggactaaggcaatgtagtgtatggctcagctacgtcagagtggaaaaggtgttattagagcagaaactatggtccctgcgtcacagggaagcaacctacagagaagcagcagctccccaagagaggagagataagaagccagaagcctcagagtgaacaattgtcctattagggattgctctagagagagaaacctctgggaacgtacccctgtgaggcagcacagcacaatgcttttagaattgtatgagagttgatatatctccatttgttttgcaaaggcaaaaactaagatacagagattatctgttaaagttatgtatttctttggtaataaagatgctgacagtgttgctggaatgcatttctttaataaagatattgtacaatgaaa

SEQ ID NO: 176588 - DNA, 637 bp, Homo sapiens
  Payload ID: 14660
  Gene Symbol: RPL37
  Gene Name: ribosomal protein L37
  ENST ID: ENST00000509877
  CDS Start-End: 28-252
ctttctggtctcggccgcagaagcgagatgacgaagggaacgtcatcgtttggaaagcgtcgcaataagacgcacacgttgtgccgccgctgtggctctaaggcctaccaccttcagaagtcgacctgtggcaaatgtggctaccctgccaagcgcaagagaaagtgcatggattccgtgaaggaacaacacctaaacccaagagggcagctgttgcagcatccagttcatcttaagaatgtcaacgattagtcatgcaataaatgttctggttttaaaaaatacatatctggttttggtaaggtatttttaatcaattaggcttgtagtatcagtgaaatactgtaggtttagggactgggctagcttcatatcagatttacttgttaagtgactgttttggaatgtttacttttggactgggtttgtaacacggttaaaggcaatgagaaacaagcagaattccaggagtccttgaagcagagggcactggaagacaatatagcagattaaaatagcacagctcatgtggcataggtgggtattttagatgtttgagtaaatttgaaagagtatgatgtttaaattacctttagcaacatgttcatctgctatgctgtcatgactagggggatga

SEQ ID NO: 176589 - DNA, 553 bp, Homo sapiens
  Payload ID: 14660
  Gene Symbol: RPL37
  Gene Name: ribosomal protein L37
  ENST ID: ENST00000508493
  CDS Start-End: 28-276
ctttctggtctcggccgcagaagcgagatgacgaagggaacgtcatcgtttggaaagcgtcgcaataagacgcacacgttgtgccgccgctgtggctctaaggcctaccaccttcagaagtcgacctgtggcaaatgtggctaccctgccaagcgcaagagaaagtataactggagtgccaaggctaaaagacgaaataccaccggaactggtcgaatgaggcacctaaaaattgtataccgcagattcaggtacagtttgtatgttcgatcataattggtccagtgggcttgaatgaaaccctcgtgtttacttgtaaaaagataacagtaccctgatggttactggggatgagatgttggaagctttttatttattgttgtttttgaggcagggtttcactatgttgcccaggcttgagtgtagtggcacgatcacggctcagtgcagcctcagtctccccagcctcaggtaatctcatctcagccgcccgagtacccgggactacaggtgtgcgctgccacatgcccagctaatttttgtatttattgta

SEQ ID NO: 176590 - DNA, 495 bp, Homo sapiens
  Payload ID: 14661
  Gene Symbol: RPL37A
  Gene Name: ribosomal protein L37a
  ENST ID: ENST00000446558
  CDS Start-End: 21-248
cggacctaggtcgcggcgacatggccaaacgtaccaagaaagtcgggatcgtcggtaaatacgggacccgctatggggcctccctccggaaaatggtgaagaaaattgaaatcagccagcacgccaagtacacttgctctttctgtggcaaaaccaagatgaagagacgagctgtggggatctggcactgtggttcctgcatgaagacagtggctggcggtgcctggacgtacaacagaatggaataacagcaaacaacattggaggaggacttgtctgggagagcagccattttaaagaagagcacattaagtcacaaacagtcgcagctgatctactttgcagcatcgccatacatgcctaactaaatattgaaatcccgggaaaaactcactgtgcatcatgttccagaaactagctttgcaaacagtcttttcagatgtgtacattttgtgtatttgaggcatataatatatatattttcctccatgttca

SEQ ID NO: 176591 - DNA, 385 bp, Homo sapiens
  Payload ID: 14661
  Gene Symbol: RPL37A
  Gene Name: ribosomal protein L37a
  ENST ID: ENST00000420712
  CDS Start-End: 14-190
aggtcgcggcgacatggccaaacgtaccaagaaagtcgggatcgtcggtaaatacgggacccgctatggggcctccctccggaaaatggtgaagaaaattgaaatcagccagcacgccaagtacacttgctctttctgtggcaaaggagaaagggaggctttcacatccctgacaataagaccaagatgaagagacgagctgtggggatctggcactgtggttcctgcatgaagacagtggctggcggtgcctggacgtacaataccacttccgctgtcacggtaaagtccgccatcagaagactgaaggagttgaaagaccagtagacgctcctctactctttgagacatcactggcctataataaatgggttaatttatgtaa

SEQ ID NO: 176592 - DNA, 401 bp, Homo sapiens
  Payload ID: 14661
  Gene Symbol: RPL37A
  Gene Name: ribosomal protein L37a
  ENST ID: ENST00000456586
  CDS Start-End: 136-342
gggccttcggagcgcgcggccagccctgggcactggtttcgttgggttgaatttagggaaaactaggccaaacgtaccaagaaagtcgggatcgtcggtaaatacgggacccgctatggggcctccctccggaaaatggtgaagaaaattgaaatcagccagcacgccaagtacacttgctctttctgtggcaaaaccaagatgaagagacgagctgtggggatctggcactgtggttcctgcatgaagacagtggctggcggtgcctggacgtacaataccacttccgctgtcacggtaaagtccgccatcagaagactgaaggagttgaaagaccagtagacgctcctctactctttgagacatcactggcctataataaatgggttaatttatgtaac

SEQ ID NO: 176593 - DNA, 3647 bp, Homo sapiens
  Payload ID: 14661
  Gene Symbol: RPL37A
  Gene Name: ribosomal protein L37a
  Uniprot ID: P61513
  ENST ID: ENST00000491306
  CDS Start-End: 687-965
gactttcctcaggaaacaccaggctcttctgaattagtcgcgagcagaaccatcgtcctttccttcagaactctgaccagtttgaaactgtctaacttcttaatgtggctatatgatcgtttgcagctggcctgcaacttgttctgggaatggaaccttggattttagtcaccactgtcgctagcatcctgcacagtcagccacttttagagagcataatgcagagggggaaataaatgagatttggaatagagacggggtttcaccctgctggccaggctggtctcgaactcctgacccaccccgcctcccaaagtgttagaatcacaagcgtgagccaccgcgcccggccccacaaatgtaagatttatgcacttctccaagccaagtgctgtgcatcgaatggaggaactcgtacctttgcaggattttgtgatatatgtgaaataatccggacatgcttctgctatggttgtttgtcgccatagtttgcgaatctgggtaaacctggatgagagagacgccttacaattgcaaacatttctcaggaggccgcctgaaaacgcccaaaccatagagctcagttcctagctaggcctctaccagccacttccgctcgtccgcctaataccgcgcctgcgcaccgcgtctcttcctttctgggctcggacctaggtcgcggcgacatggccaaacgtaccaagaaagtcgggatcgtcggtaaatacgggacccgctatggggcctccctccggaaaatggtgaagaaaattgaaatcagccagcacgccaagtacacttgctctttctgtggcaaaaccaagatgaagagacgagctgtggggatctggcactgtggttcctgcatgaagacagtggctggcggtgcctggacgtacaataccacttccgctgtcacggtaaagtccgccatcagaagactgaaggagttgaaagaccagtagacgctcctctactctttgagacatcactggcctataataaatgggttaatttatgtaacaaaattgccttggcttgttaactttattagacattctgatgtttgcattgtgtaaatactgttgtattggaaaagcatgccaagatggattattgtaattcagtgtcttttttagtagtcaaatggtaaaatgcagcataagaatataagtcttccaagttagatatgagtgttagctttttataagtctgctcctgccagtttgactttgagatacattggagccaactgtaaactttagtttttaaattacagttagtttttttgtttgtttttgaggcggagtctctgttacccaggctggagtgcagtataccagtcttggcccacttcaacctccacttcttaggttcaagcgattctcctgcctcagcctcctgagtagctgggattacaggcacgcaccaccatacctggctaatttttgtattttgagtagagatggagttttcaccacattggccaggctgttcttgaactgacctcaagcgatccacctgccttggccttccagagtgctgggattacaggtgtgagccaccacgcccagccttgcatttaatatttttataatgtgtctaggctgggtgcggtgactcacgcctgaaatcccagcactttgggtggctgaggcaggtggattacttgaggccaggagattgagaccagtgtggccaacatagcaaaaacccgtctcgacgaaaaatacaaaaaatagcttggtatggtggcacatgcctgtaatcccagctactttggaggctcaggcacaagaatcacttgaacctacgaggcggaggttgcagtgggccaggatcgtgccactgcactttatttagccaggacaacactctgtctccaaaaaaaagtttctgaaggtaaaagatatactaaaggatatacatatactgcctcttctatgatgtttcatttgacctacaccatcagcatcttcaggaaacagtatgaaactaatttcacattaaatgttgcaaacgtctgcaattctccagtttttagtttgcacgtaaggattcgtaggattgatttcagattgacagatggttgtagtaacaaaaaaatgaattgccttggagaattcgagttattttaggcctgcctttgacacttttatgcacttaattcactgccaatttagtctaactcctcaaccatctgtggtatggacttctcagtcctcctaattggtatgtcttttatctatcccagagtcagtagtcctttaaggatgcaaatttaattcgataagaatgtggatttacttcatctttaggacagagtaaaaacctttatttcacttggtctgacccctatcttctataacttgtttttttgctcattactggcctttgcacggatgtctcccttcacctgtacctcctgcattgcctctggcagaaacatcgctaccccaggagaatacttcactgggtcaggcatttgctagatccatagcagtaactcatctgtggatctcatttgtgtcacaaaatggtactcctactgattttgtaatgtgaagcaagtactgtgggtcagtaggggtaggaccaggagtgacaagtcaggattttcaggcttcataggaatgacacagctctccaggtgaatctcctggagaattctccataggatctccaggtgagtgaccaggatttcatgtaagcatagggaattgaatgagcattagatggtctaatgctgcggttaagaacaccaacttagccaaactgcctagatagttgggtgacttgggttaagtgacttaacctctctgcttcagtttcctgtataattcttggtagtagaatggagtatatgctgggtgtttggattattaatttggagtcttacaaagctgctatgttacatgattaggcatggaaaacttcggtttttataatcagtgaagtactgctttttgtttgttttctgagagagtgtctgtcacccaggctgaagtgcagtggcatgatctcagttcactgcagcctctacctcccgggttcaagcagttctcgtgcctcagcctccgaagtagctgggattacaggcttatgccacaaagctcagctagtttttgtattttttatttttagtagagatgggctttcgccatgttgaccaggctggtctcaaactcccaggctcaactgataacgtctgccttggcctcccaaagtgctgggattctgtaagccacctcacccagccatgtattgcttttttatgacagttaaaagaggaaagggcgggggacagtttacagaccagtgaaagtgctgagataaatatttttatacctaaggaaatagtgattttcccaagatgatagggaggcaggtgatgtagatagggctgaagattagatttctggctcctatctgtgattttctgctgtaccagtctgccttctattttatgggctcagtattccttacctgcctcttcccatgctaaagatggcccaccttcgttttgttatttaagcaacttcatcccctggcttgttttcacagtggttttctgagcctttgactctaagtcatctaattgaacattgtgttgtgatataaaaagtaagttaggcttgtgtttttca

SEQ ID NO: 176594 - DNA, 775 bp, Homo sapiens
  Payload ID: 14661
  Gene Symbol: RPL37A
  Gene Name: ribosomal protein L37a
  ENST ID: ENST00000598925
  CDS Start-End: 254-436
gggccttcggagcgcgcggccagccctgggcactggtttcgttgggttgaatttagggaaaactaggtcatatgtaattcacatgtcggtcacacgtcagtgaggtggaggaacggtgtgtggaggctccagggcctgcctgggttccaggtctatcactggtttctcccttcactctaaacaggccaaacgtaccaagaaagtcgggatcgtcggtaaatacgggacccgctatggggcctccctccggaaaatggtgaagaaaattgaaatcagccagcacgccaagtacacttgctctttctgtggcaaaaccaagatgaagagacgagctgtggggatctggcactgtggttcctgcatgaagacagtggctggcggtgcctggacgtacaaagatgccaaaatggaaccaaatctccatgaactctgctaatggaagacgaggaaaaggcaggtaacctaagcaaacccaaatggaccaaatgcaacgctgatggaatctaagtgctcagaccaaggaacggggactgaaataacagtggacaccacatggcatgatccaatcagattgagccctggaaagatcatcccatggcaagatccagttagattacacttcctggcatcacctcattgcaagatccaagatcatgcctcattaccttctgcctgtaaaacctgccccagcccccagctccaggagacagatttgagccaggctcctgtctttctctgcagccttgcaataaacttttctttctacaaaaaccca

SEQ ID NO: 176595 - DNA, 425 bp, Homo sapiens
  Payload ID: 14661
  Gene Symbol: RPL37A
  Gene Name: ribosomal protein L37a
  ENST ID: ENST00000600880
  CDS Start-End: 26-244
gggctcggacctaggtcgcggcgacatggccaaacgtaccaagaaagtcgggatcgtcggtaaatacgggacccgctatggggcctccctccggaaaatggtgaagaaaattgaaatcagccagcacgccaagtacacttgctctttctgtggcaaaaccaagatgaagagacgagctgtggggatctggcactgtggttcctgcatgaagacagtggctggcggtgcctggacgtacaagtaacctaagcaaacccaaatggaccaaatgcaacgctgatggaatctaagtgctcagaccaaggaacggggactgaaataacagtggacaccacatggcatgatccaatcagattgagccctggaaagatcatcccatggcaagatccagttagattacacttcctggcatcacctcattgcaa

SEQ ID NO: 176596 - DNA, 529 bp, Homo sapiens
  Payload ID: 14661
  Gene Symbol: RPL37A
  Gene Name: ribosomal protein L37a
  ENST ID: ENST00000441179
  CDS Start-End: 111-293
agggaaaactaggtcatatgtaattcacatgtcggtcacacgccaaacgtaccaagaaagtcgggatcgtcggtaaatacgggacccgctatggggcctccctccggaaaatggtgaagaaaattgaaatcagccagcacgccaagtacacttgctctttctgtggcaaaaccaagatgaagagacgagctgtggggatctggcactgtggttcctgcatgaagacagtggctggcggtgcctggacgtacaaagatgccaaaatggaaccaaatctccatgaactctgctaatggaagacgaggaaaaggcaggtaacctaagcaaacccaaatggaccaaatgcaacgctgatggaatctaagtgctcagaccaaggaacggggactgaaataacagtggacaccacatggcatgatccaatcagattgagccctggaaagatcatcccatggcaagatccagttagattacacttcctggcatcacctcattgcaagatccaagatcatgcctcattaccttctgc

SEQ ID NO: 176597 - DNA, 698 bp, Homo sapiens
  Payload ID: 14661
  Gene Symbol: RPL37A
  Gene Name: ribosomal protein L37a
  ENST ID: ENST00000427280
  CDS Start-End: 254-520
gggccttcggagcgcgcggccagccctgggcactggtttcgttgggttgaatttagggaaaactaggtcatatgtaattcacatgtcggtcacacgtcagtgaggtggaggaacggtgtgtggaggctccagggcctgcctgggttccaggtctatcactggtttctcccttcactctaaacaggccaaacgtaccaagaaagtcgggatcgtcggtaaatacgggacccgctatggggcctccctccggaaaatggtgaagaaaattgaaatcagccagcacgccaagtacacttgctctttctgtggcaaaaccaagatgaagagacgagctgtggggatctggcactgtggttcctgcatgaagacagtggctggcggtgcctggacgtacaagaaaatgagtgcagagaatggacagcagagggagcccttgatgagttttgaccatcaagagatgccaaaatggaaccaaatctccatgaactctgctaatggaagacgaggaaaaggcaggtaacctaagcaaacccaaatggaccaaatgcaacgctgatggaatctaagtgctcagaccaaggaacggggactgaaataacagtggacaccacatggcatgatccaatcagattgagccctggaaagatcatcccatggcaagatccagttagattacacttcctggcatcacctcattg

SEQ ID NO: 176598 - DNA, 1170 bp, Homo sapiens
  Payload ID: 14662
  Gene Symbol: RPL38
  Gene Name: ribosomal protein L38
  Uniprot ID: P63173
  ENST ID: ENST00000311111
  CDS Start-End: 132-344
actgcccggaaacggaagtctcgttctttttcgtccttttccccggttgctgcttgctgtgagtgtctctagggtgatacgtgggtgagaaaggtcctggtccgcgccagagcccagcgcgcctcgtcgccatgcctcggaaaattgaggaaatcaaggacttcctgctcacagcccgacgaaaggatgccaaatctgtcaagatcaagaaaaataaggacaacgtgaagtttaaagttcgatgcagcagatacctttacaccctggtcatcactgacaaagagaaggcagagaaactgaagcagtccctgccccccggtttggcagtgaaggaactgaaatgaaccagacacactgattggaactgtattatattaaaatactaaaaatcctaagtgtctttcgtctttgcggatgggaaagggaaaaatgctacctcgtagtggcttctgatgggaacaggacgcgggttctgttgctgccttcctgtgtctttttttttttttttttttctttctttgagacggagtcttgctctgtggctcatcctggagcacagtggtgcgatatcagctcactaccacctccgcctcctgggttcaagcgactgtcctgcctcagcctcccgagtggctgggattacaggcacacatcaccacgcctggccaatttttgtatttgtagtagagacagggtttcactgcctgcctcagcctcccatagtgctgggattacaggcatgagcctccgtgcccggtgcatccctaatcttgagcatgatctcagtcggcaaatgaggccatctgttttcagcctgtttgaaaataagatgtggggaggccatgatggaaatagcacgtggggttaaacataactggcagatgtgggagcgatggtggggcatgccattcaaacaggtcccaaaatgggtgcaacaaggtatagcacatctaccactcgctaacttgactgacttggagaaatgactacacttttgcctgtttcctcagttggaaaatagccatattaacacctctttcattggcttgctgtcagggtactgggatggggggaggtgcatgggttggggtggccaccaggtggtgctgtgccacagcgggcagcccctctggaaatgactggcatcataaaatctgtcttcatacccga

SEQ ID NO: 176599 - DNA, 431 bp, Homo sapiens
  Payload ID: 14662
  Gene Symbol: RPL38
  Gene Name: ribosomal protein L38
  Uniprot ID: P63173
  ENST ID: ENST00000439590
  CDS Start-End: 168-380
agtgcgaacgcctacatgagtcttgatcctcggcaggcaccgtacccagtttcctccgttgggagggtttaactgcccggaaacggaagtctcgttctttttcgtccttttccccggttgctgcttgctgtcctggtccgcgccagagcccagcgcgcctcgtcgccatgcctcggaaaattgaggaaatcaaggacttcctgctcacagcccgacgaaaggatgccaaatctgtcaagatcaagaaaaataaggacaacgtgaagtttaaagttcgatgcagcagatacctttacaccctggtcatcactgacaaagagaaggcagagaaactgaagcagtccctgccccccggtttggcagtgaaggaactgaaatgaaccagacacactgattggaactgtattatattaaaatactaaaaatcctaa

SEQ ID NO: 176600 - DNA, 532 bp, Homo sapiens
  Payload ID: 14662
  Gene Symbol: RPL38
  Gene Name: ribosomal protein L38
  Uniprot ID: P63173
  ENST ID: ENST00000533498
  CDS Start-End: 253-465
gcttgctgtgagtgtctctagggtgatacgtgggtgagaaaggtaatctggggcaatccactgccaggtgaaatctggggaccccaggtccgcgtggagggtgtcggggaggagaaggggagtgcgatggggccgatatttcgggggagagcgggaaaacggggttcgctgccagcccccgcgccgtgttaacgccgaggactgtttcccgcaggtcctggtccgcgccagagcccagcgcgcctcgtcgccatgcctcggaaaattgaggaaatcaaggacttcctgctcacagcccgacgaaaggatgccaaatctgtcaagatcaagaaaaataaggacaacgtgaagtttaaagttcgatgcagcagatacctttacaccctggtcatcactgacaaagagaaggcagagaaactgaagcagtccctgccccccggtttggcagtgaaggaactgaaatgaaccagacacactgattggaactgtattatattaaaatactaaaaatcctaagtgtctttcgtctttg

SEQ ID NO: 176601 - DNA, 169 bp, Homo sapiens
  Payload ID: 14662
  Gene Symbol: RPL38
  Gene Name: ribosomal protein L38
  ENST ID: ENST00000528433
  CDS Start-End: 106-169
gcttgctgtgagtgtctctagggtgatacgtgggtgagaaaggtaatctggggcaatccactgccaggtcctggtccgcgccagagcccagcgcgcctcgtcgccatgcctcggaaaattgaggaaatcaaggacttcctgctcacagcccgacgaaaggatgccaaat

SEQ ID NO: 176602 - DNA, 429 bp, Homo sapiens
  Payload ID: 14662
  Gene Symbol: RPL38
  Gene Name: ribosomal protein L38
  ENST ID: ENST00000534490
  CDS Start-End: 91-285
cccggttgctgcttgctgtgagtgtctctagggtgatacgtgggtgagaaaggtcctggtccgcgccagagcccagcgcgcctcgtcgccatgcctcggaaaattgaggaaatcaaggacttcctgctcacagcccgacgaaaggatgccaaatctgtcaagatcaagaaaaataaggacaacgtgaagtttaaagttcgatgcagcagatacctttacaccctggtcatcactgacaaagagaaggcagagaaactgaagcagtccctgccccccggtgagtgagcctgaagtcacttcaggggcgggtggggtttggaaggttgctgtgtgtggccatgttgtatcttgttttgaatccctctcagatttcagagcccattttatggtctaagaatctgctcttgctgttgggagtgtgaggaatag

SEQ ID NO: 176603 - DNA, 344 bp, Homo sapiens
  Payload ID: 14662
  Gene Symbol: RPL38
  Gene Name: ribosomal protein L38
  ENST ID: ENST00000584577
  CDS Start-End: 92-295
ccccggttgctgcttgctgtgagtgtctctagggtgatacgtgggtgagaaaggtcctggtccgcgccagagcccagcgcgcctcgtcgccatgcctcggaaaattgaggaaatcaaggacttcctgctcacagcccgacgaaaggatgccaaatctgtcaagatcaagaaaaataaggacaacgtgaagtttaaagttcgatgcagcagatacctttacaccctggtcatcactgacaaagagaaggcagagaaactgaagcagtccctgccccccgtgaaggaactgaaatgaaccagacacactgattggaactgtattatattaaaatactaaaaatcct

SEQ ID NO: 176604 - DNA, 401 bp, Homo sapiens
  Payload ID: 14663
  Gene Symbol: RPL39
  Gene Name: ribosomal protein L39
  Uniprot ID: P62891
  ENST ID: ENST00000361575
  CDS Start-End: 68-223
cttccgccagcttccctcctcttcctttctccgccatcgtggtgtgttcttgactccgctgctcgccatgtcttctcacaagactttcaggattaagcgattcctggccaagaaacaaaagcaaaatcgtcccattccccagtggattcggatgaaaactggaaataaaatcaggtacaactccaaaaggagacattggagaagaaccaagctgggtctataaggaattgcacatgagatggcacacatatttatgctgtctgaaggtcacgatcatgttaccatatcaagctgaaaatgtcaccactatctggagatttcgacgtgttttcctctctgaatctgttatgaacacgttggttggctggattcagtaataaatatgtaaggcctttcttttt

SEQ ID NO: 176605 - DNA, 756 bp, Homo sapiens
  Payload ID: 14664
  Gene Symbol: RPL39L
  Gene Name: ribosomal protein L39-like
  Uniprot ID: Q96EH5
  ENST ID: ENST00000296277
  CDS Start-End: 404-559
atcaccgccctagcatccggggaaatcgcggtcttagcatccggcgcgcggcggttgaattgctgcgcccagcgaggcaaccgcctccgaacgccaggtgggggcgaggcgtctcggagtctcagagacaccaaggcccctgcgacaaggtggctgcagctaggccgggggcgtcaggacgacggagcgggttcgggtcggtgacacgcagacctgagggagctgggcccgccttttccgcccgcgccccaggcccttgcagatcgagatttgcgtcctagagtgggaaaaaagcagaggccagggcgccgattttatttggagagaagcaagcatctttgcctctttggagtaggaaattcagacttgaaaaagtggtgtgtggttgactctgtttctcgccatgtcttctcacaagactttcaccattaagcgattcctggccaagaaacaaaagcaaaatcgtcccatcccccagtggattcagatgaaacctggtagtaaaatcaggtacaactccaaaaggaggcattggagaagaaccaagctgggtctataaggaattgcacatgagatggcacacatatttatgctgtatcaagttcacgatcatcttacgatatcaagctgaaaatgtcaccactacctggacagttgcacatgttttactgggaatatttttttctgtttttctgtatgctctgtgctagtagggtggattcagtaataaatatgtgaaagcttttgtttcaaaaa

SEQ ID NO: 176606 - DNA, 749 bp, Homo sapiens
  Payload ID: 14664
  Gene Symbol: RPL39L
  Gene Name: ribosomal protein L39-like
  Uniprot ID: Q96EH5
  ENST ID: ENST00000433055
  CDS Start-End: 397-552
cttttcagactcagcccgcctgcacccaggtgaaataaacagccatgttgctcacacaaagcctgtttggtggtctcttcacatggacgcgcatgaaatttggtgccgtgactcagatcgggggacctcccttgggagatcaatcccctgtcctcctgttctttgctccatgagaaagatccacctacgacctcaggtcctcagacggaccagcccaaggaacatctcaccaattttaaatcagatattttgcctgtgatctatataattttatgccagaagacttggactcaagcattaagatattttatttggagagaagcaagcatctttgcctctttggagtaggaaattcagacttgaaaaagtggtgtgtggttgactctgtttctcgccatgtcttctcacaagactttcaccattaagcgattcctggccaagaaacaaaagcaaaatcgtcccatcccccagtggattcagatgaaacctggtagtaaaatcaggtacaactccaaaaggaggcattggagaagaaccaagctgggtctataaggaattgcacatgagatggcacacatatttatgctgtatcaagttcacgatcatcttacgatatcaagctgaaaatgtcaccactacctggacagttgcacatgttttactgggaatatttttttctgtttttctgtatgctctgtgctagtagggtggattcagtaataaatatgtgaaagcttttgtttcaaaaa

SEQ ID NO: 176607 - DNA, 653 bp, Homo sapiens
  Payload ID: 14664
  Gene Symbol: RPL39L
  Gene Name: ribosomal protein L39-like
  Uniprot ID: Q96EH5
  ENST ID: ENST00000455270
  CDS Start-End: 301-456
tccggcgcgcggcggttgaattgctgcgcccagcgaggcaaccgcctccgaacgccaggtgggggcgaggcgtctcggagtctcagagacaccaaggcccctgcgacaaggtggctgcagctaggccgggggcgtcaggacgacggagcgggttcgggtcggtgacacgcagacctgagggagctgggcccgccttttccgcccgcgccccaggcccttgcagatcgagatttgcgtcctagagtgggaaaaaagcagaggccagggcgccgtggtgtgtggttgactctgtttctcgccatgtcttctcacaagactttcaccattaagcgattcctggccaagaaacaaaagcaaaatcgtcccatcccccagtggattcagatgaaacctggtagtaaaatcaggtacaactccaaaaggaggcattggagaagaaccaagctgggtctataaggaattgcacatgagatggcacacatatttatgctgtatcaagttcacgatcatcttacgatatcaagctgaaaatgtcaccactacctggacagttgcacatgttttactgggaatatttttttctgtttttctgtatgctctgtgctagtagggtggattcagtaataaatatgtgaaagcttttgtttcaaaaa

SEQ ID NO: 176608 - DNA, 2182 bp, Homo sapiens
  Payload ID: 14665
  Gene Symbol: RPL3L
  Gene Name: ribosomal protein L3-like
  Uniprot ID: Q92901
  ENST ID: ENST00000268661
  CDS Start-End: 96-1319
aatctgggaactggcagctgtgagtcctggccctgccactcgacctctggcggctagcggcgaggccccttcctgaccttcagggatcggccaccatgtcccaccggaagttttccgcccctcggcacggacacctgggcttcctgccccataagaggagccaccggcaccggggcaaggtgaagacgtggccgcgggatgaccccagccagcccgtgcacctcacggccttcctgggctacaaggcgggcatgacccacaccctgcgggaggtgcaccggccggggctcaaaatttccaaacgggaggaggtggaggcggtgacaattgtagaaacgccgcccctagtggtggtgggcgtggtgggctacgtggccacccctcgaggtctccggagcttcaagaccatctttgcagaacacctcagtgatgagtgccggcgccgattctacaaggactggcacaagagcaagaagaaagccttcaccaaggcctgcaagaggtggcgggacacagacgggaaaaagcagctacagaaggacttcgccgccatgaagaagtactgcaaggtcattcgggtcattgtccacactcagatgaaactgctgcccttccggcagaagaaggcccacatcatggagatccagctgaacggtggcacggtggccgagaaggtggcctgggcccaggcccggctggagaagcaggtgcccgtgcacagcgtgttcagccagagtgaggtcattgatgtcattgctgtcaccaagggtcgaggcgtcaaaggggtcacaagccgctggcataccaagaagctgccgcggaagacccataagggcctgcgcaaggtggcctgcattggcgcctggcaccccgcccgcgtgggctgctccattgctcgggccgggcagaagggctatcaccaccgcacggagctcaacaagaagatcttccgcatcggcaggggcccgcacatggaggacgggaagctggtgaagaacaatgcatccaccagctacgacgtgactgccaagtccatcacaccgctgggtggcttcccccactacggggaagtgaacaacgacttcgtcatgctgaagggttgtattgctggtaccaagaagcgggtcattacgctgagaaagtccctcctggtgcatcacagtcgccaagccgtggagaatattgagctcaagttcattgacaccacctccaagttcggccatggccgcttccagacagcccaagagaagagggccttcatgggcccccaaaagaagcatctggagaaggaaacgccggagacctcgggagacttgtaggctgtgtggggtggatgaaccctgaagcgcaccgcactgtctgccccaatgtctaacaaaggccggaggcgactcttcctgcgaggtctcagagcgctgtgtaaccgcccaaggggttcaccttgcctgctgcctagacaaagccgattcattaagacaggggaattgcaatagagaaagagtaattcacacagagctggctgtgcgggagaccggagttttatgttttattattactcaaatcgatctctttgagcatttgcggagcagaggttttttttttttttttttttgagagagtcttgatcttgtcgcccaggctgctggagtgccggggagcagagtttttaaggataacttggcgggtggggagagccagtgagccaggagagccgattggtcagggaggaaatcacagggagtcagctgtcttcttgcgctgagtcagctcctgggtggtggccacaagatcagatgagccagtttatcaatctggttggtgccagcagatccatcaagttgcagggtcggcaaaatatctcaagcactgatcttaggggcagcttagggagggtcagaatcttgtagcctccagatgcacgactcctaaaccataattcccaatattgtggctaatgttagtcctaaaaatgcaatctagtccccaggcaaggaggtggtctgctttgggaaagggctgttactgtctttgttttaaactataaactggctgggcgcggtggctcacgcctgtaatcccagcactttgggaggccaagatgggcggatcacctgaggtcgggagttcaagaccagcctggccaacatcgagaaacctcgtctctattaaaaatacaaaatta

SEQ ID NO: 176609 - DNA, 575 bp, Homo sapiens
  Payload ID: 14665
  Gene Symbol: RPL3L
  Gene Name: ribosomal protein L3-like
  ENST ID: ENST00000565426
  CDS Start-End: 447-575
gaagccagtgagattacgagcccactggcaggatgaacaactccagacgcgcggcgccttaagagctgtaacaccgcgaaggtctgtagcttcattcctgagctagcgagagcgcgaacctaccagaaggaagaaactccgaacacatcggaacatcagaacgagcaaactccggacaccccgcctttaggaactgcaacactcaccgcgagggtccgtggcttcattcttgaagtcagtgagaccaagaactcaccaattccggacacaacaggatctacggtcacagaaactcccaccggaagttttccgcccctcggcacggacacctgggcttcctgccccataagaggagccaccggcaccggggcaaggtgaagacgtggccgcgggatgaccccagccagcccgtgcacctcacggccttcctgggctacaaggcgggcatgacccacaccctgcgggaggtgcaccggccggggctcaaaatttccaaacgggaggaggtggaggcggtgacaattgtagaaacgccgcccctagtggtggtgggcgtggtgggctacgtggccacc

SEQ ID NO: 176610 - DNA, 2769 bp, Homo sapiens
  Payload ID: 14666
  Gene Symbol: RPL4
  Gene Name: ribosomal protein L4
  Uniprot ID: P36578
  ENST ID: ENST00000307961
  CDS Start-End: 94-1377
ggaaggtgacatatacagcgggagtggtaagcacttccttttcctgtggcagcagccgggctgagaggagcgtggctgtctcctctctccgccatggcgtgtgctcgcccactgatatcggtgtactccgaaaagggggagtcatctggcaaaaatgtcactttgcctgctgtattcaaggctcctattcgaccagatattgtgaactttgttcacaccaacttgcgcaaaaacaacagacagccctatgctgtcagtgaattagcaggtcatcagactagtgctgagtcttggggtactggcagagctgtggctcgaattcccagagttcgaggtggtgggactcaccgctctggccagggtgcttttggaaacatgtgtcgtggaggccgaatgtttgcaccaaccaaaacctggcgccgttggcatcgtagagtgaacacaacccaaaaacgatacgccatctgttctgccctggctgcctcagccctaccagcactggtcatgtctaaaggtcatcgtattgaggaagttcctgaacttcctttggtagttgaagataaagttgaaggctacaagaagaccaaggaagctgttttgctccttaagaaacttaaagcctggaatgatatcaaaaaggtctatgcctctcagcgaatgagagctggcaaaggcaaaatgagaaaccgtcgccgtatccagcgcaggggcccgtgcatcatctataatgaggataatggtatcatcaaggccttcagaaacatccctggaattactctgcttaatgtaagcaagctgaacattttgaagcttgctcctggtgggcatgtgggacgtttctgcatttggactgaaagtgctttccggaagttagatgaattgtacggcacttggcgtaaagccgcttccctcaagagtaactacaatcttcccatgcacaagatgattaatacagatcttagcagaatcttgaaaagcccagagatccaaagagcccttcgagcaccacgcaagaagatccatcgcagagtcctaaagaagaacccactgaaaaacttgagaatcatgttgaagctaaacccatatgcaaagaccatgcgccggaacaccattcttcgccaggccaggaatcacaagctccgggtggataaggcagctgctgcagcagcggcactacaagccaaatcagatgagaaggcggcggttgcaggcaagaagcctgtggtaggtaagaaaggaaagaaggctgctgttggtgttaagaagcagaagaagcctctggtgggaaaaaaggcagcagctaccaagaaaccagcccctgaaaagaagcctgcagagaagaaacctactacagaggagaagaagcctgctgcataaactcttaaatttgattattccataaaggtcaaatcattttggacagcttcttttgaataaagacctgattatacaggcagtgagaaacatgacttggtgtgctctgtaaagcttggttagaatttttttaaagtgacattttgttggccataatttagactgttacattttatatagtgtggtataaaatggggcatggatttatactaagtccatggagttcagtggaaggggaatgatttaaaaaaagttgtggttttctaaataatgtggcttgaaaaataggtgtaacaggacttggtcagaaacgcagaggctgttcaagtttagctccccaccagatggaaaataggttaaattctgtaaagatttaactttaaccacaagagggcacaactggagagcacaatttttttggtactgcagtaaaattgattacctcttgagaagtgttctttttaaccagctataacaatagagttgagtattttcacccatggtttgaaaaagtgccagaaggccacactggcccacatctgtaatcccaacactttgggaccctaaggtgggcagagcacttgagccaatgagttcaagaccagcctggtcaacatgatgaaatctcgtctctactgaaaatataaaaaatagccagtcatggtgcatgcctgtaaccccagctacttggaggctgaggcaagagaatcacttgaacctgggaggtggaggttgcaatgagccaagattgtaccattgccctccagcctgggcgtcagagcaagactctctgaaaagtaccagaagcatttttcaggactgcctgtgtgtcttggtgattatgttaaccaactgtgttcaaaagaagtacccatgaaatgcctccagatataagggtgtttttttttacccataaagctaaactgcaaatattaccctagaattaacctcttgtcctgtgtcaaaagtcttgttttgcatctggattgttaaactgtcagcttctctctgacagtctcgaactgtcaagacagtctcagttcacagccaaggtgatctgttaaccctccccatttccagggccaaatctcagttcttaagcacgtcgtttcttagcacggctttattttcatgctctttatttctctattttgtgcagccttacccctttaaagtccactgtgagtcctaccctgcagggcctcttaacacagtagagttcatgtgctactgatttggtgcctgccttcaaacacatgtgcaagttttgtggggttaaagatagccacttggtggcacaccacattggaagtgctgttcacccggtcatttgaaacggtgtttgaccacttggtgcgcaaatggcctatcggattaaaggatagccaaacccaa

SEQ ID NO: 176611 - DNA, 1864 bp, Homo sapiens
  Payload ID: 14666
  Gene Symbol: RPL4
  Gene Name: ribosomal protein L4
  ENST ID: ENST00000568588
  CDS Start-End: 779-1780
gcataccaggtagatcaagatgcacacaccagaagatgatagagtatgacaggatccgagctacaagcaaggagcttggagtcaacaaggctttaaacaggggaaggatgccaacacctagttttccgtatcccgggtggtgcctctacttatggcaagtgtgtccatcagcagaaagaataaatcgcctcttggaacacttgccaccttccatctcgtttgatgacgtacacgttttctcctgagacaagcaagctcccacacggtcaaccccacaccggagccgagaaccggcctctccccaactcctggaccccaggaaagctggcaaagcgctgatccccagagtggcaagaggcttagggcggggatccagacacccagggaaagaagtgctgtcccaggaccccagccaaaagaagagactagactcactgaaggagacgagaataaaagtcctctgctgcgcagttcagccgctcccacatcccgccccaatgcgtgtgctcgcccactgatatcggtgtactccgaaaagggggagtcatctggcaaaaatgtcactttgcctgctgtattcaaggctcctattcgaccagatattgtgaactttgttcacaccaacttgcgcaaaaacaacagacagccctatgctgtcagtgaattagcaggtcatcagactagtgctgagtcttggggtactggcagagctgtggctcgaattcccagagttcgaggtggtgggactcaccgctctggccagggtgcttttggaaacatgtgtcgtggaggccgaatgtttgcaccaaccaaaacctggcgccgttggcatcgtagagtgaacacaacccaaaaacgatacgccatctgttctgccctggctgcctcagccctaccagcactggtcatgtctaaaggtcatcgtattgaggaagttcctgaacttcctttggtagttgaagataaagttgaaggctacaagaagaccaaggaagctgttttgctccttaagaaacttaaagcctggaatgatatcaaaaaggtctatgcctctcagcgaatgagagctggcaaaggcaaaatgagaaaccgtcgccgtatccagcgcaggggcccgtgcatcatctataatgaggataatggtatcatcaaggccttcagaaacatccctggaattactctgcttaatgtaagcaagctgaacattttgaagcttgctcctggtgggcatgtgggacgtttctgcatttggactgaaagtgctttccggaagttagatgaattgtacggcacttggcgtaaagccgcttccctcaagagtaactacaatcttcccatgcacaagatgattaatacagatcttagcagaatcttgaaaagcccagagatccaaagagcccttcgagcaccacgcaagaagatccatcgcagagtcctaaagaagaacccactgaaaaacttgagaatcatgttgaagctaaacccatatgcaaagaccatgcgccggaacaccattcttcgccaggccaggaatcacaagctccgggtggataaggcagctgctgcagcagcggcactacaagccaaatcagatgagaaggcggcggttgcaggcaagaagcctgtggtaggtaagaaaggaaagaaggctgctgttggtgttaagaagcagaagaagcctctggtgggaaaaaaggcagcagctaccaagaaaccagcccctgaaaagaagcctgcagagaagaaacctactacagaggagaagaagcctgctgcataaactcttaaatttgattattccataaaggtcaaatcattttggacagcttcttttgaataaagacctgattatacaggcagtgag

SEQ ID NO: 176612 - DNA, 565 bp, Homo sapiens
  Payload ID: 14666
  Gene Symbol: RPL4
  Gene Name: ribosomal protein L4
  ENST ID: ENST00000569438
  CDS Start-End: 56-565
ttttcctgtggcagcagccgggctgagaggagcgtggctgtctcctctctccgccatggcgtgtgctcgcccactgatatcggtgtactccgaaaagggggagtcatctggcaaaaatgtcactttgcctgctgtattcaaggctcctattcgaccagatattgtgaactttgttcacaccaacttgcgcaaaaacaacagacagccctatgctgtcagtgaattagcaggtcatcagactagtgctgagtcttggggtactggcagagctgtggctcgaattcccagagttcgaggtggtgggactcaccgctctggccagggtgcttttggaaacatgtgtcgtggaggccgaatgtttgcaccaaccaaaacctggcgccgttggcatcgtagagtgaacacaacccaaaaacgatacgccatctgttctgccctggctgcctcagccctaccagcactggtcatgtctaaagttgaagataaagttgaaggctacaagaagaccaaggaagctgttttgctccttaagaaacttaaagcctggaatgatatcaaaaaggtc

SEQ ID NO: 176613 - DNA, 569 bp, Homo sapiens
  Payload ID: 14666
  Gene Symbol: RPL4
  Gene Name: ribosomal protein L4
  ENST ID: ENST00000569696
  CDS Start-End: 57-569
cttttcctgtggcagcagccgggctgagaggagcgtggctgtctcctctctccgccatggcgtgtgctcgcccactgatatcggtgtactccgaaaagggggagtcatctggcaaaaatgtcactttgcctgctgtattcaaggctcctattcgaccagatattgtgaactttgttcacaccaacttgcgcaaaaacaacagacagccctatgctgtcagtgaattagcaggtcatcagactagtgctgagtcttggggtactggcagagctgtggctcgaattcccagagttcgaggtggtgggactcaccgctctggccagggtgcttttggaaacatgtgtcgtggaggccgaatgtttgcaccaaccaaaacctggcgccgttggcatcgtagaaagaacccactgaaaaacttgagaatcatgttgaagctaaacccatatgcaaagaccatgcgccggaacaccattcttcgccaggccaggaatcacaagctccgggtggataaggcagctgctgcagcagcggcactacaagccaaatcagatgagaaggcggcggttgca

SEQ ID NO: 176614 - DNA, 469 bp, Homo sapiens
  Payload ID: 14667
  Gene Symbol: RPL41
  Gene Name: ribosomal protein L41
  Uniprot ID: P62945
  ENST ID: ENST00000501597
  CDS Start-End: 84-161
acccggcgctccattaaatagccgtagacggaacttcgcctttctctcggccttagcgccatttttttggaaacctctgcgccatgagagccaagtggaggaagaagcgaatgcgcaggctgaagcgcaaaagaagaaagatgaggcagaggtccaagtaaaccgctagcttgttgcaccgtggaggccacaggagcagaaacatggaatgccagacgctggggatgctggtacaagttgtgggactgcatgctactgtctagagcttgtctcaatggatctagaacttcatcgccctctgatcgccgatcacctctgagacccaccttgctcataaacaaaatgcccatgttggtcctctgccctggacctgtgacattctggactatttctgtgtttatttgtggccgagtgtaacaaccatataataaatcacctcttccgctgttttagctgaagaattaaatca

SEQ ID NO: 176615 - DNA, 699 bp, Homo sapiens
  Payload ID: 14667
  Gene Symbol: RPL41
  Gene Name: ribosomal protein L41
  Uniprot ID: P62945
  ENST ID: ENST00000546591
  CDS Start-End: 203-280
cgacacccggcgctccattaaatagccgtagacggaacttcgcctttctctcggccttagcgccatttttttgggtgagtgttttttggttcctgcgttgggattccgtgtacaatccatagacatctgacctcggcacttagcatcatcacagcaaactaactgtagcctttctctctttccctgtagaaacctctgcgccatgagagccaagtggaggaagaagcgaatgcgcaggctgaagcgcaaaagaagaaagatgaggcagaggtccaagtaaaccgctagcttgttgcaccgtggaggccacaggagcagaaacatggaatgccagacgctggggatgctggtacaagttgtgggactgcatgctactgtctagagcttgtctcaatggatctagaacttcatcgccctctgatcgccgatcacctctgagacccaccttgctcataaacaaaatgcccatgttggtcctctgccctggacctgtgacattctggactatttctgtgtttatttgtggccgagtgtaacaaccatataataaatcacctcttccgctgttttagctgaagaattaaatcatcttgtctattatgttttttatggttccatcgggtgggggttttctgtcattagagtttgccctgtcactacctgtgctatggagggtatcaaagctataaaggcaacagc

SEQ ID NO: 176616 - DNA, 681 bp, Homo sapiens
  Payload ID: 14668
  Gene Symbol: RPL5
  Gene Name: ribosomal protein L5
  ENST ID: ENST00000315741
  CDS Start-End: 291-681
cgcaggatggtgagtggatgcctcggtctcggggctttagatgcatggaggttcccttttcttgcccgtatgccagcctagggcccgtctcgcgcgtcgcaggggccggatggcgttagattgctagctctgacttggtcgaggggtttgttaaagttgttaagaataaggcctactttaagagataccaagtgaaatttagaagacgacgagagggtaaaactgattattatgctcggaaacgcttggtgatacaagataaaaataaatacaacacacccaaatacaggatgatagttcgtgtgacaaacagagatatcatttgtcagattgcttatgcccgtatagagggggatatgatagtctgcgcagcgtatgcacacgaactgccaaaatatggtgtgaaggttggcctgacaaattatgctgcagcatattgtactggcctgctgctggcccgcaggcttctcaataggtttggcatggacaagatctatgaaggccaagtggaggtgactggtgatgaatacaatgtggaaagcattgatggtcagccaggtgccttcacctgctatttggatgcaggccttgccagaactaccactggcaataaagtttttggtgccctgaagggagctgtggatggaggcttgtctatccctcacagtaccaaacgattcc

SEQ ID NO: 176617 - DNA, 1043 bp, Homo sapiens
  Payload ID: 14668
  Gene Symbol: RPL5
  Gene Name: ribosomal protein L5
  Uniprot ID: P46777
  ENST ID: ENST00000370321
  CDS Start-End: 91-984
cgcaagggctgtggcccttttcccaccccctagcgccgctgggcctgcaggtctctgtcgagcagcggacgccggtctctgttccgcaggatggggtttgttaaagttgttaagaataaggcctactttaagagataccaagtgaaatttagaagacgacgagagggtaaaactgattattatgctcggaaacgcttggtgatacaagataaaaataaatacaacacacccaaatacaggatgatagttcgtgtgacaaacagagatatcatttgtcagattgcttatgcccgtatagagggggatatgatagtctgcgcagcgtatgcacacgaactgccaaaatatggtgtgaaggttggcctgacaaattatgctgcagcatattgtactggcctgctgctggcccgcaggcttctcaataggtttggcatggacaagatctatgaaggccaagtggaggtgactggtgatgaatacaatgtggaaagcattgatggtcagccaggtgccttcacctgctatttggatgcaggccttgccagaactaccactggcaataaagtttttggtgccctgaagggagctgtggatggaggcttgtctatccctcacagtaccaaacgattccctggttatgattctgaaagcaaggaatttaatgcagaagtacatcggaagcacatcatgggccagaatgttgcagattacatgcgctacttaatggaagaagatgaagatgcttacaagaaacagttctctcaatacataaagaacagcgtaactccagacatgatggaggagatgtataagaaagctcatgctgctatacgagagaatccagtctatgaaaagaagcccaagaaagaagttaaaaagaagaggtggaaccgtcccaaaatgtcccttgctcagaagaaggatcgggtagctcaaaagaaggcaagcttcctcagagctcaggagcgggctgctgagagctaaacccagcaattttctatgattttttcagatatagataataaacttatgaacagcaacta

SEQ ID NO: 176618 - DNA, 694 bp, Homo sapiens
  Payload ID: 14668
  Gene Symbol: RPL5
  Gene Name: ribosomal protein L5
  ENST ID: ENST00000470843
  CDS Start-End: 52-243
tgggcctgcaggtctctgtcgagcagcggacgccggtctctgttccgcaggatggggtttgttaaagttgttaagaataaggcctactttaagagataccaagtgaaatttagaagacgacgagagggtaaaactgattattatgctcggaaacgcttggtgatacaagataaaaataaatacaacacacccaaatacaggatgatagttcgtgtgacaaacagagatatcatttgtcagtaggtctagaattggaacctgggaacttggtactttaaaaaatgctcttggttgcgctcatgcctgtaatcccagcacttcgggaagattgcttgagcccaggagtttgagaccagcctgggcaatatagtgagagtttgtcttcacaaaaaatattgcttatgcccgtatagagggggatatgatagtctgcgcagcgtatgcacacgaactgccaaaatatggtgtgaaggttggcctgacaaattatgctgcagcatattgtactggcctgctgctggcccgcaggcttctcaataggtttggcatggacaagatctatgaaggccaagtggaggtgactggtgatgaatacaatgtggaaagcattgatggtcagccaggtgccttcacctgctatttggatgcaggccttgccagaactaccactggcaataaagtttttggtgccctg

SEQ ID NO: 176619 - DNA, 947 bp, Homo sapiens
  Payload ID: 14669
  Gene Symbol: RPL6
  Gene Name: ribosomal protein L6
  Uniprot ID: Q02878
  ENST ID: ENST00000202773
  CDS Start-End: 56-922
atgattgcttatagaccggaagccgggaccttaattctctttcccatcttgcaagatggcgggtgaaaaagttgagaagccagatactaaagagaagaaacccgaagccaagaaggttgatgctggtggcaaggtgaaaaagggtaacctcaaagctaaaaagcccaagaaggggaagccccattgcagccgcaaccctgtccttgtcagaggaattggcaggtattcccgatctgccatgtattccagaaaggccatgtacaagaggaagtactcagccgctaaatccaaggttgaaaagaaaaagaaggagaaggttctcgcaactgttacaaaaccagttggtggtgacaagaacggcggtacccgggtggttaaacttcgcaaaatgcctagatattatcctactgaagatgtgcctcgaaagctgttgagccacggcaaaaaacccttcagtcagcacgtgagaaaactgcgagccagcattacccccgggaccattctgatcatcctcactggacgccacaggggcaagagggtggttttcctgaagcagctggctagtggcttattacttgtgactggacctctggtcctcaatcgagttcctctacgaagaacacaccagaaatttgtcattgccacttcaaccaaaatcgatatcagcaatgtaaaaatcccaaaacatcttactgatgcttacttcaagaagaagaagctgcggaagcccagacaccaggaaggtgagatcttcgacacagaaaaagagaaatatgagattacggagcagcgcaagattgatcagaaagctgtggactcacaaattttaccaaaaatcaaagctattcctcagctccagggctacctgcgatctgtgtttgctctgacgaatggaatttatcctcacaaattggtgttctaaatgtcttaagaacctaattaaatag

SEQ ID NO: 176620 - DNA, 1074 bp, Homo sapiens
  Payload ID: 14669
  Gene Symbol: RPL6
  Gene Name: ribosomal protein L6
  Uniprot ID: Q02878
  ENST ID: ENST00000424576
  CDS Start-End: 187-1053
atcttgcaaggtaagaatcgcgggcctgtctgcaagacttgagttcaggactcccaatccttcgccatccgaacctggagggcatccagtcgacacctacaggggtcggacatgtccaaggctaactgagaggccttccagacgcttcatttttgttgtttgggtttgcggcagggcacaaagaggatggcgggtgaaaaagttgagaagccagatactaaagagaagaaacccgaagccaagaaggttgatgctggtggcaaggtgaaaaagggtaacctcaaagctaaaaagcccaagaaggggaagccccattgcagccgcaaccctgtccttgtcagaggaattggcaggtattcccgatctgccatgtattccagaaaggccatgtacaagaggaagtactcagccgctaaatccaaggttgaaaagaaaaagaaggagaaggttctcgcaactgttacaaaaccagttggtggtgacaagaacggcggtacccgggtggttaaacttcgcaaaatgcctagatattatcctactgaagatgtgcctcgaaagctgttgagccacggcaaaaaacccttcagtcagcacgtgagaaaactgcgagccagcattacccccgggaccattctgatcatcctcactggacgccacaggggcaagagggtggttttcctgaagcagctggctagtggcttattacttgtgactggacctctggtcctcaatcgagttcctctacgaagaacacaccagaaatttgtcattgccacttcaaccaaaatcgatatcagcaatgtaaaaatcccaaaacatcttactgatgcttacttcaagaagaagaagctgcggaagcccagacaccaggaaggtgagatcttcgacacagaaaaagagaaatatgagattacggagcagcgcaagattgatcagaaagctgtggactcacaaattttaccaaaaatcaaagctattcctcagctccagggctacctgcgatctgtgtttgctctgacgaatggaatttatcctcacaaattggtgttctaaatgtcttaagaacctaattaa

SEQ ID NO: 176621 - DNA, 612 bp, Homo sapiens
  Payload ID: 14669
  Gene Symbol: RPL6
  Gene Name: ribosomal protein L6
  ENST ID: ENST00000548343
  CDS Start-End: 297-612
aaataatggttgtacggacttctgaccgctcagtatttggcaaaaaacctaataggtgtgaggtagtttcaaattctcaaaaaaaaagtttatagtgtattggggagacaaaccccaaatgagtcatagtgaaggttggagtagaatgggtagagtttgagaggaaggcctgtatcttaccgggggagggattgtagtctggggagcccagcccattcatgtacaggttcattattgtcttgttagagagatgactggtgaaatgcctttttttatctacaaaaaaatatttttagatggcgggtgaaaaagttgagaagccagatactaaagagaagaaacccgaagccaagaaggttgatgctggtggcaaggtgaaaaagggtaacctcaaagctaaaaagcccaagaaggggaagccccattgcagccgcaaccctgtccttgtcagaggaattggcaggtattcccgatctgccatgtattccagaaaggccatgtacaagaggaagtactcagccgctaaatccaaggttgaaaagaaaaagaaggagaaggttctcgcaactgttacaaaaccagttggtggtgacaagaacggcggtacccggg

SEQ ID NO: 176622 - DNA, 588 bp, Homo sapiens
  Payload ID: 14669
  Gene Symbol: RPL6
  Gene Name: ribosomal protein L6
  ENST ID: ENST00000549847
  CDS Start-End: 110-588
ttagaggaagcggggagacggcgcgtgcactgtgttcctggtcctgggttccagaggatgacactgagcctgtcgcagccacgttggggttccgcactgaagccaaaagatggcgggtgaaaaagttgagaagccagatactaaagagaagaaacccgaagccaagaaggttgatgctggtggcaaggtgaaaaagggtaacctcaaagctaaaaagcccaagaaggggaagccccattgcagccgcaaccctgtccttgtcagaggaattggcaggtattcccgatctgccatgtattccagaaaggccatgtacaagaggaagtactcagccgctaaatccaaggttgaaaagaaaaagaaggagaaggttctcgcaactgttacaaaaccagttggtggtgacaagaacggcggtacccgggtggttaaacttcgcaaaatgcctagatattatcctactgaagatgtgcctcgaaagctgttgagccacggcaaaaaacccttcagtcagcacgtgagaaaactgcgagccagcattacccccgggaccattctgatcatcctcactggacgccacaggggcaa

SEQ ID NO: 176623 - DNA, 700 bp, Homo sapiens
  Payload ID: 14669
  Gene Symbol: RPL6
  Gene Name: ribosomal protein L6
  ENST ID: ENST00000551291
  CDS Start-End: 340-700
gtcagcggaggaccgagcgacggccgggaatggcagcgcgggggctccgcggaggcgccacgcacagtgtccaaagcatccttgcttcctcctggaaaccgcggccgccagtgaatcagaaccagaaaaaggctaaatgattcccagagacacagccatgaagcaggtggtttcgatctgaaaaaatcaaggtgaaaagctctagcaaccagaaagaaacgaatggaggaaaatggaaaacgcaagctagaagacagagtctcattctgtaggccaggccggaggacgggaatgagaaaggccatgtacaagaggaagtagtcagccgctaaatccaagatggcgggtgaaaaagttgagaagccagatactaaagagaagaaacccgaagccaagaaggttgatgctggtggcaaggtgaaaaagggtaacctcaaagctaaaaagcccaagaaggggaagccccattgcagccgcaaccctgtccttgtcagaggaattggcaggtattcccgatctgccatgtattccagaaaggccatgtacaagaggaagtactcagccgctaaatccaaggttgaaaagaaaaagaaggagaaggttctcgcaactgttacaaaaccagttggtggtgacaagaacggcggtacccgggtggttaaacttcgcaaaatgcctagatattatcctactgaagatg

SEQ ID NO: 176624 - DNA, 338 bp, Homo sapiens
  Payload ID: 14669
  Gene Symbol: RPL6
  Gene Name: ribosomal protein L6
  ENST ID: ENST00000550238
  CDS Start-End: 148-338
ggaatgagaaaggccatgtacaagaggaagtagtcagccgctaaatccaaggttgaaaagaaaaagaaggagaaggttctcgcaactgttacaaaaccagttggtggtgacaagaacggcggtacccgggtggttaaacttcgcaaaatgcctagatattatcctactgaagatgtgcctcgaaagctgttgagccacggcaaaaaacccttcagtcagcacgtgagaaaactgcgagccagcattacccccgggaccattctgatcatcctcactggacgccacaggggcaagagggtggttttcctgaagcagctggctagtggcttattacttgt

SEQ ID NO: 176625 - DNA, 438 bp, Homo sapiens
  Payload ID: 14669
  Gene Symbol: RPL6
  Gene Name: ribosomal protein L6
  ENST ID: ENST00000553213
  CDS Start-End: 83-438
ggcctgtctgcaagacttgagttcaggactcccaatccttcgccatccgaacctggagggcatccagtcgacacctacagggatggcgggtgaaaaagttgagaagccagatactaaagagaagaaacccgaagccaagaaggttgatgctggtggcaaggtgaaaaagggtaacctcaaagctaaaaagcccaagaaggggaagccccattgcagccgcaaccctgtccttgtcagaggaattggcaggtattcccgatctgccatgtattccagaaaggccatgtacaagaggaagtactcagccgctaaatccaaggttgaaaagaaaaagaaggagaaggttctcgcaactgttacaaaaccagttggtggtgacaagaacggcggtacccgggtggttaaacttcgcaaaatgcctagatattatcctactga

SEQ ID NO: 176626 - DNA, 1014 bp, Homo sapiens
  Payload ID: 14669
  Gene Symbol: RPL6
  Gene Name: ribosomal protein L6
  ENST ID: ENST00000550566
  CDS Start-End: 535-1014
ggcctgtctgcaagacttgagttcaggactcccaatccttcgccatccgaacctggagggcatccagtcgacacctacaggggtcggacatgtccaaggctaactgagaggccttccagacgcttcatttttgttgtttgggtttgcggcagggcacaaagagggtgaggtagaatgccgtagtggctccctccggttcttcgccactctcttgggctgggggaacgaggccctttcggggacccgtagcagactggtgggtgttagaggaagcggggagacggcgcgtgcactgtgttcctggtcctgggttccagaggatgacactgagcctgtcgcagccacgttggggttccgcactgaagccaaaaggtttcgcgtctcccagcgtccccgaccggaagtcgcctcttggtctttgcgatctttttctctggctcaatttgggctgattccgtttgtgtccgcaattcctaaatcgagtttcttgaaaagagacactggtcttaagggttaagacgaaaggtactgaaaatggcgggtgaaaaagttgagaagccagatactaaagagaagaaacccgaagccaagaaggttgatgctggtggcaaggtgaaaaagggtaacctcaaagctaaaaagcccaagaaggggaagccccattgcagccgcaaccctgtccttgtcagaggaattggcaggtattcccgatctgccatgtattccagaaaggccatgtacaagaggaagtactcagccgctaaatccaaggttgaaaagaaaaagaaggagaaggttctcgcaactgttacaaaaccagttggtggtgacaagaacggcggtacccgggtggttaaacttcgcaaaatgcctagatattatcctactgaagatgtgcctcgaaagctgttgagccacggcaaaaaacccttcagtcagcacgtgagaaaactgcgagccagcattacccccgggaccattctgatcatcctcactggacgccacaggggcaag

SEQ ID NO: 176627 - DNA, 1101 bp, Homo sapiens
  Payload ID: 14670
  Gene Symbol: RPL7
  Gene Name: ribosomal protein L7
  Uniprot ID: P18124
  ENST ID: ENST00000352983
  CDS Start-End: 287-1033
gcagcctggggattaggacccggagttgccaaggtgtcagcactctttgctcttgaattgattaaaaagtctaatcaaatgcatatattttcttcaaacaagttttacccgaaagtttgttgaaagaggctaaatcagggagttctttgcgtctgcaaggcggctttttagttctggattcttttccggcttattctaagacacctatgagtcgtggggcttctctcgcgaagtctttaagtggacagtacgcatgcgccaacttcctctttttccggctggaaccatggagggtgtagaagagaagaagaaggaggttcctgctgtgccagaaacccttaagaaaaagcgaaggaatttcgcagagctgaagatcaagcgcctgagaaagaagtttgcccaaaagatgcttcgaaaggcaaggaggaagcttatctatgaaaaagcaaagcactatcacaaggaatataggcagatgtacagaactgaaattcgaatggcgaggatggcaagaaaagctggcaacttctatgtacctgcagaacccaaattggcgtttgtcatcagaatcagaggtatcaatggagtgagcccaaaggttcgaaaggtgttgcagcttcttcgccttcgtcaaatcttcaatggaacctttgtgaagctcaacaaggcttcgattaacatgctgaggattgtagagccatatattgcatgggggtaccccaatctgaagtcagtaaatgaactaatctacaagcgtggttatggcaaaatcaataagaagcgaattgctttgacagataacgctttgattgctcgatctcttggtaaatacggcatcatctgcatggaggatttgattcatgagatctatactgttggaaaacgcttcaaagaggcaaataacttcctgtggcccttcaaattgtcttctccacgaggtggaatgaagaaaaagaccacccattttgtagaaggtggagatgctggcaacagggaggaccagatcaacaggcttattagaagaatgaactaaggtgtctaccatgattatttttctaagctggttggttaataaacagtacctgctctcaaattgaaata

SEQ ID NO: 176628 - DNA, 1308 bp, Homo sapiens
  Payload ID: 14670
  Gene Symbol: RPL7
  Gene Name: ribosomal protein L7
  ENST ID: ENST00000396465
  CDS Start-End: 680-1306
ccctctcacacggccgtggccgcaacctcagccctcctcgcacctcccttcgcagctcacgccccctcccgtggggtgtcctggcctccgcctgccgagctcggcagtcagcagagccccggccatcctcctccggccgtccggtccccactggtccctggctagccacttttcgtaagctagagcactccagaccgccccgcctgcgatcaggcgctgcggaagacagccctgtgggctggagcgacgacaaggacctcgcggagcggcgaaaggggtgtagtctgcgactaccgcggcagggagccgggagggcggccaaaagtgacttcgaattgcagctagccgtttggaacgtggcccaagaggctctcattttcctggctggaaccgtcgccgcggtgcttgcctgcggtcctggtcagccgttgccctcccgccgggcgggcgaagactggtgcatgctgggatttgtagttcgtccccatgaggctcgtcctgggaacattatggggaggaacggagcctaatcctgtcagcgcagcctggggattaggacccggagttgccaagagagaagaagaaggaggttcctgctgtgccagaaacccttaagaaaaagcgaaggaatttcgcagagctgaagatcaagcgcctgagaaagaagtttgcccaaaagatgcttcgaaaggcaaggaggaagcttatctatgaaaaagcaaagcactatcacaaggaatataggcagatgtacagaactgaaattcgaatggcgaggatggcaagaaaagctggcaacttctatgtacctgcagaacccaaattggcgtttgtcatcagaatcagaggtatcaatggagtgagcccaaaggttcgaaaggtgttgcagcttcttcgccttcgtcaaatcttcaatggaacctttgtgaagctcaacaaggcttcgattaacatgctgaggattgtagagccatatattgcatgggggtaccccaatctgaagtcagtaaatgaactaatctacaagcgtggttatggcaaaatcaataagaagcgaattgctttgacagataacgctttgattgctcgatctcttggtaaatacggcatcatctgcatggaggatttgattcatgagatctatactgttggaaaacgcttcaaagaggcaaataacttcctgtggcccttcaaattgtcttctccacgaggtggaatgaagaaaaagaccacccattttgtagaaggtggagatgctggcaacagggaggaccagatcaacaggcttattagaagaatgaactaagg

SEQ ID NO: 176629 - DNA, 762 bp, Homo sapiens
  Payload ID: 14670
  Gene Symbol: RPL7
  Gene Name: ribosomal protein L7
  ENST ID: ENST00000396466
  CDS Start-End: 132-758
gcgaggacagggcaccttctccctgagagaagaagaaggaggttcctgctgtgccagaaacccttaagaaaaagcgaaggaatttcgcagagctgaagatcaagcgcctgagaaagaagtttgcccaaaagatgcttcgaaaggcaaggaggaagcttatctatgaaaaagcaaagcactatcacaaggaatataggcagatgtacagaactgaaattcgaatggcgaggatggcaagaaaagctggcaacttctatgtacctgcagaacccaaattggcgtttgtcatcagaatcagaggtatcaatggagtgagcccaaaggttcgaaaggtgttgcagcttcttcgccttcgtcaaatcttcaatggaacctttgtgaagctcaacaaggcttcgattaacatgctgaggattgtagagccatatattgcatgggggtaccccaatctgaagtcagtaaatgaactaatctacaagcgtggttatggcaaaatcaataagaagcgaattgctttgacagataacgctttgattgctcgatctcttggtaaatacggcatcatctgcatggaggatttgattcatgagatctatactgttggaaaacgcttcaaagaggcaaataacttcctgtggcccttcaaattgtcttctccacgaggtggaatgaagaaaaagaccacccattttgtagaaggtggagatgctggcaacagggaggaccagatcaacaggcttattagaagaatgaactaaggtg

SEQ ID NO: 176630 - DNA, 1526 bp, Homo sapiens
  Payload ID: 14670
  Gene Symbol: RPL7
  Gene Name: ribosomal protein L7
  ENST ID: ENST00000396467
  CDS Start-End: 140-766
cctctttttccggctggaaccatggagggtgtagaagaagaagaaggaggttcctgctgtgccagaaacccttaagaaaaagcgaaggaatttcgcagagctgaagatcaagcgcctgagaaagaagtttgcccaaaagatgcttcgaaaggcaaggaggaagcttatctatgaaaaagcaaagcactatcacaaggaatataggcagatgtacagaactgaaattcgaatggcgaggatggcaagaaaagctggcaacttctatgtacctgcagaacccaaattggcgtttgtcatcagaatcagaggtatcaatggagtgagcccaaaggttcgaaaggtgttgcagcttcttcgccttcgtcaaatcttcaatggaacctttgtgaagctcaacaaggcttcgattaacatgctgaggattgtagagccatatattgcatgggggtaccccaatctgaagtcagtaaatgaactaatctacaagcgtggttatggcaaaatcaataagaagcgaattgctttgacagataacgctttgattgctcgatctcttggtaaatacggcatcatctgcatggaggatttgattcatgagatctatactgttggaaaacgcttcaaagaggcaaataacttcctgtggcccttcaaattgtcttctccacgaggtggaatgaagaaaaagaccacccattttgtagaaggtggagatgctggcaacagggaggaccagatcaacaggcttattagaagaatgaactaaggtgagagacctcatcctgagaaaggttgagttaatgttagagtataagtggtggtaatcttgaatacttttcccattaaatattgatgggggtttgaattttaatcagtgcttttgtggggagtgggggtcaactatcttaatgattacagttggtttgtttactgcttttgaggacctttctggaggaaaggaaaagcctgttttggggagtctttaaagatggaaattgggtggtcttaaaaatgtaaactcaatcattactttataactgcctagtttatgttaattgttagctgcctaaagtgttttctaatggttttcttttttcctttcaggtgtctaccatgattatttttctaagctggttggttaataaacagtacctgctctcaaattgaaatatattgttgtatttgtgatttgttgttgttgttgttagcctgcctctgtcttcccttaactactgtggcaagtgtggtgtgtgataaaattaagccaaatcaacagcccatttcgtgcaaaatcagggtcgagtctgtgtgaaagacatctcttgggtttttaaaaggcttttctatacaaaagattttaattttttgttttttaactgtgctgagtgattcgaaatgggtttattctaagaaagcctgtttcacaagcatttgtacatgatttgtcggtaaggtaatccaactttggtttatggaaaaaattgaatttagttgctaaaatttatttctcgggccttcgcttgttt

SEQ ID NO: 176631 - DNA, 563 bp, Homo sapiens
  Payload ID: 14670
  Gene Symbol: RPL7
  Gene Name: ribosomal protein L7
  ENST ID: ENST00000431653
  CDS Start-End: 299-563
agtcctcggtagagggtctttcgggggaggcgcagaacctctgaattgtgttcgtccttggctggtgcttggtacaggcctccctgccgccaggcctttgctttcaacatgtggatcctgattgaaccagagtggtggtggcttgttttttttttatttttattttttaatttttgcgcttaaagtctcgggagagaagaagaaggaggttcctgctgtgccagaaacccttaagaaaaagcgaaggaatttcgcagagctgaagatcaagcgcctgagaaagaagtttgcccaaaagatgcttcgaaaggcaaggaggaagcttatctatgaaaaagcaaagcactatcacaaggaatataggcagatgtacagaactgaaattcgaatggcgaggatggcaagaaaagctggcaacttctatgtacctgcagaacccaaattggcgtttgtcatcagaatcagaggtatcaatggagtgagcccaaaggttcgaaaggtgttgcagcttcttcgccttcgtcaaatcttcaatggaacctttgtgaagctcaacaaggctt

SEQ ID NO: 176632 - DNA, 445 bp, Homo sapiens
  Payload ID: 14670
  Gene Symbol: RPL7
  Gene Name: ribosomal protein L7
  ENST ID: ENST00000435330
  CDS Start-End: 148-445
agtaaagttactagtgactaaagtcagtgacagcatttctgagagaagaagaaggaggttcctgctgtgccagaaacccttaagaaaaagcgaaggaatttcgcagagctgaagatcaagcgcctgagaaagaagtttgcccaaaagatgcttcgaaaggcaaggaggaagcttatctatgaaaaagcaaagcactatcacaaggaatataggcagatgtacagaactgaaattcgaatggcgaggatggcaagaaaagctggcaacttctatgtacctgcagaacccaaattggcgtttgtcatcagaatcagaggtatcaatggagtgagcccaaaggttcgaaaggtgttgcagcttcttcgccttcgtcaaatcttcaatggaacctttgtgaagctcaacaaggcttcgattaacatgctgaggattgtagagccatata

SEQ ID NO: 176633 - DNA, 680 bp, Homo sapiens; identical to SEQ ID NO: 102964
  Payload ID: 14671
  Gene Symbol: RPL7A
  Gene Name: ribosomal protein L7a
  ENST ID: ENST00000315731
  CDS Start-End: 165-620

SEQ ID NO: 176634 - DNA, 891 bp, Homo sapiens; identical to SEQ ID NO: 102965
  Payload ID: 14671
  Gene Symbol: RPL7A
  Gene Name: ribosomal protein L7a
  Uniprot ID: P62424
  ENST ID: ENST00000323345
  CDS Start-End: 31-831

SEQ ID NO: 176635 - DNA, 1057 bp, Homo sapiens; identical to SEQ ID NO: 102963
  Payload ID: 14671
  Gene Symbol: RPL7A
  Gene Name: ribosomal protein L7a
  ENST ID: ENST00000426651
  CDS Start-End: 483-1057

SEQ ID NO: 176636 - DNA, 3769 bp, Homo sapiens
  Payload ID: 14672
  Gene Symbol: RPL7L1
  Gene Name: ribosomal protein L7-like 1
  Uniprot ID: Q6DKI1
  ENST ID: ENST00000304734
  CDS Start-End: 257-997
gtgatgaaactgtaacttacaagaaaagggctgggttttgaaaataacacaggctctaaaaaccctaagaagcggtgcaacttttggcaggaatcggggttagcgggacctcaagggctcactgcggctaagtgaacgctgactggtcctccagcgtgagctagaacagacgtctctatggtcaagtaaacagagcgtgtgctgtcttccccatgtggtggggttgcgcatgatcagtagctgcaccactagaaagatggcggagcaagagcaaagaaaaatccctttggttccagaaaatctcctgaaaaagaggaaggcttatcaagccctcaaagccacccaggcaaagcaggcacttttggcaaagaaggagcagaagaaaggaaaagggctcaggtttaagcgactggaatcattcctacatgattcctggcggcagaaacgtgacaaggtgcgtctcagacgactagaagtgaaacctcatgccttggaattgccagataaacattccttggcctttgttgtacgcatcgaaaggattgacggcgtgagtttactggtgcagagaaccattgcaagacttcgcctaaagaaaatttttagtggtgtctttgtaaaagtcaccccccagaatctaaaaatgctgcgtatagtggaaccttatgtgacctggggatttccaaatctgaagtctgtccgagaactcattttgaaacgtggacaagccaaggtcaagaataagaccatccctctgacagacaatacagtgattgaggagcacctggggaagtttggcgtcatttgcttggaagacctcattcatgaaattgccttcccagggaagcatttccaggagatctcatggttcttgtgccctttccacctctcagtggcccgtcatgctaccaaaaatagagtgggcttcctcaaggagatgggcacacctggctatcggggtgaacgcatcaatcagctcatccgtcagctgaactagacccaggtgccaaactgcggtaaattttttatcagtgaagtggaagcatgtgttttgttttggaaatttttatcaagtatcttcagagaagattatttcctgctttatcttcagaaactggaaagggtcaaagaaaagacagtagctggccggtcgtggtggctcatgcctgtaatcccaacacttagggaggctgaggtgggcagatcacctgaggttgggagttcgagaccagcctgaccaacatggagaaatgccatctctactaaaaatacaaaaattagccgggcatggtggcacgtgcctgtaatcccagctactcaggaggctgaggcaggagaatcgcttgaacctgggaggtggaagttgcagtgagctgagatcacgccattgcactccagcctgggcaacaagcgaaactctgtctcaaaaaaaaagaaaagacagtagcatatgttcatgtcaagcacctctcatcacagtcgagttccaaggaaaaattccagtgttttctgcattgggtgctgtgtcatctgaaatcggcacattccatggaggaaggagtcctgctttgttgcatgtatcctagggtttaatgttggtaaatgagtcactctagcatttgtagaaggctccctgagactcctgcagcagtcgaccaagcccaaggacataattgaatctggagagtcctggggccttgttttgaaaaagacttgaaatacacataggaagaaaggcataaaaataaatgttcacttgtctctgctgtgagtatgtgttccaacttttcagtgatggctttgagaattctcaaacttgactggctctaagtgtatctggtggcttttgtatcgtaacctgaaactggcttagtactttttcctaaaagctcaggatttgagaatgaggaccccttcgccaggaaaacatgtatacactcaaaattttgcttgcagttctagggtgtttagacccttctcagatacctgtgcatcttatgggttttgtttttctctttgagacagtctcaccctgttgcccaggctggagcgcagtggcatgatctcagctcattgcagcctccacctcctgggttcaagtgattctgcctcagccccttgatcagctgggattacatgcatgtaccaccacacccagctaattcttgtatttttagtagagatggagacagagtttcaccatgtaggccaggctagtctcaaactcctgacctcaagtgatccacaagcctgggcctcccaaagtgctgggattacaggcatgagcaactgcgcccagctcttgtgtaccttatgtgaggaagtcctgctcaatcaggatcggtcacgcaggccctgatcttgctactctggttccatgtcctatggaagaccaaagtttaccaagatagatttttcccttcatagtggcagatagtgttaacccctgcaccatctgtaactcagaaatccccaccatttcttcccctgggcttcagaatagaattgcctggtttctctgatgatcagcatggttccttaaaacccaaatcagcaaggaatgaacaattttgtttggcatggatgaaattagcactgtttggctcgttaggccccaggcaggcaggcaccttaattttttccttgcatattctagtcttcagaagcattgccttttgtcctactggtagtgacatagaccaataacagggcatctggggattttaatcctgaaaacagtgagtctgatactgcttgtgtttttcatcagtgtccaccccaagtgggtcttcctgctattctcttcacttagttgcccctcacttgccatctgagcaattggcaaggatgtgccaggcctaggttaaacttggaaacatgcttgaccattctattccctggtcctttaagatcagtttggctgcaattttggctccttggaccctcaagcatagctggtaaatcaagttagagatgtaactgccttaaaacatgccagcttaggctgggcacggtggctcacacctgtaatctcaacacttcaggaggctgaggcaggcagatcacttgaggtcaggagttcgagaccagcctgaccaacatggagaaattctgtccctactgaaaatacaaaattagccggatgtggtggtgcatgcctgtaatcccagctacttgggaggctgaggcaagagaattgcttgaacccagggaggcagaggttgcagtgagccgagatcacaccattgcactccaccttgggcaacaaaagcaaaactctgtctcaaaaaaaaaaaaaaaaaaagtgccagcgtatgaggtaattagattggttctctccagaggtaacctgccaagaagagatgctatagatgttactcctatactgtaaaacattgtgaaatcagattactttaaaatgatgtattacaaagttatgcaaaaaagcagttgtgactatggaagcccaaggcttatatcccagctctgtcttacactaaatatgggtacagtgtttccactctgtccataaaatgggagctaatattctccaacctgtgtgcctgacatgatggttaaagggattaaacaaaacaatagtttgtaatttattctgtcagagcaaactgctggtaaataaaagggactaagttgacgaaaaataaattttaaaaaacctaataaaacaagtttgtaatttataattgtatacaaataaaagatgttacaaaaattgcgcacttatatgtatgtaccatgacataactaa

SEQ ID NO: 176637 - DNA, 4476 bp, Homo sapiens
  Payload ID: 14672
  Gene Symbol: RPL7L1
  Gene Name: ribosomal protein L7-like 1
  Uniprot ID: Q6DKI1
  ENST ID: ENST00000493763
  CDS Start-End: 304-1044
ataggtgcattgtgggaagcactttgctgtccacagccaggccgcttgtgatgaaactgtaacttacaagaaaagggctgggttttgaaaataacacaggctctaaaaaccctaagaagcggtgcaacttttggcaggaatcggggttagcgggacctcaagggctcactgcggctaagtgaacgctgactggtcctccagcgtgagctagaacagacgtctctatggtcaagtaaacagagcgtgtgctgtcttccccatgtggtggggttgcgcatgatcagtagctgcaccactagaaagatggcggagcaagagcaaagaaaaatccctttggttccagaaaatctcctgaaaaagaggaaggcttatcaagccctcaaagccacccaggcaaagcaggcacttttggcaaagaaggagcagaagaaaggaaaagggctcaggtttaagcgactggaatcattcctacatgattcctggcggcagaaacgtgacaaggtgcgtctcagacgactagaagtgaaacctcatgccttggaattgccagataaacattccttggcctttgttgtacgcatcgaaaggattgacggcgtgagtttactggtgcagagaaccattgcaagacttcgcctaaagaaaatttttagtggtgtctttgtaaaagtcaccccccagaatctaaaaatgctgcgtatagtggaaccttatgtgacctggggatttccaaatctgaagtctgtccgagaactcattttgaaacgtggacaagccaaggtcaagaataagaccatccctctgacagacaatacagtgattgaggagcacctggggaagtttggcgtcatttgcttggaagacctcattcatgaaattgccttcccagggaagcatttccaggagatctcatggttcttgtgccctttccacctctcagtggcccgtcatgctaccaaaaatagagtgggcttcctcaaggagatgggcacacctggctatcggggtgaacgcatcaatcagctcatccgtcagctgaactagacccaggtgaggcagggctgaaaactgcccttgggctgacttttgataggccatgccttgccactttacaagttctttttgcatttactagtatttaagagtaaccttgagattgggaggaatagaggaggctggtacaaatagatggagacctgctgggatcagtgaatgcctgattaggacatggggctatgcatagcctaagagttataggcttaaagatgtcgagtaactaaaaactgtattgctggccgggcgcggtggctcacgcctgtaatcccagcactttgggaggccaaggcgggcagaccatgaggtcaggagattgagaccatcctggccaacatggtgaaaccctgtctctactaaaaatacaaaaatgagctgggtgtggtggcgcgtgcctgtagtcccagctactcgagaggctaaggcaggaaaatcgcttgaacccaggaggcagagattgcagtgagccaagattgcaccagtgcactccagctgggcgacagagcgagactccatctcggaaaaaaaaaaaaaaaaactattgctgcagtcattcagatggaaatgaggaaagaataatattaataactgatttcaaaaaggacttgaagatgtgaatcatctattttgctgaagaaatcttaactctttgaaattactttttattgctgttgtcatactcttaggtgccaaactgcggtaaattttttatcagtgaagtggaagcatgtgttttgttttggaaatttttatcaagtatcttcagagaagattatttcctgctttatcttcagaaactggaaagggtcaaagaaaagacagtagctggccggtcgtggtggctcatgcctgtaatcccaacacttagggaggctgaggtgggcagatcacctgaggttgggagttcgagaccagcctgaccaacatggagaaatgccatctctactaaaaatacaaaaattagccgggcatggtggcacgtgcctgtaatcccagctactcaggaggctgaggcaggagaatcgcttgaacctgggaggtggaagttgcagtgagctgagatcacgccattgcactccagcctgggcaacaagcgaaactctgtctcaaaaaaaaagaaaagacagtagcatatgttcatgtcaagcacctctcatcacagtcgagttccaaggaaaaattccagtgttttctgcattgggtgctgtgtcatctgaaatcggcacattccatggaggaaggagtcctgctttgttgcatgtatcctagggtttaatgttggtaaatgagtcactctagcatttgtagaaggctccctgagactcctgcagcagtcgaccaagcccaaggacataattgaatctggagagtcctggggccttgttttgaaaaagacttgaaatacacataggaagaaaggcataaaaataaatgttcacttgtctctgctgtgagtatgtgttccaacttttcagtgatggctttgagaattctcaaacttgactggctctaagtgtatctggtggcttttgtatcgtaacctgaaactggcttagtactttttcctaaaagctcaggatttgagaatgaggaccccttcgccaggaaaacatgtatacactcaaaattttgcttgcagttctagggtgtttagacccttctcagatacctgtgcatcttatgggttttgtttttctctttgagacagtctcaccctgttgcccaggctggagcgcagtggcatgatctcagctcattgcagcctccacctcctgggttcaagtgattctgcctcagccccttgatcagctgggattacatgcatgtaccaccacacccagctaattcttgtatttttagtagagatggagacagagtttcaccatgtaggccaggctagtctcaaactcctgacctcaagtgatccacaagcctgggcctcccaaagtgctgggattacaggcatgagcaactgcgcccagctcttgtgtaccttatgtgaggaagtcctgctcaatcaggatcggtcacgcaggccctgatcttgctactctggttccatgtcctatggaagaccaaagtttaccaagatagatttttcccttcatagtggcagatagtgttaacccctgcaccatctgtaactcagaaatccccaccatttcttcccctgggcttcagaatagaattgcctggtttctctgatgatcagcatggttccttaaaacccaaatcagcaaggaatgaacaattttgtttggcatggatgaaattagcactgtttggctcgttaggccccaggcaggcaggcaccttaattttttccttgcatattctagtcttcagaagcattgccttttgtcctactggtagtgacatagaccaataacagggcatctggggattttaatcctgaaaacagtgagtctgatactgcttgtgtttttcatcagtgtccaccccaagtgggtcttcctgctattctcttcacttagttgcccctcacttgccatctgagcaattggcaaggatgtgccaggcctaggttaaacttggaaacatgcttgaccattctattccctggtcctttaagatcagtttggctgcaattttggctccttggaccctcaagcatagctggtaaatcaagttagagatgtaactgccttaaaacatgccagcttaggctgggcacggtggctcacacctgtaatctcaacacttcaggaggctgaggcaggcagatcacttgaggtcaggagttcgagaccagcctgaccaacatggagaaattctgtccctactgaaaatacaaaattagccggatgtggtggtgcatgcctgtaatcccagctacttgggaggctgaggcaagagaattgcttgaacccagggaggcagaggttgcagtgagccgagatcacaccattgcactccaccttgggcaacaaaagcaaaactctgtctcaaaaaaaaaaaaaaaaaaagtgccagcgtatgaggtaattagattggttctctccagaggtaacctgccaagaagagatgctatagatgttactcctatactgtaaaacattgtgaaatcagattactttaaaatgatgtattacaaagttatgcaaaaaagcagttgtgactatggaagcccaaggcttatatcccagctctgtcttacactaaatatgggtacagtgtttccactctgtccataaaatgggagctaatattctccaacctgtgtgcctgacatgatggttaaagggattaaacaaaacaatagtttgtaatttattctgtcagagcaaactgctggtaaataaaagggactaagttgacgaaaaataaattttaaaaaacctaataaaacaagtttgtaatttataattgtatacaaataaaagatgttacaaaaattgcgca

SEQ ID NO: 176638 - DNA, 703 bp, Homo sapiens
  Payload ID: 14672
  Gene Symbol: RPL7L1
  Gene Name: ribosomal protein L7-like 1
  ENST ID: ENST00000602561
  CDS Start-End: 6-596
gaaagatggcggagcaagagcaaagaaaaatccctttggttccagaaaatctcctgaaaaagaggaaggcttatcaagccctcaaagccacccaggcaaagcaggcacttttggcaaagaaggagcagaagaaaggaaaagggctcaggtttaagcgactggaatcattcctacatgattcctggcggcagaaacgtgacaaggtgcgtctcagacgactagaagtgaaacctcatgccttggaattgccagataaacattccttggcctttgttgtacgcatcgaaaggattgacggcgtgagtttactggtgcagagaaccattgcaagacttcgcctaaagaaaatttttagtggtgtctttgtaaaagtcaccccccagaatctaaaaatgctgcgtatagtggaaccttatgtgacctggggatttccaaatctgaagtctgtccgagaactcattttgaaacgtggacaagccaaggtcaagaataagaccatccctctgacagacaatacagtgattgaggagcacctgggtgagtgctacagcttagggatcagctggggcagaaagccagggtctttgaagctttgatgtgagattcaggttgtattcttcttggggccccaagagtctgccagagtggccagcttagtatatgctggatacatgttaaataaaggaatctgtgcttttgtgtt

SEQ ID NO: 176639 - DNA, 1041 bp, Homo sapiens
  Payload ID: 14673
  Gene Symbol: RPL8
  Gene Name: ribosomal protein L8
  Uniprot ID: P62917
  ENST ID: ENST00000262584
  CDS Start-End: 234-1007
accaggacaccttcagccgcgtctcctggtgcgcctgcgcgggggccctggaggaggagaagtaggcggggccggcggccgctggtgactacaagccccggcgtgcaccgcgctaggctggccgtggcgcgcccggaaggtgtcgcggccctgggccccgccccggaagataaggccgctcgctgacgccgtgtttcctctttcggccgcgctggtgaacaggacccgtcgccatgggccgtgtgatccgtggacagaggaagggcgccgggtctgtgttccgcgcgcacgtgaagcaccgtaaaggcgctgcgcgcctgcgcgccgtggatttcgctgagcggcacggctacatcaagggcatcgtcaaggacatcatccacgacccgggccgcggcgcgcccctcgccaaggtggtcttccgggatccgtatcggtttaagaagcggacggagctgttcattgccgccgagggcattcacacgggccagtttgtgtattgcggcaagaaggcccagctcaacattggcaatgtgctccctgtgggcaccatgcctgagggtacaatcgtgtgctgcctggaggagaagcctggagaccgtggcaagctggcccgggcatcagggaactatgccaccgttatctcccacaaccctgagaccaagaagacccgtgtgaagctgccctccggctccaagaaggttatctcctcagccaacagagctgtggttggtgtggtggctggaggtggccgaattgacaaacccatcttgaaggctggccgggcgtaccacaaatataaggcaaagaggaactgctggccacgagtacggggtgtggccatgaatcctgtggagcatccttttggaggtggcaaccaccagcacatcggcaagccctccaccatccgcagagatgcccctgctggccgcaaagtgggtctcattgctgcccgccggactggacgtctccggggaaccaagactgtgcaggagaaagagaactagtgctgagggcctcaataaagtttgtgtttatgcc

SEQ ID NO: 176640 - DNA, 965 bp, Homo sapiens
  Payload ID: 14673
  Gene Symbol: RPL8
  Gene Name: ribosomal protein L8
  Uniprot ID: P62917
  ENST ID: ENST00000394920
  CDS Start-End: 157-930
tctttcggccgcgctggtgaacaggtaggtcatccttgcggccttgcggcatgggcagtatccgccgccatcctcttccgtgaggcgcgctgagacccggaccggccctcctgagaggatgccggtgcgggcgcccgcggagagggacccgtcgccatgggccgtgtgatccgtggacagaggaagggcgccgggtctgtgttccgcgcgcacgtgaagcaccgtaaaggcgctgcgcgcctgcgcgccgtggatttcgctgagcggcacggctacatcaagggcatcgtcaaggacatcatccacgacccgggccgcggcgcgcccctcgccaaggtggtcttccgggatccgtatcggtttaagaagcggacggagctgttcattgccgccgagggcattcacacgggccagtttgtgtattgcggcaagaaggcccagctcaacattggcaatgtgctccctgtgggcaccatgcctgagggtacaatcgtgtgctgcctggaggagaagcctggagaccgtggcaagctggcccgggcatcagggaactatgccaccgttatctcccacaaccctgagaccaagaagacccgtgtgaagctgccctccggctccaagaaggttatctcctcagccaacagagctgtggttggtgtggtggctggaggtggccgaattgacaaacccatcttgaaggctggccgggcgtaccacaaatataaggcaaagaggaactgctggccacgagtacggggtgtggccatgaatcctgtggagcatccttttggaggtggcaaccaccagcacatcggcaagccctccaccatccgcagagatgcccctgctggccgcaaagtgggtctcattgctgcccgccggactggacgtctccggggaaccaagactgtgcaggagaaagagaactagtgctgagggcctcaataaagtttgtgtttatgcca

SEQ ID NO: 176641 - DNA, 1015 bp, Homo sapiens
  Payload ID: 14673
  Gene Symbol: RPL8
  Gene Name: ribosomal protein L8
  Uniprot ID: P62917
  ENST ID: ENST00000528957
  CDS Start-End: 223-996
cggccttgcggcatgggcagtatccgccgccatcctcttccgtgaggcgcgctgagacccggaccggccctcctgagaggatgccggtgcgggcgcccgcggagagggtagggagtggtgggcgcggcggcctcgggggcggggtcccggaaagccgggctggcgggggtacccgggccgcccggccgcgctaatcgtgagtcgcccccaggacccgtcgccatgggccgtgtgatccgtggacagaggaagggcgccgggtctgtgttccgcgcgcacgtgaagcaccgtaaaggcgctgcgcgcctgcgcgccgtggatttcgctgagcggcacggctacatcaagggcatcgtcaaggacatcatccacgacccgggccgcggcgcgcccctcgccaaggtggtcttccgggatccgtatcggtttaagaagcggacggagctgttcattgccgccgagggcattcacacgggccagtttgtgtattgcggcaagaaggcccagctcaacattggcaatgtgctccctgtgggcaccatgcctgagggtacaatcgtgtgctgcctggaggagaagcctggagaccgtggcaagctggcccgggcatcagggaactatgccaccgttatctcccacaaccctgagaccaagaagacccgtgtgaagctgccctccggctccaagaaggttatctcctcagccaacagagctgtggttggtgtggtggctggaggtggccgaattgacaaacccatcttgaaggctggccgggcgtaccacaaatataaggcaaagaggaactgctggccacgagtacggggtgtggccatgaatcctgtggagcatccttttggaggtggcaaccaccagcacatcggcaagccctccaccatccgcagagatgcccctgctggccgcaaagtgggtctcattgctgcccgccggactggacgtctccggggaaccaagactgtgcaggagaaagagaactagtgctgagggcctcaataaa

SEQ ID NO: 176642 - DNA, 876 bp, Homo sapiens
  Payload ID: 14673
  Gene Symbol: RPL8
  Gene Name: ribosomal protein L8
  ENST ID: ENST00000529920
  CDS Start-End: 15-518
caggacccgtcgccatgggccgtgtgatccgtggacagaggaagggcgccgggtctgtgttccgcgcgcacgtgaagcaccgtaaaggcgctgcgcgcctgcgcgccgtggatttcgctgagcggcacggctacatcaagggcatcgtcaaggacatcatccacgacccgggccgcggcgcgcccctcgccaaggtggtcttccgggatccgtatcggtttaagaagcggacggagctgttcattgccgccgagggcattcacacgggccagtttgtgtattgcggcaagaaggcccagctcaacattggcaatgtgctccctgtgggcaccatgcctgagggtacaatcgtgtgctgcctggaggagaagcctggagaccgtggcaagctggcccgggcatcagggaactatgccaccgttatctcccacaaccctgagaccaagaagacccgtgtgaagctgccctccggctccaagaaggttatctcctcagccaacagagctgtggttggttgagtggccggcctgacgtctcacacatggtgaggggggtgcttccctgcgcttggagctcagccagcattctaggtgatggaggtgtggtggctggaggtggccgaattgacaaacccatcttgaaggctggccgggcgtaccacaaatataaggcaaagaggaactgctggccacgagtacggggtgtggccatgaatcctgtggagcatccttttggaggtggcaaccaccagcacatcggcaagccctccaccatccgcagagatgcccctgctggccgcaaagtgggtctcattgctgcccgccggactggacgtctccggggaaccaagactgtgcaggagaaagagaactagtg

SEQ ID NO: 176643 - DNA, 745 bp, Homo sapiens
  Payload ID: 14673
  Gene Symbol: RPL8
  Gene Name: ribosomal protein L8
  ENST ID: ENST00000532702
  CDS Start-End: 131-745
cggccgcgctggtgaacaggtaggtcatccttgcggccttgcggcatgggcagtatccgccgccatcctcttccgtgaggcgcgctgagacccggaccggccctcctgagaggatgccggacccgtcgccatgggccgtgtgatccgtggacagaggaagggcgccgggtctgtgttccgcgcgcacgtgaagcaccgtaaaggcgctgcgcgcctgcgcgccgtggatttcgctgagcggcacggctacatcaagggcatcgtcaaggacatcatccacgacccgggccgcggcgcgcccctcgccaaggtggtcttccgggatccgtatcggtttaagaagcggacggagctgttcattgccgccgagggcattcacacgggccagtttgtgtattgcggcaagaaggcccagctcaacattggcaatgtgctccctgtgggcaccatgcctgagggtacaatcgtgtgctgcctggaggagaagcctggagaccgtggcaagctggcccgggcatcagggaactatgccaccgttatctcccacaaccctgagaccaagaagacccgtgtgaagctgccctccggctccaagaaggttatctcctcagccaacagagctgtggttggtgtggtggctggaggtggccgaattgacaaacccatcttgaaggctggccgggcgtaccacaaatataaggcaaagaggaactgctggccacgagtacggggtgtggccatgaat

SEQ ID NO: 176644 - DNA, 730 bp, Homo sapiens
  Payload ID: 14673
  Gene Symbol: RPL8
  Gene Name: ribosomal protein L8
  ENST ID: ENST00000533397
  CDS Start-End: 25-730
gagtcgcccccaggacccgtcgccatgggccgtgtgatccgtggacagaggaagggcgccgggtctgtgttccgcgcgcacgtgaagcaccgtaaaggcgctgcgcgcctgcgcgccgtggatttcgctgagcggcacggctacatcaagggcatcgtcaaggacatcatccacgacccgggccgcggcgcgcccctcgccaaggtggtcttccgggatccgtatcggtttaagaagcggacggagctgttcattgccgccgagggcattcacacgggccagtttgtgtattgcggcaagaaggcccagctcaacattggcaatgtgctccctgtgggcaccatgcctgagggtacaatcgtgtgctgcctggaggagaagcctggagaccgtggcaagctggcccgggcatcagggaactatgccaccgttatctcctcagccaacagagctgtggttggtgtggtggctggaggtggccgaattgacaaacccatcttgaaggctggccgggcgtaccacaaatataaggcaaagaggaactgctggccacgagtacggggtgtggccatgaatcctgtggagcatccttttggaggtggcaaccaccagcacatcggcaagccctccaccatccgcagagatgcccctgctggccgcaaagtgggtctcattgctgcccgccggactggacgtctccggggaaccaagactgtgcaggagaaagaga

SEQ ID NO: 176645 - DNA, 551 bp, Homo sapiens
  Payload ID: 14673
  Gene Symbol: RPL8
  Gene Name: ribosomal protein L8
  ENST ID: ENST00000527914
  CDS Start-End: 70-516
ggaagataaggccgctcgctgacgccgtgtttcctctttcggccgcgctggtgaacaggacccgtcgccatgggccgtgtgatccgtggacagaggaagggcgccgggtctgtgttccgcgcgcacgtgaagcaccgtaaaggcgctgcgcgcctgcgcgccgtggatttcgctgagcggcacggctacatcaagggcatcgtcaagaaggttatctcctcagccaacagagctgtggttggtgtggtggctggaggtggccgaattgacaaacccatcttgaaggctggccgggcgtaccacaaatataaggcaaagaggaactgctggccacgagtacggggtgtggccatgaatcctgtggagcatccttttggaggtggcaaccaccagcacatcggcaagccctccaccatccgcagagatgcccctgctggccgcaaagtgggtctcattgctgcccgccggactggacgtctccggggaaccaagactgtgcaggagaaagagaactagtgctgagggcctcaataaagtttgtgtttatgcca

SEQ ID NO: 176646 - DNA, 698 bp, Homo sapiens
  Payload ID: 14673
  Gene Symbol: RPL8
  Gene Name: ribosomal protein L8
  ENST ID: ENST00000531975
  CDS Start-End: 1-331
ggcgctgcgcgcctgcgcgccgtggatttcgctgagcggcacggctacatcaagggcatcgtcaaggtggtcttccgggatccgtatcggtttaagaagcggacggagctgttcattgccgccgagggcattcacacgggccagtttgtgtattgcggcaagaaggcccagctcaacattggcaatgtgctccctgtgggcaccatgcctgagggtacaatcgtgtgctgcctggaggagaagcctggagaccgtggcaagctggcccgggcatcagggaactatgccaccgttatctcccacaaccctgagaccaagaagacccgtgtgaagctgccctccggctccaagaaggttatctcctcagccaacagagctgtggttggtgtggtggctggaggtggccgaattgacaaacccatcttgaaggctggccgggcgtaccacaaatataaggcaaagaggaactgctggccacgagtacggggtgtggccatgaatcctgtggagcatccttttggaggtggcaaccaccagcacatcggcaagccctccaccatccgcagagatgcccctgctggccgcaaagtgggtctcattgctgcccgccggactggacgtctccggggaaccaagactgtgcaggagaaagagaactagtgctgagggcctcaataaagtttgtgtttatgccacct

SEQ ID NO: 176647 - DNA, 750 bp, Homo sapiens
  Payload ID: 14674
  Gene Symbol: RPL9
  Gene Name: ribosomal protein L9
  Uniprot ID: P32969
  ENST ID: ENST00000295955
  CDS Start-End: 60-638
acgcgatacaagtacgtaatgacgacagacgttctttctttgctgcgtctactgcgagaatgaagactattctcagcaatcagactgtcgacattccagaaaatgtcgacattactctgaagggacgcacagttatcgtgaagggccccagaggaaccctgcggagggacttcaatcacatcaatgtagaactcagccttcttggaaagaaaaaaaagaggctccgggttgacaaatggtggggtaacagaaaggaactggctaccgttcggactatttgtagtcatgtacagaacatgatcaagggtgttacactgggcttccgttacaagatgaggtctgtgtatgctcacttccccatcaacgttgttatccaggagaatgggtctcttgttgaaatccgaaatttcttgggtgaaaaatatatccgcagggttcggatgagaccaggtgttgcttgttcagtatctcaagcccagaaagatgaattaatccttgaaggaaatgacattgagcttgtttcaaattcagcggctttgattcagcaagccacaacagttaaaaacaaggatatcaggaaatttttggatggtatctatgtctctgaaaaaggaactgttcagcaggctgatgaataagatctaagagttacctggctacagaaagaagatgccagatgacacttaagacctacttgtgatatttaaatgatgcaataaaagacctattgatttggaccttcttcttaaa

SEQ ID NO: 176648 - DNA, 1127 bp, Homo sapiens
  Payload ID: 14674
  Gene Symbol: RPL9
  Gene Name: ribosomal protein L9
  Uniprot ID: P32969
  ENST ID: ENST00000449470
  CDS Start-End: 450-1028
aaggatgtttctgtgctcgtgggggtactgggaatctgaaaccatctgctctgggaaaggctgcggcgcggctcccactctcggaaccttgtcctgtttgtcccccagctcggcaagcgccatatgagcctggcggcgccagatgcgaatcctgttgtgggctttttggcctattcccgcccctcagtcttgccgggatggcaccgcccgcataggacttccagggttgggctgagtgggagttcgactgctgggcctcgtaattctcgctttggggctgctccttccaggctgggacacactggggcccgctgtcggtctcccgtcctccgacatcttgtctggaacttccgcctggcagtctccagtaggagtggagctctgtgcggcgtagtttggtggaaaaacgggccttgcgtcggcctcacccccagtgtttgtgtttcagaatgaagactattctcagcaatcagactgtcgacattccagaaaatgtcgacattactctgaagggacgcacagttatcgtgaagggccccagaggaaccctgcggagggacttcaatcacatcaatgtagaactcagccttcttggaaagaaaaaaaagaggctccgggttgacaaatggtggggtaacagaaaggaactggctaccgttcggactatttgtagtcatgtacagaacatgatcaagggtgttacactgggcttccgttacaagatgaggtctgtgtatgctcacttccccatcaacgttgttatccaggagaatgggtctcttgttgaaatccgaaatttcttgggtgaaaaatatatccgcagggttcggatgagaccaggtgttgcttgttcagtatctcaagcccagaaagatgaattaatccttgaaggaaatgacattgagcttgtttcaaattcagcggctttgattcagcaagccacaacagttaaaaacaaggatatcaggaaatttttggatggtatctatgtctctgaaaaaggaactgttcagcaggctgatgaataagatctaagagttacctggctacagaaagaagatgccagatgacacttaagacctacttgtgatatttaaatgatgcaataaaagacctattgatttgga

SEQ ID NO: 176649 - DNA, 571 bp, Homo sapiens
  Payload ID: 14674
  Gene Symbol: RPL9
  Gene Name: ribosomal protein L9
  ENST ID: ENST00000503040
  CDS Start-End: 27-571
ctttctttgctgcgtctactgcgagaatgaagactattctcagcaatcagactgtcgacattccagaaaatgtcgacattactctgaagggacgcacagttatcgtgaagggccccagaggaaccctgcggagggacttcaatcacatcaatgtagaactcagccttcttggaaagaaaaaaaagaggctccgggttgacaaatggtggggtaacagaaaggaactggctaccgttcggactatttgtagtcatgtacagaacatgatcaagggtgttacactgggcttccgttacaagatgaggtctgtgtatgctcacttccccatcaacgttgttatccaggagaatgggtctcttgttgaaatccgaaatttcttgggtgaaaaatatatccgcagggttcggatgagaccagtatctcaagcccagaaagatgaattaatccttgaaggaaatgacattgagcttgtttcaaattcagcggctttgattcagcaagccacaacagttaaaaacaaggatatcaggaaatttttggatggtatctatgtctctgaaaaaggaactgt

SEQ ID NO: 176650 - DNA, 689 bp, Homo sapiens
  Payload ID: 14674
  Gene Symbol: RPL9
  Gene Name: ribosomal protein L9
  ENST ID: ENST00000504470
  CDS Start-End: 192-689
agacgttctttctttgctgcgtctactgcgaggctgggacacactggggcccgctgtcggtctcccgtcctccgacatcttgtctggaacttccgcctggcagtctccagtaggagtggagctctgtgcggcgtagtttggtggaaaaacgggccttgcgtcggcctcacccccagtgtttgtgtttcagaatgaagactattctcagcaatcagactgtcgacattccagaaaatgtcgacattactctgaagggacgcacagttatcgtgaagggccccagaggaaccctgcggagggacttcaatcacatcaatgtagaactcagccttcttggaaagaaaaaaaagaggctccgggttgacaaatggtggggtaacagaaaggaactggctaccgttcggactatttgtagtcatgtacagaacatgatcaagggtgttacactgggcttccgttacaagatgaggtctgtgtatgctcacttccccatcaacgttgttatccaggagaatgggtctcttgttgaaatccgaaatttcttgggtgaaaaatatatccgcagggttcggatgagaccaggtgttgcttgttcagtatctcaagcccagaaagatgaattaatccttgaaggaaatgacattgagcttgtttcaaattcagcggctttgattcagcaagccacaaca

SEQ ID NO: 176651 - DNA, 371 bp, Homo sapiens
  Payload ID: 14674
  Gene Symbol: RPL9
  Gene Name: ribosomal protein L9
  ENST ID: ENST00000506581
  CDS Start-End: 1-274
gctccgggttgacaaatggtggggtaacagaaaggaactggctaccgttcggactatttgtagtcatgtacagaacatgatcaagggtgttgcttgttcagtatctcaagcccagaaagatgaattaatccttgaaggaaatgacattgagcttgtttcaaattcagcggctttgattcagcaagccacaacagttaaaaacaaggatatcaggaaatttttggatggtatctatgtctctgaaaaaggaactgttcagcaggctgatgaataagatctaagagttacctggctacagaaagaagatgccagatgacacttaagacctacttgtgatatttaaatgatgcaataaaagacctattgatttg

SEQ ID NO: 176652 - DNA, 667 bp, Homo sapiens
  Payload ID: 14674
  Gene Symbol: RPL9
  Gene Name: ribosomal protein L9
  ENST ID: ENST00000508595
  CDS Start-End: 1-568
gacagacgttctttctttgctgcgtctactgcgagtcgacattactctgaagggacgcacagttatcgtgaagggccccagaggaaccctgcggagggacttcaatcacatcaatgtagaactcagccttcttggaaagaaaaaaaagaggctccgggttgacaaatggtggggtaacagaaaggaactggctaccgttcggactatttgtagtcatgtacagaacatgatcaagggtgttacactgggcttccgttacaagatgaggtctgtgtatgctcacttccccatcaacgttgttatccaggagaatgggtctcttgttgaaatccgaaatttcttgggtgaaaaatatatccgcagggttcggatgagaccaggtgttgcttgttcagtatctcaagcccagaaagatgaattaatccttgaaggaaatgacattgagcttgtttcaaattcagcggctttgattcagcaagccacaacagttaaaaacaaggatatcaggaaatttttggatggtatctatgtctctgaaaaaggaactgttcagcaggctgatgaataagatctaagagttacctggctacagaaagaagatgccagatgacacttaagacctacttgtgatatttaaatgatgcaataaaagacctattgatttgga

SEQ ID NO: 176653 - DNA, 644 bp, Homo sapiens
  Payload ID: 14675
  Gene Symbol: RPS10
  Gene Name: ribosomal protein S10
  Uniprot ID: P46783
  ENST ID: ENST00000326199
  CDS Start-End: 95-592
ggcggggggcgggtccacgccagcccggaagagacgcagcaccgcgcatgctccttcctttccagccccggtaccggaccctgcagccgcagagatgttgatgcctaagaagaaccggattgccatttatgaactcctttttaaggagggagtcatggtggccaagaaggatgtccacatgcctaagcacccggagctggcagacaagaatgtgcccaaccttcatgtcatgaaggccatgcagtctctcaagtcccgaggctacgtgaaggaacagtttgcctggagacatttctactggtaccttaccaatgagggtatccagtatctccgtgattaccttcatctgcccccggagattgtgcctgccaccctacgccgtagccgtccagagactggcaggcctcggcctaaaggtctggagggtgagcgacctgcgagactcacaagaggggaagctgacagagatacctacagacggagtgctgtgccacctggtgccgacaagaaagccgaggctggggctgggtcagcaaccgaattccagtttagaggcggatttggtcgtggacgtggtcagccacctcagtaaaattggagaggattcttttgcattgaataaacttacagccaaaaaaccttaa

SEQ ID NO: 176654 - DNA, 650 bp, Homo sapiens
  Payload ID: 14675
  Gene Symbol: RPS10
  Gene Name: ribosomal protein S10
  ENST ID: ENST00000344700
  CDS Start-End: 1-519
atgttgatgcctaagaagaaccggattgccatttatgaactcctttttaaggagggagtcatggtggccaagaaggatgtccacatgcctaagcacccggagctggcagacaagaatgtgcccaaccttcatgtcatgaaggccatgcagtctctcaagtcccgaggctacgtgaaggaacagtttgcctggagacatttctactggtaccttaccaatgagggtatccagtatctccgtgattaccttcatctgcccccggagattgtgcctgccaccctacgccgtagccgtccagagactggcaggcctcggcctaaaggtctggagggtgagcgacctgcgagactcacaagaggggaagctgacagagatacctacagacggagtgctgtgccacctggtgccgacaagaaagccgaggctggggctgggtcagcaaccgaattccagtttgtcctcatagcacacgattgctctcagataatgtcatttgtaaaaaggaagcatgtacagtagaaacggtccaatcctggtgctggatgctttcataggaagaggcggatttggtcgtggacgtggtcagccacctcagtaaaattggagaggattcttttgcattgaataaacttacagccaaaaaaccttaa

SEQ ID NO: 176655 - DNA, 784 bp, Homo sapiens
  Payload ID: 14675
  Gene Symbol: RPS10
  Gene Name: ribosomal protein S10
  Uniprot ID: P46783
  ENST ID: ENST00000621356
  CDS Start-End: 247-744
agccgcagaggtgagtttctgtggcgttcgagttccatcggctcccatccgggctatcctgccgccttagcggctgcttctccccaggatgcgggcagggggcctctctcccactccccacacaccgatttctgagtagcgataggggctggaggcttattttatggggtagggggccgctggtaggcgaagattgtccgagggagagggggaggatgaagccagtgagtggcggagacttgccagatgttgatgcctaagaagaaccggattgccatttatgaactcctttttaaggagggagtcatggtggccaagaaggatgtccacatgcctaagcacccggagctggcagacaagaatgtgcccaaccttcatgtcatgaaggccatgcagtctctcaagtcccgaggctacgtgaaggaacagtttgcctggagacatttctactggtaccttaccaatgagggtatccagtatctccgtgattaccttcatctgcccccggagattgtgcctgccaccctacgccgtagccgtccagagactggcaggcctcggcctaaaggtctggagggtgagcgacctgcgagactcacaagaggggaagctgacagagatacctacagacggagtgctgtgccacctggtgccgacaagaaagccgaggctggggctgggtcagcaaccgaattccagtttagaggcggatttggtcgtggacgtggtcagccacctcagtaaaattggagaggattcttttgcattgaataaacttacagcc

SEQ ID NO: 176656 - DNA, 614 bp, Homo sapiens
  Payload ID: 14676
  Gene Symbol: RPS11
  Gene Name: ribosomal protein S11
  Uniprot ID: P62280
  ENST ID: ENST00000270625
  CDS Start-End: 84-560
gtcacttcctctccagcccctgcgtaatcgataaggaaacccggacgctgctgcccctttctttttttcaggcggccgggaagatggcggacattcagactgagcgtgcctaccaaaagcagccgaccatctttcaaaacaagaagagggtcctgctgggagaaactggcaaggagaagctcccgcggtactacaagaacatcggtctgggcttcaagacacccaaggaggctattgagggcacctacattgacaagaaatgccccttcactggtaatgtgtccattcgagggcggatcctctctggcgtggtgaccaagatgaagatgcagaggaccattgtcatccgccgagactatctgcactacatccgcaagtacaaccgcttcgagaagcgccacaagaacatgtctgtacacctgtccccctgcttcagggacgtccagatcggtgacatcgtcacagtgggcgagtgccggcctctgagcaagacagtgcgcttcaacgtgctcaaggtcaccaaggctgccggcaccaagaagcagttccagaagttctgaggctggacatcggcccgctccccacaatgaaataaagttattttctcattccca

SEQ ID NO: 176657 - DNA, 547 bp, Homo sapiens
  Payload ID: 14676
  Gene Symbol: RPS11
  Gene Name: ribosomal protein S11
  ENST ID: ENST00000601306
  CDS Start-End: 1-249
attcaggtgcggactcggggttggatgccaggactgagcgtgcctaccaaaagcagccgaccatctttcaaaacaagaagagggtcctgctgggagaaactggcaaggagaagctcccgcggtactacaagaacatcggtctgggcttcaagacacccaaggaggctattgagggcacctacattgacaagaaatgccccttcactggtaatgtgtccattcgagggcggatcctctctggcgtggtgaccaagatgaagatgcagaggaccattgtcatccgccgagactatctgcactacatccgcaagtacaaccgcttcgagaagcgccacaagaacatgtctgtacacctgtccccctgcttcagggacgtccagatcggtgacatcgtcacagtgggcgagtgccggcctctgagcaagacagtgcgcttcaacgtgctcaaggtcaccaaggctgccggcaccaagaagcagttccagaagttctgaggctggacatcggcccgctccccacaatgaaataaagttattttctcattccc

SEQ ID NO: 176658 - DNA, 583 bp, Homo sapiens
  Payload ID: 14676
  Gene Symbol: RPS11
  Gene Name: ribosomal protein S11
  ENST ID: ENST00000596873
  CDS Start-End: 26-382
ttctttttttcaggcggccgggaagatggcggacattcagactgagcgtgcctaccaaaagcagccgaccatctttcaaaacaagaagagggtcctgctgggagaaactggcaaggagaagctcccgcggtactacaagaacatcggtctgggcttcaagacacccaaggaggctattgagggcacctacattgacaagaaatgccccttcactggtaatgtgtccattcgagggcggatcctctctggcgtggtgaccaagatgaagatgcagaggaccattgtcatccgccgagactatctgcactacatccgcaagtacaaccgcttcgagaagcgccacaagaacatgtctgtacacctgtccccctgcttcaggtgagcgcagtggcccatcaggttgctcaggccacgctctctcagccttcagattccagatcggaccaatttaaggccaactgagggagggaaagactgaggtggcatctctgggaagccccagaatctcaggatttgtatatcatatgttcttcagaatcaaagcgttctacagggtgaatatctctacctgaaatgcttggaa

SEQ ID NO: 176659 - DNA, 575 bp, Homo sapiens
  Payload ID: 14676
  Gene Symbol: RPS11
  Gene Name: ribosomal protein S11
  ENST ID: ENST00000594493
  CDS Start-End: 282-521
ctttttttcaggcggccgggaagatggcggacattcagttttctcctcataatctgtagactgagcgtgcctaccaaaagcagccgaccatctttcaaaacaagaagagggtcctgctgggagaaactggcaaggagaagctcccgcggtactacaagaacatcggtctgggcttcaagacacccaaggaggctattgagggcacctacattgacaagaaatgccccttcactggtaatgtgtccattcgagggcggatcctctctggcgtggtgaccaagatgaagatgcagaggaccattgtcatccgccgagactatctgcactacatccgcaagtacaaccgcttcgagaagcgccacaagaacatgtctgtacacctgtccccctgcttcagggacgtccagatcggtgacatcgtcacagtgggcgagtgccggcctctgagcaagacagtgcgcttcaacgtgctcaaggtcaccaaggctgccggcaccaagaagcagttccagaagttctgaggctggacatcggcccgctccccacaatgaaataaagttattttctcattccca

SEQ ID NO: 176660 - DNA, 430 bp, Homo sapiens
  Payload ID: 14676
  Gene Symbol: RPS11
  Gene Name: ribosomal protein S11
  ENST ID: ENST00000599561
  CDS Start-End: 4-270
aagatggcggacattcagactgagcgtgcctaccaaaagcagccgaccatctttcaaaacaagaagagggtcctgctgggagaaactggcaaggagaagctcccgcgggcggatcctctctggcgtggtgaccaagatgaagatgcagaggaccattgtcatccgccgagactatctgcactacatccgcaagtacaaccgcttcgagaagcgccacaagaacatgtctgtacacctgtccccctgcttcagggacgtccagatcggtgacatcgtcacagtgggcgagtgccggcctctgagcaagacagtgcgcttcaacgtgctcaaggtcaccaaggctgccggcaccaagaagcagttccagaagttctgaggctggacatcggcccgctccccacaatgaaataaagttattttctcattccca

SEQ ID NO: 176661 - DNA, 631 bp, Homo sapiens
  Payload ID: 14677
  Gene Symbol: RPS12
  Gene Name: ribosomal protein S12
  Uniprot ID: P25398
  ENST ID: ENST00000230050
  CDS Start-End: 211-609
gcctcaatccggaaacagaaactccccaggcccggcactgcgggagccacctctttcgagggtgggagtgcacatgcgcacaggggacctgaaaaacccttaaataccggcatgcgtgcggatgaggcctctttccctgccgccgccgagtcgcgcggaggcggaggcttgggtgcgttcaagattcaacttcacccgtaacccaccgccatggccgaggaaggcattgctgctggaggtgtaatggacgttaatactgctttacaagaggttctgaagactgccctcatccacgatggcctagcacgtggaattcgcgaagctgccaaagccttagacaagcgccaagcccatctttgtgtgcttgcatccaactgtgatgagcctatgtatgtcaagttggtggaggccctttgtgctgaacaccaaatcaacctaattaaggttgatgacaacaagaaactaggagaatgggtaggcctttgtaaaattgacagagaggggaaaccccgtaaagtggttggttgcagttgtgtagtagttaaggactatggcaaggagtctcaggccaaggatgtcattgaagagtatttcaaatgcaagaaatgaagaaataaatctttggctcaca

SEQ ID NO: 176662 - DNA, 491 bp, Homo sapiens
  Payload ID: 14678
  Gene Symbol: RPS13
  Gene Name: ribosomal protein S13
  ENST ID: ENST00000228140
  CDS Start-End: 26-472
ctttcgttgcctgatcgccgccatcatgggtcgcatgcatgctcccgggaagggcctgtcccagtcggctttaccctatcgacgcagcgtccccacttggttgaagttgacatctgacgacgtgaaggagcagatttacaaactggccaagaagggccttactccttcacagatcggtgtaatcctgagagattcacatggtgttgcacaagtacgttttgtgacaggcaataaaattttaagaattcttaagtctaagggacttgctcctgatcttcctgaagatctctaccatttaattaagaaagcagttgctgttcgaaagcatcttgagaggaacagaaagagagccggattcaccgtttggctcgatattataagaccaagcgagtcctccctcccaattggaaatatgaatcatctacagcctctgccctggtcgcataaatttgtctgtgtactcaagcaataaaatgattgtttaactaaaa

SEQ ID NO: 176663 - DNA, 355 bp, Homo sapiens
  Payload ID: 14678
  Gene Symbol: RPS13
  Gene Name: ribosomal protein S13
  ENST ID: ENST00000533969
  CDS Start-End: 7-355
gccatcatgggtcgcatgcatgctcccgggaagggcctgtcccagtcggctttaccctatcgacgcagcgtccccacttggttgaagttgacatctgacgacgtgaaggagcagatttacaaactggccaagaagggccttactccttcacagatcgtcttgctcttgtcgcccagtctggagtgcagtggcgcgatctcagctcactgcaacctccacctcctggattcaagcgattctcctgcctcagcctcccgaataggtgtaatcctgagagattcacatggtgttgcacaagtacgttttgtgacaggcaataaaattttaagaattcttaagtctaagggacttgctc

SEQ ID NO: 176664 - DNA, 646 bp, Homo sapiens
  Payload ID: 14678
  Gene Symbol: RPS13
  Gene Name: ribosomal protein S13
  Uniprot ID: P62277
  ENST ID: ENST00000525634
  CDS Start-End: 147-602
cacacagacgggcggtggctgcgcagcgtagctccgcctcctgcgtgagaggaagcggggacgtgtgaggtcacttcctgcgtgttgggtggcttcctgcggcgtttccactctcgctctcctttcgttgcctgatcgccgccatcatgggtcgcatgcatgctcccgggaagggcctgtcccagtcggctttaccctatcgacgcagcgtccccacttggttgaagttgacatctgacgacgtgaaggagcagatttacaaactggccaagaagggccttactccttcacagatcggtgtaatcctgagagattcacatggtgttgcacaagtacgttttgtgacaggcaataaaattttaagaattcttaagtctaagggacttgctcctgatcttcctgaagatctctaccatttaattaagaaagcagttgctgttcgaaagcatcttgagaggaacagaaaggataaggatgctaaattccgtctgattctaatagagagccggattcaccgtttggctcgatattataagaccaagcgagtcctccctcccaattggaaatatgaatcatctacagcctctgccctggtcgcataaatttgtctgtgtactcaagcaataaaatgattgtttaactaaaa

SEQ ID NO: 176665 - DNA, 711 bp, Homo sapiens
  Payload ID: 14679
  Gene Symbol: RPS14
  Gene Name: ribosomal protein S14
  Uniprot ID: P62263
  ENST ID: ENST00000312037
  CDS Start-End: 208-663
ggcccgggcgcgacaatcggggggcatcctgcggcgaggggaccctgtggggcttgggacgagagacgggggtctttccgtgggaaccgagctaggtgccgggcaagagacgcgcggctggcccacctggatcctggccaactcgggattgagttcgttcctggtctcagaaggcccgttttgctttcagggaggagcttgtgaaaaatggcacctcgaaaggggaaggaaaagaaggaagaacaggtcatcagcctcggacctcaggtggctgaaggagagaatgtatttggtgtctgccatatctttgcatccttcaatgacacttttgtccatgtcactgatctttctggcaaggaaaccatctgccgtgtgactggtgggatgaaggtaaaggcagaccgagatgaatcctcaccatatgctgctatgttggctgcccaggatgtggcccagaggtgcaaggagctgggtatcaccgccctacacatcaaactccgggccacaggaggaaataggaccaagacccctggacctggggcccagtcggccctcagagcccttgcccgctcgggtatgaagatcgggcggattgaggatgtcacccccatcccctctgacagcactcgcaggaaggggggtcgccgtggtcgccgtctgtgaacaagattcctcaaaatattttctgttaataaattgccttcatgtaaa

SEQ ID NO: 176666 - DNA, 784 bp, Homo sapiens
  Payload ID: 14679
  Gene Symbol: RPS14
  Gene Name: ribosomal protein S14
  Uniprot ID: P62263
  ENST ID: ENST00000407193
  CDS Start-End: 274-729
ctccgccccctcccactctctctttccggtgtggagtctggagacgacgtgcaggtaggaggcccgggcgcgacaatcggggggcatcctgcggcgaggggaccctgtggggcttgggacgagagacgggggtctttccgtgggaaccgagctaggtgccgggcaagagacgcgcggctggcccacctggatcctggccaactcgggattgagttcgttcctggtctcagaaggcccgttttgctttcagggaggagcttgtgaagtaaggaaatggcacctcgaaaggggaaggaaaagaaggaagaacaggtcatcagcctcggacctcaggtggctgaaggagagaatgtatttggtgtctgccatatctttgcatccttcaatgacacttttgtccatgtcactgatctttctggcaaggaaaccatctgccgtgtgactggtgggatgaaggtaaaggcagaccgagatgaatcctcaccatatgctgctatgttggctgcccaggatgtggcccagaggtgcaaggagctgggtatcaccgccctacacatcaaactccgggccacaggaggaaataggaccaagacccctggacctggggcccagtcggccctcagagcccttgcccgctcgggtatgaagatcgggcggattgaggatgtcacccccatcccctctgacagcactcgcaggaaggggggtcgccgtggtcgccgtctgtgaacaagattcctcaaaatattttctgttaataaattgccttcatgtaaactgtttc

SEQ ID NO: 176667 - DNA, 1599 bp, Homo sapiens
  Payload ID: 14679
  Gene Symbol: RPS14
  Gene Name: ribosomal protein S14
  Uniprot ID: P62263
  ENST ID: ENST00000401695
  CDS Start-End: 48-503
ctcccactctctctttccggtgtggagtctggagacgacgtgcagaaatggcacctcgaaaggggaaggaaaagaaggaagaacaggtcatcagcctcggacctcaggtggctgaaggagagaatgtatttggtgtctgccatatctttgcatccttcaatgacacttttgtccatgtcactgatctttctggcaaggaaaccatctgccgtgtgactggtgggatgaaggtaaaggcagaccgagatgaatcctcaccatatgctgctatgttggctgcccaggatgtggcccagaggtgcaaggagctgggtatcaccgccctacacatcaaactccgggccacaggaggaaataggaccaagacccctggacctggggcccagtcggccctcagagcccttgcccgctcgggtatgaagatcgggcggattgaggatgtcacccccatcccctctgacagcactcgcaggaaggggggtcgccgtggtcgccgtctgtgaacaagattcctcaaaatattttctgttaataaattgccttcatgtaaactgtttcaactccagccttctctccttcatcaggggctactcaggcatttgatttcttcctcctatttggcttcttgggagaaaggagcctgaggagagctgagatcctggtgctgcatttggggtcttttccatgctacttgcggcattaagttgccttggtcatctaaagcagaccaaggcgttggagacctcgttttgagtggagatgctggttctaaatatggaccaattcttaaagagccagagtgggaactgttgatccaagtgtagcctgaagcgaaagaggagccttccagacccatgccatatataaacacacgtgggtgtgcattctccccccacaccttctgtgcaaagctgggagctcactccactgcgtcttgctttttttcacttggcagatcttggagattgttccacatcagtacataaagtacataaagattgtcaccccacaaatacacaccaagtcctattttcatcagcgataaaaaagaaaagttcttgctttccggaagcttgcatgcggctctgagtacccagtgacaccagatggtactcagcgttttgcaagggattaccacaaggccccgtgatggtgcctgccatggttaggacaggctggtggctgggtagggttagtgagacccagtggagaggatgctgtgtgtcacaggctggagaggtgagaccattgaggtagtcagttgtagaggaaagaaaccagcaagaggggaaaatctgttgggatgctgcttttagcctttgatggcgtgttccaggcagagggaataagcaaataaatgggtcctgagacaaggggttactgtgatgaggcggcgttggttacatgccaaaccttgctagggattttaataacaacattgaatcttaacctgatgaaataacagtactcctggggaggcgggagggatagcattaggagatatacctaatgctaaatgacgagttaatgggtgcagcacaccaacatggcacatgtatacatatgtaacaaacctgcacgttgtgcacatgtacccta

SEQ ID NO: 176668 - DNA, 592 bp, Homo sapiens
  Payload ID: 14679
  Gene Symbol: RPS14
  Gene Name: ribosomal protein S14
  Uniprot ID: P62263
  ENST ID: ENST00000521466
  CDS Start-End: 84-539
gttaacgcactgggtcgtgctcattggtctgatttgaagataggaacatttaacttcgtacacccaagacttacacttgaaaaatggcacctcgaaaggggaaggaaaagaaggaagaacaggtcatcagcctcggacctcaggtggctgaaggagagaatgtatttggtgtctgccatatctttgcatccttcaatgacacttttgtccatgtcactgatctttctggcaaggaaaccatctgccgtgtgactggtgggatgaaggtaaaggcagaccgagatgaatcctcaccatatgctgctatgttggctgcccaggatgtggcccagaggtgcaaggagctgggtatcaccgccctacacatcaaactccgggccacaggaggaaataggaccaagacccctggacctggggcccagtcggccctcagagcccttgcccgctcgggtatgaagatcgggcggattgaggatgtcacccccatcccctctgacagcactcgcaggaaggggggtcgccgtggtcgccgtctgtgaacaagattcctcaaaatattttctgttaataaattgccttcatgtaaactgtt

SEQ ID NO: 176669 - DNA, 398 bp, Homo sapiens
  Payload ID: 14679
  Gene Symbol: RPS14
  Gene Name: ribosomal protein S14
  ENST ID: ENST00000519855
  CDS Start-End: 1-362
ggatgaaggtaaaggcagaccgagatgaatcctcaccatatgctgctatgttggctgcccaggatgtggcccagaggtgcaaggagctgggtatcaccgccctacacatcaaactccgggccacaggaggaaataggaccaagacccctggacctggggcccagtcggccctcagagcccttgcccgctcgggtatgaagatcgggcggattggtaagtgcccccctctagctaatgcttgggtttattttgaagcattggccccaaaaagcacgtgctgtgcccagtggatgtgcagcggctggtctggtcacttttggcagttaagtttgttaagggaggctgcaagaggcaccttgtgacttaaaaatctctccctgaatatctctgtcaccttg

SEQ ID NO: 176670 - DNA, 669 bp, Homo sapiens
  Payload ID: 14679
  Gene Symbol: RPS14
  Gene Name: ribosomal protein S14
  ENST ID: ENST00000518139
  CDS Start-End: 3-407
aaatggcacctcgaaaggggaaggaaaagaaggaagaacaggtcatcagcctcggacctcaggtggctgaaggagagaatgtatttggtgtctgccatatctttgcatccttcaatgacacttttgtccatgtcactgatctttctggcaaggaaaccatctgccgtgtgactggtgggatgaaggtaaaggcagaccgagatgaatcctcaccatatgctgctatgttggctgcccaggatgtggcccagaggtgcaaggagctgggtatcaccgccctacacatcaaactccgggccacaggaggaaataggaccaagacccctggacctggggcccagtcggccctcagagcccttgcccgctcgggtatgaagatcgggcggattgagaagacggtgggctagatgtcagaacctggatttgtcctgtgcctctgacatcttgcgcacagctcagcctgtttccctttctggaaagtgagttaagaccacgtcaggaaattcgaggaactggcagatggggccacttcatgttcacatccatctgttagaggatgtcacccccatcccctctgacagcactcgcaggaaggggggtcgccgtggtcgccgtctgtgaacaagattcctcaaaatattttctgttaataaattgccttcatgtaaa

SEQ ID NO: 176671 - DNA, 570 bp, Homo sapiens
  Payload ID: 14680
  Gene Symbol: RPS15
  Gene Name: ribosomal protein S15
  ENST ID: ENST00000586096
  CDS Start-End: 6-395
gcaagatggcagaagtagagcagaagaagaagcggaccttccgcaagttcacctaccgcggcgtggacctcgaccagctgctggacatgtcctacgagcagctgatgcagctgtacagtgcgcgccagcggcggcggctgaaccggggcctgcggcggaagcagcactccctgctgaagcgcctgcgcaaggccaagaaggaggcgccgcccatggagaagccggaagtggtgaagacgcacctgcgggacatgatcatcctacccgagatggtgggcagcatggtgggcgtctacaacggcaagaccttcaaccaggtggagatcaaggtgtgtgcggccgtccctgccggctggggtgggctggggtcgcctgatgcaggcgggatcagctgacacccagctttgctcttggtctcccgcagcccgagatgatcggccactacctgggcgagttctccatcacctacaagcccgtaaagcatggccggcccggcatcggggccacccactcctcccgcttcatccctctcaagtaatggctcagctaataaaggcgcacatgactcca

SEQ ID NO: 176672 - DNA, 629 bp, Homo sapiens
  Payload ID: 14680
  Gene Symbol: RPS15
  Gene Name: ribosomal protein S15
  ENST ID: ENST00000593052
  CDS Start-End: 139-597
cggcaagatggtgagtgttgcgatttggcgcgtctctgccgggcctatccggctccatccaacctctgaccgtctcgcgggggccgcagttcgtccccgcggctacggcggcttgctcccgaccctgcaggcggctggatgttggggcgaggggcggacttggcagaagtagagcagaagaagaagcggaccttccgcaagttcacctaccgcggcgtggacctcgaccagctgctggacatgtcctacgagcagctgatgcagctgtacagtgcgcgccagcggcggcggctgaaccggggcctgcggcggaagcagcactccctgctgaagcgcctgcgcaaggccaagaaggaggcgccgcccatggagaagccggaagtggtgaagacgcacctgcgggacatgatcatcctacccgagatggtgggcagcatggtgggcgtctacaacggcaagaccttcaaccaggtggagatcaagcccgagatgatcggccactacctgggcgagttctccatcacctacaagcccgtaaagcatggccggcccggcatcggggccacccactcctcccgcttcatccctctcaagtaatggctcagctaataaaggcgcacatgactcca

SEQ ID NO: 176673 - DNA, 467 bp, Homo sapiens
  Payload ID: 14680
  Gene Symbol: RPS15
  Gene Name: ribosomal protein S15
  ENST ID: ENST00000585665
  CDS Start-End: 97-435
caagatggcagaagtagagcagaagaagaagcggaccttccgcaagttcacctaccgcggcgtggacctcgaccagctgctggacatgtcctactgatgcagctgtacagtgcgcgccagcggcggcggctgaaccggggcctgcggcggaagcagcactccctgctgaagcgcctgcgcaaggccaagaaggaggcgccgcccatggagaagccggaagtggtgaagacgcacctgcgggacatgatcatcctacccgagatggtgggcagcatggtgggcgtctacaacggcaagaccttcaaccaggtggagatcaagcccgagatgatcggccactacctgggcgagttctccatcacctacaagcccgtaaagcatggccggcccggcatcggggccacccactcctcccgcttcatccctctcaagtaatggctcagctaataaaggcgcacatgactcca

SEQ ID NO: 176674 - DNA, 510 bp, Homo sapiens
  Payload ID: 14680
  Gene Symbol: RPS15
  Gene Name: ribosomal protein S15
  Uniprot ID: P62841
  ENST ID: ENST00000592588
  CDS Start-End: 41-478
aggcgcggaccaaagcgatctcttctgaggatccggcaagatggcagaagtagagcagaagaagaagcggaccttccgcaagttcacctaccgcggcgtggacctcgaccagctgctggacatgtcctacgagcagctgatgcagctgtacagtgcgcgccagcggcggcggctgaaccggggcctgcggcggaagcagcactccctgctgaagcgcctgcgcaaggccaagaaggaggcgccgcccatggagaagccggaagtggtgaagacgcacctgcgggacatgatcatcctacccgagatggtgggcagcatggtgggcgtctacaacggcaagaccttcaaccaggtggagatcaagcccgagatgatcggccactacctgggcgagttctccatcacctacaagcccgtaaagcatggccggcccggcatcggggccacccactcctcccgcttcatccctctcaagtaatggctcagctaataaaggcgcacatgactcca

SEQ ID NO: 176675 - DNA, 562 bp, Homo sapiens
  Payload ID: 14680
  Gene Symbol: RPS15
  Gene Name: ribosomal protein S15
  ENST ID: ENST00000586686
  CDS Start-End: 192-530
caggcgcggaccaaagcgatctcttctgaggatccggcaagatggcagaagtagagcagaagaagaagcggaccttccgcaagttcacctaccgcggcgtggacctcgaccagctgctggacatgtcctaggtctccccaggccgggccgctcacaaaactgcctggtgcatcctccccagcgagcagctgatgcagctgtacagtgcgcgccagcggcggcggctgaaccggggcctgcggcggaagcagcactccctgctgaagcgcctgcgcaaggccaagaaggaggcgccgcccatggagaagccggaagtggtgaagacgcacctgcgggacatgatcatcctacccgagatggtgggcagcatggtgggcgtctacaacggcaagaccttcaaccaggtggagatcaagcccgagatgatcggccactacctgggcgagttctccatcacctacaagcccgtaaagcatggccggcccggcatcggggccacccactcctcccgcttcatccctctcaagtaatggctcagctaataaaggcgcacatgactcca

SEQ ID NO: 176676 - DNA, 473 bp, Homo sapiens
  Payload ID: 14680
  Gene Symbol: RPS15
  Gene Name: ribosomal protein S15
  ENST ID: ENST00000589656
  CDS Start-End: 22-447
ctcttctgaggatccggcaagatggcagaagtagagcagaagaagaagcggaccttccgcaagttcacctaccgcggcgtggacctcgaccagctgctggacatgtcctacgagcagctgatgcagctgtacagtgcgcgccagcggcggcggctgaaccggggcctgcggcggaagcagcactccctgctgaagcgcctgcgcaaggccaagaaggaggcgccgcccatggagaagccggaagtggtgaagacgcacctgcgggacatgatcatcctacccgagatggtgggcagcatggtgggcgtctacaacggcaagaccttcaaccagcccgagatgatcggccactacctgggcgagttctccatcacctacaagcccgtaaagcatggccggcccggcatcggggccacccactcctcccgcttcatccctctcaagtaatggctcagctaataaaggcgcacatg

SEQ ID NO: 176677 - DNA, 534 bp, Homo sapiens
  Payload ID: 14680
  Gene Symbol: RPS15
  Gene Name: ribosomal protein S15
  ENST ID: ENST00000233609
  CDS Start-End: 146-502
catgccggcagtctcgcgataactgcgcaggcgcggaccaaagcgatctcttctgaggatccggcaagatgaagtagagcagaagaagaagcggaccttccgcaagttcacctaccgcggcgtggacctcgaccagctgctggacatgtcctacgagcagctgatgcagctgtacagtgcgcgccagcggcggcggctgaaccggggcctgcggcggaagcagcactccctgctgaagcgcctgcgcaaggccaagaaggaggcgccgcccatggagaagccggaagtggtgaagacgcacctgcgggacatgatcatcctacccgagatggtgggcagcatggtgggcgtctacaacggcaagaccttcaaccaggtggagatcaagcccgagatgatcggccactacctgggcgagttctccatcacctacaagcccgtaaagcatggccggcccggcatcggggccacccactcctcccgcttcatccctctcaagtaatggctcagctaataaaggcgcacatgactcca

SEQ ID NO: 176678 - DNA, 873 bp, Homo sapiens
  Payload ID: 14680
  Gene Symbol: RPS15
  Gene Name: ribosomal protein S15
  ENST ID: ENST00000592623
  CDS Start-End: 485-841
cgatctcttctgaggatccggcaagatggtgagtgttgcgatttggcgcgtctctgccgggcctatccggctccatccaacctctgaccgtctcgcgggggccgcagttcgtccccgcggctacggcggcttgctcccgaccctgcaggcggctggatgttggggcgaggggcggacttggtgggtgtcgggacgacgcggggctgggaaggcctgtccgggccttcatgtccgggtcctcgtaacccggagccgcgagtgatccccggggacgggtcgaagcggtgtgtccctgtcgggcttctgtccccggcggcgccgcgcgtcttccgcggtgtcctcgggcccggtggccccgggagatgggtgtcgggatcccgctgacgcccgatccgcgcccgcacaggcagaagtagagcagaagaagaagcggaccttccgcaagttcacctaccgcggcgtggacctcgaccagctgctggacatgtcctacgagcagctgatgcagctgtacagtgcgcgccagcggcggcggctgaaccggggcctgcggcggaagcagcactccctgctgaagcgcctgcgcaaggccaagaaggaggcgccgcccatggagaagccggaagtggtgaagacgcacctgcgggacatgatcatcctacccgagatggtgggcagcatggtgggcgtctacaacggcaagaccttcaaccaggtggagatcaagcccgagatgatcggccactacctgggcgagttctccatcacctacaagcccgtaaagcatggccggcccggcatcggggccacccactcctcccgcttcatccctctcaagtaatggctcagctaataaaggcgcacatgactcca

SEQ ID NO: 176679 - DNA, 711 bp, Homo sapiens
  Payload ID: 14680
  Gene Symbol: RPS15
  Gene Name: ribosomal protein S15
  ENST ID: ENST00000591804
  CDS Start-End: 341-679
tcttctgaggatccggcaagatggcagaagtagagcagaagaagaagcggaccttccgcaagttcacctaccgcggcgtggacctcgaccagctgctggacatgtcctagttggtcttgaactcctgggctcaagcgaccctcccgcctcaacctcccgaagtgctgggatcacaggcgggagccactgcgccctacctgccttcccctgcgtttttagaggcctttggcccgagctgtacgctgcagcaccttgtctgaggctgtggtctccgggccgcttgttctctctgaatctctgcagtcacacggtggctcttgcatgtgagggcgagcagctgatgcagctgtacagtgcgcgccagcggcggcggctgaaccggggcctgcggcggaagcagcactccctgctgaagcgcctgcgcaaggccaagaaggaggcgccgcccatggagaagccggaagtggtgaagacgcacctgcgggacatgatcatcctacccgagatggtgggcagcatggtgggcgtctacaacggcaagaccttcaaccaggtggagatcaagcccgagatgatcggccactacctgggcgagttctccatcacctacaagcccgtaaagcatggccggcccggcatcggggccacccactcctcccgcttcatccctctcaagtaatggctcagctaataaaggcgcacatgactcca

SEQ ID NO: 176680 - DNA, 550 bp, Homo sapiens
  Payload ID: 14680
  Gene Symbol: RPS15
  Gene Name: ribosomal protein S15
  ENST ID: ENST00000591032
  CDS Start-End: 115-522
gcgatctcttctgaggatccggcaagatggcagaagtagagcagaagaagaagcggaccttccgcaagttcacctaccgcggcgtggacctcgaccagctgctggacatgtcctatgcgtagggtctccccaggccgggccgctcacaaaactgcctggtgcatcctccccagcgagcagctgatgcagctgtacagtgcgcgccagcggcggcggctgaaccggggcctgcggcggaagcagcactccctgctgaagcgcctgcgcaaggccaagaaggaggcgccgcccatggagaagccggaagtggtgaagacgcacctgcgggacatgatcatcctacccgagatggtgggcagcatggtgggcgtctacaacggcaagaccttcaaccaggtggagatcaagcccgagatgatcggccactacctgggcgagttctccatcacctacaagcccgtaaagcatggccggcccggcatcggggccacccactcctcccgcttcatccctctcaagtaatggctcagctaataaaggcgcacatgac

SEQ ID NO: 176681 - DNA, 436 bp, Homo sapiens
  Payload ID: 14680
  Gene Symbol: RPS15
  Gene Name: ribosomal protein S15
  ENST ID: ENST00000586656
  CDS Start-End: 232-436
ctcttctgaggatccggcaagatggcagaagtagagcagaagaagaagcggaccttccgcaagttcacctaccgcggcgtggacctcgaccagctgctggacatgtcctaaggcctttggcccgagctgtacgctgcagcaccttgtctgaggctgtggtctccgggccgcttgttctctctgaatctctgcagtcacacggtggctcttgcatgtgagggcgagcagctgatgcagctgtacagtgcgcgccagcggcggcggctgaaccggggcctgcggcggaagcagcactccctgctgaagcgcctgcgcaaggccaagaaggaggcgccgcccatggagaagccggaagtggtgaagacgcacctgcgggacatgatcatcctacccgagatggtgggcagcatggtgggcgtctacaacggcaagacct

SEQ ID NO: 176682 - DNA, 338 bp, Homo sapiens
  Payload ID: 14680
  Gene Symbol: RPS15
  Gene Name: ribosomal protein S15
  ENST ID: ENST00000617694
  CDS Start-End: 318-338
caagatggcagaagtagagcagaagaagaagcggaccttccgcaagttcacctaccgcggcgtggacctcgaccagctgctggacatgtcctagttggtcttgaactcctgggctcaagcgaccctcccgcctcaacctcccgaagtgctgggatcacaggcgggagccactgcgccctacctgccttcccctgcgtttttagaggcctttggcccgagctgtacgctgcagcaccttgtctgaggctgtggtctccgggccgcttgttctctctgaatctctgcagtcacacggtggctcttgcatgtgagggctgatgcagctgtacagtgcgcgc

SEQ ID NO: 176683 - DNA, 2203 bp, Homo sapiens
  Payload ID: 14681
  Gene Symbol: RPS15A
  Gene Name: ribosomal protein S15a
  Uniprot ID: P62244
  ENST ID: ENST00000322989
  CDS Start-End: 97-489
ctctttccgccatctttccgcgccggtgagtagcactctctgagagctccaatttcatccgtctgccatcggcgccatcctgcaatctaagccacaatggtgcgcatgaatgtcctggcagatgctctcaagagtatcaacaatgccgaaaagagaggcaaacgccaggtgcttattaggccgtgctccaaagtcatcgtccggtttctcactgtgatgatgaagcatggttacattggcgaatttgaaatcattgatgaccacagagctgggaaaattgttgtgaacctcacaggcaggctaaacaagtgtggggtgatcagccccagatttgacgtgcaactcaaagacctggaaaaatggcagaataatctgcttccatcccgccagtttggtttcattgtactgacaacctcagctggcatcatggaccatgaagaagcaagacgaaaacacacaggagggaaaatcctgggattctttttctagggatgtaatacatatatttacaaataaaatgcctcatggactctggtgcttccacttggtcgttttgagcctttacagcagtgtagccacagcttctgcggcagcatgcagttgcttcgtttatcggtgaatgcgattccctgaagtgactaatacagccaagggaaaaagttcttatgaaaccagtatgcctaagaaacagtcacccctgctgtctgccaaaaccaggtatttgacactaaatattttagttgtatttcagtttttttttttttttttcttttttggagacagagtctgactctattgctcaggctggagtgcagtggcgcgatcttggcccactgcaacctccacctcccgggttcaagtgattgtcctgtctcagccgcctgagtaactgggattacaagtgtgtgtcgccacatccggctaatttttatattttagtagagacagggtttcgccatgttgcccaggctggtcttgagttctgggcctcaagtgatcagcctacctcggcctcccgaagtgctgggattacagccacgagccattacacctggcctatatttcagtattttctattagtttttgatgaatttgttttgcctggctaggattattctgtagataggattttagatctggcttttgtcactgactgctgtaataaatacttgctaggaatttttttttttttttttttttttttaagacaaagtcgctctgtcacacaggctggagtgcagtggcatgatcttggctcactgcacctccgcttcccagattcaagtagttctcgtgcctcagcctcctgagtagctgggattacaggtgtgtgccaccatgtctggctgatttttgtatttttagtagaggtggggtttcaccatgttggccaggctggtctcgaactcctgatctcaagtgatctgcctgccttggtctcccaaagtgctgggattacaggtgtgaccaccacgccctgccttaagaattgttccaagagaatctggtgccacttgcaggtgcccattgaagtgcaatgggcactgttgatcactgaggaggtagtgggtgctgacccggtgctggggcctgtcccctagtctctgctttgcccttggctagctaggtggtgtgccaagtggggagagaagctaccttattaaggggcatggatcagcttcctgaaaggagggcctgcctctgtaagatatgggaagtcgctgagaatgttacagaacggccctagagatggggcagataacggcccccatttgtgagaagtgagttgggaggcatgtttggggcctctgatgtttgggaggctgtgggtaattaacatgagttttggggtccagcagcagaattcaggtttcctcttccactcagtaacctcagcatccgtatctgtaatgggaatgatacaaaacctatccccaagttgagggaaaaatgagattgtgtaaagcgcacttggcacatgacagtcacaagcatggggacagtgagtccagaaggattttcttatgccagcattgtaagccctaggatcacagggctctggcttgtttaaccatcgtgtctctggtccctagcctgcaaacctggtgtgtagggatgcctcagtcgcttacatgttgattgagtgaatcgtcggtttctttctggacactgacttcaaaaataaaataggatatgaaaatgg

SEQ ID NO: 176684 - DNA, 525 bp, Homo sapiens
  Payload ID: 14681
  Gene Symbol: RPS15A
  Gene Name: ribosomal protein S15a
  Uniprot ID: P62244
  ENST ID: ENST00000563390
  CDS Start-End: 80-472
gcgatagctctcccgcttcccataactccgtgcgctctcccctcccgtcctctttccgccatctttccgcgccgccacaatggtgcgcatgaatgtcctggcagatgctctcaagagtatcaacaatgccgaaaagagaggcaaacgccaggtgcttattaggccgtgctccaaagtcatcgtccggtttctcactgtgatgatgaagcatggttacattggcgaatttgaaatcattgatgaccacagagctgggaaaattgttgtgaacctcacaggcaggctaaacaagtgtggggtgatcagccccagatttgacgtgcaactcaaagacctggaaaaatggcagaataatctgcttccatcccgccagtttggtttcattgtactgacaacctcagctggcatcatggaccatgaagaagcaagacgaaaacacacaggagggaaaatcctgggattctttttctagggatgtaatacatatatttacaaataaaatgcctcatggactctggtgcttcc

SEQ ID NO: 176685 - DNA, 427 bp, Homo sapiens
  Payload ID: 14681
  Gene Symbol: RPS15A
  Gene Name: ribosomal protein S15a
  ENST ID: ENST00000562935
  CDS Start-End: 31-183
ctctttccgccatctttccgcgccgccacaatggtgcgcatgaatgtcctggcagatgctctcaagagtatcaacaatgccgaaaagagaggcaaacgccaggtgcttattaggccgtgctccaaagtcatcgtccggtttctcactgtgatgatgaagcatgagctgggaaaattgttgtgaacctcacaggcaggctaaacaagtgtggggtgatcagccccagatttgacgtgcaactcaaagacctggaaaaatggcagaataatctgcttccatcccgccagtttggtttcattgtactgacaacctcagctggcatcatggaccatgaagaagcaagacgaaaacacacaggagggaaaatcctgggattctttttctagggatgtaatacatatatttacaaataaaatgcctcatggac

SEQ ID NO: 176686 - DNA, 481 bp, Homo sapiens
  Payload ID: 14681
  Gene Symbol: RPS15A
  Gene Name: ribosomal protein S15a
  ENST ID: ENST00000569365
  CDS Start-End: 31-180
ctctttccgccatctttccgcgccgccacaatggtgcgcatgaatgtcctggcagatgctctcaagagtatcaacaatgccgaaaagagaggcaaacgccaggtgcttattaggccgtgctccaaagtcatcgtccggtttctcactgtgatgatgaagcatgtcagttatcttttgtaggttacattggcgaatttgaaatcattgatgaccacagagctgggaaaattgttgtgaacctcacaggcaggctaaacaagtgtggggtgatcagccccagatttgacgtgcaactcaaagacctggaaaaatggcagaataatctgcttccatcccgccagtttggtttcattgtactgacaacctcagctggcatcatggaccatgaagaagcaagacgaaaacacacaggagggaaaatcctgggattctttttctagggatgtaatacatatatttacaaataaaatgcctcatggac

SEQ ID NO: 176687 - DNA, 284 bp, Homo sapiens
  Payload ID: 14681
  Gene Symbol: RPS15A
  Gene Name: ribosomal protein S15a
  ENST ID: ENST00000563579
  CDS Start-End: 1-176
agtgtggggtgatcagccccagatttgacgtgcaactcaaagacctggaaaaatggcagaataatctgcttccatcccgccagtttggaatttataccctccaaattatgcgtctggtgccttggttgaaagtattctcacttcatggttgctgtattacagtttcattgtactgacaacctcagctggcatcatggaccatgaagaagcaagacgaaaacacacaggagggaaaatcctgggattctttttctagggatgtaatacatatatttacaaataaa

SEQ ID NO: 176688 - DNA, 802 bp, Homo sapiens
  Payload ID: 14681
  Gene Symbol: RPS15A
  Gene Name: ribosomal protein S15a
  Uniprot ID: P62244
  ENST ID: ENST00000565420
  CDS Start-End: 370-762
ccatcctgcaatctaaggttcggtctcggtgtcctgcgaggaggctggtccccaccttggccgaggatcctggccttgccggttcctggacaggcatagaggagagccatggctgggcgccccagactgtgcactcaggggatcccggtccgtggggtgcaggccgcagcgcgggcgggagccggagccttcgactgcccagctaggcggtagctccggttcgggccgcagcgtctggatctccctttagtgctgaggcagcgccttggccccgggcggcgggcaacatcggggctggtgggccgtgcagcttctcactgctgcggccgcgctgggagcttgggaggctgaggccacccagcagccacaatggtgcgcatgaatgtcctggcagatgctctcaagagtatcaacaatgccgaaaagagaggcaaacgccaggtgcttattaggccgtgctccaaagtcatcgtccggtttctcactgtgatgatgaagcatggttacattggcgaatttgaaatcattgatgaccacagagctgggaaaattgttgtgaacctcacaggcaggctaaacaagtgtggggtgatcagccccagatttgacgtgcaactcaaagacctggaaaaatggcagaataatctgcttccatcccgccagtttggtttcattgtactgacaacctcagctggcatcatggaccatgaagaagcaagacgaaaacacacaggagggaaaatcctgggattctttttctagggatgtaatacatatatttacaaataaaatgcctcatgga

SEQ ID NO: 176689 - DNA, 797 bp, Homo sapiens
  Payload ID: 14681
  Gene Symbol: RPS15A
  Gene Name: ribosomal protein S15a
  Uniprot ID: P62244
  ENST ID: ENST00000572008
  CDS Start-End: 31-423
ctctttccgccatctttccgcgccgccacaatggtgcgcatgaatgtcctggcagatgctctcaagagtatcaacaatgccgaaaagagaggcaaacgccaggtgcttattaggccgtgctccaaagtcatcgtccggtttctcactgtgatgatgaagcatggttacattggcgaatttgaaatcattgatgaccacagagctgggaaaattgttgtgaacctcacaggcaggctaaacaagtgtggggtgatcagccccagatttgacgtgcaactcaaagacctggaaaaatggcagaataatctgcttccatcccgccagtttggtttcattgtactgacaacctcagctggcatcatggaccatgaagaagcaagacgaaaacacacaggagggaaaatcctgggattctttttctagggatgtaatacatatatttacaaataaaatgcctcatggactctggtgcttccacttggtcgttttgagcctttacagcagtgtagccacagcttctgcggcagcatgcagttgcttcgtttatcggtgaatgcgattccctgaaattcaagtagttctcgtgcctcagcctcctgagtagctgggattacaggtgtgtgccaccatgtctggctgatttttgtatttttagtagaggtggggtttcaccatgttggccaggctggtctcgaactcctgatctcaagtgatctgcctgccttggtctcccaaagtgctgggattacaggtgtgaccaccacgccctgccttaagaattgttccaagagaatctg

SEQ ID NO: 176690 - DNA, 589 bp, Homo sapiens
  Payload ID: 14681
  Gene Symbol: RPS15A
  Gene Name: ribosomal protein S15a
  ENST ID: ENST00000576008
  CDS Start-End: 59-394
ataactccgtgcgctctcccctcccgtcctctttccgccatctttccgcgccgccacaatggtgcgcatgaatgtcctggcagatgctctcaagagtatcaacaatgccgaaaagagaggcaaacgccaggtgcttattaggccgtgctccaaagtcatcgtccggtttctcactgtgatgatgaagcatggttacattggcgaatttgaaatcattgatgaccacagagctgggaaaattgttgtgaacctcacaggcaggctaaacaaggttggagtgcagtggcacgatcttggctactgcaacctctgtctcccaggttcaagcgattctcctgcctcagcctccctagtagctgagattacagtgtggggtgatcagccccagatttgacgtgcaactcaaagacctggaaaaatggcagaataatctgcttccatcccgccagtttggtttcattgtactgacaacctcagctggcatcatggaccatgaagaagcaagacgaaaacacacaggagggaaaatcctgggattctttttctagggatgtaatacatatatttacaaataaaatgcctcatggac

SEQ ID NO: 176691 - DNA, 2190 bp, Homo sapiens
  Payload ID: 14681
  Gene Symbol: RPS15A
  Gene Name: ribosomal protein S15a
  ENST ID: ENST00000576436
  CDS Start-End: 25-360
ttttgtcttccttgaacagccacaatggtgcgcatgaatgtcctggcagatgctctcaagagtatcaacaatgccgaaaagagaggcaaacgccaggtgcttattaggccgtgctccaaagtcatcgtccggtttctcactgtgatgatgaagcatggttacattggcgaatttgaaatcattgatgaccacagagctgggaaaattgttgtgaacctcacaggcaggctaaacaaggttggagtgcagtggcacgatcttggctactgcaacctctgtctcccaggttcaagcgattctcctgcctcagcctccctagtagctgagattacagtgtggggtgatcagccccagatttgacgtgcaactcaaagacctggaaaaatggcagaataatctgcttccatcccgccagtttgggtaagttggcctttccttaattaaaagaagttaatgctaagaatttctgtggtgcagtttgacttaagggtttttttctttttttctgtttaaaacaaagcagtggtaatttgtctactcttaaccattttgacctaatagctcaagtgttatccatatttcttttctctctctttaaaaagagacagggttggccaggcacagtggctcacgcctgtgatcctagcattttgggaggctgaggcaggcggatcacctgaggttgggagttcgagaccaccctgaccaacatggagaaccccgtgtctacctaaaatacaaaattagccaggcctggtggcacacacctgtgatcccagctacttgagaggctgaggcaggaaaatagcttgaacccgggagagaggttgcggtgagctgagattgtgccattgcactccagcctgggcaacgagtgaaactctgtctcgagaaaaaagagagagagacagggtttcactttgttgcccaggctggagtgcagtggctgttcacaggtgcggtcataacacgctacagccttggcttcttggcctcgagcagtcctccccgctcagcctcttgtggatttgggaatacaggcgcctgccaccgtgcctggctatttgccacatttcatgtgttgagcttcaggttctgagaggcacatgagagcttagactggcagaaaaggggggtcgtgtccactttcatgtctgcccttttggctcactgcagatagttccctgtgatcccagatgagggccagaatcagttctaagcctaggcctttgggaaaacttagtttgggagtctttgtccttaaaagcctatctgagttcaaacccttgtttttctgctttaaagccatgagatcttgggcaagtcacagccttgatttcttcatccgtaaaagtggtaatagttcctctgtttatcacctgatttaattttggtaaagcactttatgagctgacacagtaaatgtgtatctttgtggttaagaatttataccctccaaattatgcgtctggtgccttggttgaaagtattctcacttcatggttgctgtattacaggtacggtattctcaccaaaatcatttctctttgtaattatgatactgattttaatgccgcacatttgcatactatatgcttgttacagtgatccccacagtaactcatgaagcagccactcattgtacaaatgaacgtctccatataatagtttagctattatacagtacatggcagaaacacaattcaaactcaagtttatacgaatactttcaagtctccttacctgagagcagaaagtgacatttaaatttaaaggagttcccagcctttgttttcagtgcagtttgtttcatggtgtaggcagaagtcagggctgtgtgattgtgtggctgggctctctggatttggctctttgggttgcaggagtcatggctcatacgctacatgaggcaccagctcatgtaggcactgtcagttcctatgtgccccacaggaaagcgcccttaaccactgatgagtgttgatgtttttctgcactagaaggcactatgttgaactattaaacttaccagcactttctttttccactccatagtttcattgtactgacaacctcagctggcatcatggaccatgaagaagcaagacgaaaacacacaggagggaaaatcctgggattctttttctagggatgtaatacatatatttacaaataaaatgcctcatggac

SEQ ID NO: 176692 - DNA, 418 bp, Homo sapiens
  Payload ID: 14681
  Gene Symbol: RPS15A
  Gene Name: ribosomal protein S15a
  ENST ID: ENST00000574723
  CDS Start-End: 59-217
ataactccgtgcgctctcccctcccgtcctctttccgccatctttccgcgccgccacaatggtgcgcatgaatgtcctggcagatgctctcaagagtatcaacaatgccgaaaagagaggcaaacgccaggtgcttattaggccgtgctccaaagtcatcgtccggtttctcactgtgatgatgaagcatgtgtggggtgatcagccccagatttgacgtgcaactcaaagacctggaaaaatggcagaataatctgcttccatcccgccagtttggtttcattgtactgacaacctcagctggcatcatggaccatgaagaagcaagacgaaaacacacaggagggaaaatcctgggattctttttctagggatgtaatacatatatttacaaataaaatgcctcatggactctggt

SEQ ID NO: 176693 - DNA, 1022 bp, Homo sapiens
  Payload ID: 14681
  Gene Symbol: RPS15A
  Gene Name: ribosomal protein S15a
  ENST ID: ENST00000569083
  CDS Start-End: 7-309
gccacaatggtgcgcatgaatgtcctggcagatgctctcaagagtatcaacaatgccgaaaagagaggcaaacgccaggtgcttattaggccgtgctccaaagtcatcgtccggtttctcactgtgatgatgaagcatggttacattggcgaatttgaaatcattgatgaccacagagctgggaaaattgttgtgaacctcacaggcaggctaaacaagtgtggggtgatcagccccagatttgacgtgcaactcaaagacctggaaaaatggcagaataatctgcttccatcccgccagtttgggtaagttggcctttccttaattaaaagaagttaatgctaagaatttctgtggtgcagtttgacttaagggtttttttctttttttctgtttaaaacaaagcagtggtaatttgtctactcttaaccattttgacctaatagctcaagtgttatccatatttcttttctctctctttaaaaagagacagggttggccaggcacagtggctcacgcctgtgatcctagcattttgggaggctgaggcaggcggatcacctgaggttgggagttcgagaccaccctgaccaacatggagaaccccgtgtctacctaaaatacaaaattagccaggcctggtggcacacacctgtgatcccagctacttgagaggctgaggcaggaaaatagcttgaacccgggagagaggttgcggtgagctgagattgtgccattgcactccagcctgggcaacgagtgaaactctgtctcgagaaaaaagagagagagacagggtttcactttgttgcccaggctggagtgcagtggctgttcacaggtgcggtcataacacgctacagccttggcttcttggcctcgagcagtcctccccgctcagcctcttgtggatttgggaatacaggcgcctgccaccgtgcctggctatttgccacatttcatgtgttgagcttcaggttctgagaggcacatgagagcttagactggcagaaaaggggggt

SEQ ID NO: 176694 - DNA, 560 bp, Homo sapiens
  Payload ID: 14682
  Gene Symbol: RPS16
  Gene Name: ribosomal protein S16
  Uniprot ID: P62249
  ENST ID: ENST00000251453
  CDS Start-End: 54-494
cttttccggttgcggcgccgcgcggtgaggttgtctagtccacgctcggagccatgccgtccaagggcccgctgcagtctgtgcaggtcttcggacgcaagaagacagcgacagctgtggcgcactgcaaacgcggcaatggtctcatcaaggtgaacgggcggcccctggagatgattgagccgcgcacgctacagtacaagctgctggagccagttctgcttctcggcaaggagcgatttgctggtgtagacatccgtgtccgtgtaaagggtggtggtcacgtggcccagatttatgctatccgtcagtccatctccaaagccctggtggcctattaccagaaatatgtggatgaggcttccaagaaggagatcaaagacatcctcatccagtatgaccggaccctgctggtagctgaccctcgtcgctgcgagtccaaaaagtttggaggccctggtgcccgcgctcgctaccagaaatcctaccgataagcccatcgtgactcaaaactcacttgtataataaacagtttttgagggattttaaagtttcaagaa

SEQ ID NO: 176695 - DNA, 643 bp, Homo sapiens
  Payload ID: 14682
  Gene Symbol: RPS16
  Gene Name: ribosomal protein S16
  ENST ID: ENST00000339471
  CDS Start-End: 42-500
cggcgccgcgcggtgaggttgtctagtccacgctcggagccatgccgtccaagggcccgctgcagtctgtgcaggtcttcggacgcaagaagacagcgacagctgtggcgcactgcaaacgcggcaatggtctcatcaaggtgaacgggcggcccctggagatgattgagccgcgcacgctacagtacaagctgctggagccagttctgcttctcggcaaggagcgatttgctggtgtagacatccgtgtccgtgtaaagggtggtggtcacgtggcccagatttatggtgagtcccaggaactgggcgcatggaggaggtggctctgggagggaggccttcacagcgctcctgtaccctttaattgtgtgtctttctcacagctatccgtcagtccatctccaaagccctggtggcctattaccagaaatatgtggatgaggcttccaagaaggagatcaaagacatcctcatccagtatgaccggaccctgctggtagctgaccctcgtcgctgcgagtccaaaaagtttggaggccctggtgcccgcgctcgctaccagaaatcctaccgataagcccatcgtgactcaaaactcacttgtataataaacagtttttgagggattttaaagtttcaagaa

SEQ ID NO: 176696 - DNA, 444 bp, Homo sapiens
  Payload ID: 14682
  Gene Symbol: RPS16
  Gene Name: ribosomal protein S16
  ENST ID: ENST00000602153
  CDS Start-End: 1-153
ctgctggagccagttctgcttctcggcaaggagcgatttgctggtgtagacatccgtgtccgtgtaaagggtggtggtcacgtggcccagatttatgctatccgtcagtccatctccaaagccctggtggcctattaccagaaatgtgagtgagcatgggtccttcccatgaggtagatgggtgtgtggggatcaagtcaaggactctgtgtgattatctaaatcctcgtccctgctcttcttgccagatgtggatgaggcttccaagaaggagatcaaagacatcctcatccagtatgaccggaccctgctggtagctgaccctcgtcgctgcgagtccaaaaagtttggaggccctggtgcccgcgctcgctaccagaaatcctaccgataagcccatcgtgactcaaaactcacttgtataataaacagtttttgagggat

SEQ ID NO: 176697 - DNA, 407 bp, Homo sapiens
  Payload ID: 14682
  Gene Symbol: RPS16
  Gene Name: ribosomal protein S16
  ENST ID: ENST00000599705
  CDS Start-End: 1-258
acagcgacagctgtggcgcactgcaaacgcggcaatggtctcatcaaggtgaacgggcggcccctggagatgattgagccgcgcacgctacagtacaagctgctggagccagttctgcttctcggcaaggagcgatttgctggtgtagacatccgtgtccgtgtaaagggtggtggtcacgtggcccagatttatgctatccgtcagtccatctccaaagccctggtggcctattaccagaaatgtgaatgtggatgaggcttccaagaaggagatcaaagacatcctcatccagtatgaccggaccctgctggtagctgaccctcgtcgctgcgagtccaaaaagtttggaggccctggtgcccgcgctcgctaccagaaatcctaccgataagcccatcgtgact

SEQ ID NO: 176698 - DNA, 492 bp, Homo sapiens
  Payload ID: 14682
  Gene Symbol: RPS16
  Gene Name: ribosomal protein S16
  ENST ID: ENST00000601655
  CDS Start-End: 47-436
ggttgcggcgccgcgcggtgaggttgtctagtccacgctcggagccatgccgtccaagggcccgctgcagtctgtgcaggtcttcggacgcaagaagacagcgacagctgtggcgcactgcaaacgcggcaatggtctcatcaagctgctggagccagttctgcttctcggcaaggagcgatttgctggtgtagacatccgtgtccgtgtaaagggtggtggtcacgtggcccagatttatgctatccgtcagtccatctccaaagccctggtggcctattaccagaaatatgtggatgaggcttccaagaaggagatcaaagacatcctcatccagtatgaccggaccctgctggtagctgaccctcgtcgctgcgagtccaaaaagtttggaggccctggtgcccgcgctcgctaccagaaatcctaccgataagcccatcgtgactcaaaactcacttgtataataaacagtttttgagggattttaaa

SEQ ID NO: 176699 - DNA, 555 bp, Homo sapiens
  Payload ID: 14682
  Gene Symbol: RPS16
  Gene Name: ribosomal protein S16
  ENST ID: ENST00000599539
  CDS Start-End: 21-323
tctagtccacgctcggagccatgccgtccaagggcccgctgcagtctgtgcaggtcttcggacgcaagaagacagcgacagctgtggcgcactgcaaacgcggcaatggtctcatcaaggtgaacgggcggcccctggagatgattgagccgcgcacgctacagtacaagctgctggagccagttctgcttctcggcaaggagcgatttgctggtgtagacatccgtgtccgtgtaaagggtggtggtcacgtggcccagatttatgctatccgtcagtccatctccaaagccctggtggcctattaccagaaatgtgagtgagcatgggtccttcccatgagatgtggatgaggcttccaagaaggagatcaaagacatcctcatccagtatgaccggaccctgctggtagctgaccctcgtcgctgcgagtccaaaaagtttggaggccctggtgcccgcgctcgctaccagaaatcctaccgataagcccatcgtgactcaaaactcacttgtataataaacagtttttgagggattttaaagtttcaagaa

SEQ ID NO: 176700 - DNA, 592 bp, Homo sapiens
  Payload ID: 14683
  Gene Symbol: RPS17
  Gene Name: ribosomal protein S17
  Uniprot ID: P08708
  ENST ID: ENST00000330244
  CDS Start-End: 137-544
actccgccagggggcgctgtgtggctcccgagtaggctcagagcgaccgtggccgggcggaagcggctttctggcctaagctttaacaggcttcgcctgtgcttcctgtttcctcttttaccaaggacccgccaacatgggccgcgttcgcaccaaaaccgtgaagaaggcggcccgggtcatcatagaaaagtactacacgcgcctgggcaacgacttccacacgaacaagcgcgtgtgcgaggagatcgccattatccccagcaaaaagctccgcaacaagatagcaggttatgtcacgcatctgatgaagcgaattcagagaggcccagtaagaggtatctccatcaagctgcaggaggaggagagagaaaggagagacaattatgttcctgaggtctcagccttggatcaggagattattgaagtagatcctgacactaaggaaatgctgaagcttttggacttcggcagtctgtccaaccttcaggtcactcagcctacagttgggatgaatttcaaaacgcctcggggacctgtttgaattttttctgtagtgctgtattattttcaataaatctgggacaacagc

SEQ ID NO: 176701 - DNA, 583 bp, Homo sapiens
  Payload ID: 14683
  Gene Symbol: RPS17
  Gene Name: ribosomal protein S17
  ENST ID: ENST00000558397
  CDS Start-End: 10-583
cccgccaacatgggccgcgttcgcaccaaaaccgtgaagaaggcggcccgggtcatcatagaaaagtactacacgcgcctgggcaacgacttccacacgaacaagcgcgtgtgcgaggagatcgccattatccccagcaaaaagctccgcaacaagatagcaggttatgtcacgcatctgatgaagcgaattcagagaggcccagtaagaggtatctccatcaagctgcaggaggaggagagagaaaggagagacaattatgttcctgaggtctcagccttggatcaggagattattgaagtagatcctgacactaaggaaatgctgaagcttttgctggcttacgttgccccctttgtgtcagccctggctgaatctgcctgcttttcttctgtgaaggcattcctttggtgtctccatgctaaccactcagaaatgagctttggtccatttccaggacttcggcagtctgtccaaccttcaggtcactcagcctacagttgggatgaatttcaaaacgcctcggggacctgtttgaattttttctgtagtgctgtattattttcaataaatctgggacaac

SEQ ID NO: 176702 - DNA, 522 bp, Homo sapiens
  Payload ID: 14683
  Gene Symbol: RPS17
  Gene Name: ribosomal protein S17
  ENST ID: ENST00000561068
  CDS Start-End: 1-179
gccgcgttcgcaccaaaaccgtgaagaaggcggcccgggtcatcatagaaaagtactacacgcgcctgggcaacgacttccacacgaacaagcgcgtgtgcgaggagatcgccattatccccagcaaaaagctccgcaacaagatagcaggttgcagttactgttcgagagatttataggcatatggcctggaagaatagtgccaaagtcaacgtattaattgccaattatgtcacgcatctgatgaagcgaattcagagaggcccagtaagaggtatctccatcaagctgcaggaggaggagagagaaaggagagacaattatgttcctgaggtctcagccttggatcaggagattattgaagtagatcctgacactaaggaaatgctgaagcttttggacttcggcagtctgtccaaccttcaggtcactcagcctacagttgggatgaatttcaaaacgcctcggggacctgtttgaattttttctgtagtgctgtattattttcaataaatctgggac

SEQ ID NO: 176703 - DNA, 1909 bp, Homo sapiens
  Payload ID: 14683
  Gene Symbol: RPS17
  Gene Name: ribosomal protein S17
  ENST ID: ENST00000561157
  CDS Start-End: 32-442
ctgtttcctcttttaccaaggacccgccaacatgggccgcgttcgcaccaaaaccgtgaagaaggcggcccgggtcatcatagaaaagtactacacgcgcctgggcaacgacttccacacgaacaagcgcgtgtgcgaggagatcgccattatccccagcaaaaagctccgcaacaagatagcaggttatgtcacgcatctgatgaagcgaattcagagaggcccagtaagaggtatctccatcaagctgcaggaggaggagagagaaaggagagacaattatgttcctgaggtctcagccttggatcaggagattattgaagtagatcctgacactaaggaaatgctgaagcttttggtaagtgtttgctggattcctaaagtggtattttcctggtcaaaaaccatcagtaggtcttattatccaaggtcacccagctagtaagtggcagagttgggaatcccatctaaacttgtagccactaaactggactgctttcataaggggtgtagcggaagttgtgtgcattgagttagttcgccacaagatcatgattcccaaatctagtggcttccaggacaccttttctctcttggctgcttctgttcttggttttatagctggcttacgttgccccctttgtgtcagccctggctgaatctgcctgcttttcttctgtgaaggcattcctttggtgtctccatgctaaccactcagaaatgagctttggtccatttccaggtacatacaaggcactacttaggtagttcacgagtatcttcattgcactttgatgttttttctatggcttatcttagtccttttgcatacttgggtgaaagcatgggcttcatgggcggttggtgattttgaacaacttcatttttcctatttttatggtcattaaatgtttaagacactcaaaaaggtagtagcaaaatgaactcacatgtactttcccagcttcagaaaaacatcaccagtacagctacagccccgctgtgggtcttttcttcctgaaataaccactgcgctgaatgcagcatttttgttgaaactaaaatgggtttctgaggaccaaataggacatggagttccaggtataagttgggcccttggcttcttgccctgcctaccagcctgaacttgtttgagggcagggtctgctcttgcctccctcccttctgcttgatgccttgtgtacttgggcccttcacaaatgttgattagattagtaatagctcttacccagggctggtcctggaaagcaagtggcactgtgtattctcaaagggacagagttttgctttagaggacatttggcaatgtccagacacatttttcgttctcatagccaggggatacctgctaacttctaaggggtagaggccaaggatgttgctaaactttctgcaatacacagtacagctgcctataacaaagaatgtccagcccaggatgtctacgttgccaagattgagaaacggtgttttagagtgattgataggaaggggttgtgaaaacagatacaaatggcatggtacattgggtaaaagtcatagagttgtaaatggggataccacatggtcaggtgtgtgttgaaggaagatcactctggaaaagtgggaggcattgagaaccctgttggctcttaaagggtccttcaggtcgcctctggacccccttgagagtgctgtggctctaggggcctgtgttttcttctggggtccactcacagatctcaccagtaactgctcactgaatccattttctcgttccaggacttcggcagtctgtccaaccttcaggtcactcagcctacagttgggatgaatttcaaaacgcctcggggacctgtttgaattttttctgtagtgctgtattattttcaataaatctgggacaaca

SEQ ID NO: 176704 - DNA, 592 bp, Homo sapiens; identical to SEQ ID NO: 176700
  Payload ID: 14683
  Gene Symbol: RPS17
  Gene Name: ribosomal protein S17
  Uniprot ID: P08708
  ENST ID: ENST00000617731
  CDS Start-End: 137-544

SEQ ID NO: 176705 - DNA, 522 bp, Homo sapiens; identical to SEQ ID NO: 176702
  Payload ID: 14683
  Gene Symbol: RPS17
  Gene Name: ribosomal protein S17
  ENST ID: ENST00000632799
  CDS Start-End: 1-179

SEQ ID NO: 176706 - DNA, 1909 bp, Homo sapiens; identical to SEQ ID NO: 176703
  Payload ID: 14683
  Gene Symbol: RPS17
  Gene Name: ribosomal protein S17
  ENST ID: ENST00000632419
  CDS Start-End: 32-442

SEQ ID NO: 176707 - DNA, 613 bp, Homo sapiens
  Payload ID: 14684
  Gene Symbol: RPS18
  Gene Name: ribosomal protein S18
  Uniprot ID: P62269
  ENST ID: ENST00000211372
  CDS Start-End: 111-569
cttctcctagatcgcaccgcctcttcctcctggaagctatataatgatatcgcgtcacttccgctctctcttccacaggaggcctacacgccgccgcttgtgctgcagccatgtctctagtgatccctgaaaagttccagcatattttgcgagtactcaacaccaacatcgatgggcggcggaaaatagcctttgccatcactgccattaagggtgtgggccgaagatatgctcatgtggtgttgaggaaagcagacattgacctcaccaagagggcgggagaactcactgaggatgaggtggaacgtgtgatcaccattatgcagaatccacgccagtacaagatcccagactggttcttgaacagacagaaggatgtaaaggatggaaaatacagccaggtcctagccaatggtctggacaacaagctccgtgaagacctggagcgactgaagaagattcgggcccatagagggctgcgtcacttctggggccttcgtgtccgaggccagcacaccaagaccactggccgccgtggccgcaccgtgggtgtgtccaagaagaaataagtctgtaggccttgtctgttaataaatagtttatatacctatgg

SEQ ID NO: 176708 - DNA, 212 bp, Homo sapiens
  Payload ID: 14684
  Gene Symbol: RPS18
  Gene Name: ribosomal protein S18
  ENST ID: ENST00000440980
  CDS Start-End: 111-212
cttctcctagatcgcaccgcctcttcctcctggaagctatataatgatatcgcgtcacttccgctctctcttccacaggaggcctacacgccgccgcttgtgctgcagccatgtctctagtgatccctgaaaagttccagcatattttgcgagtactcaacaccaacatcgatgggcggcggaaaatagcctttgccatcactgccattaag

SEQ ID NO: 176709 - DNA, 613 bp, Homo sapiens; identical to SEQ ID NO: 176707
  Payload ID: 14684
  Gene Symbol: RPS18
  Gene Name: ribosomal protein S18
  Uniprot ID: P62269
  ENST ID: ENST00000439602
  CDS Start-End: 111-569

SEQ ID NO: 176710 - DNA, 613 bp, Homo sapiens; identical to SEQ ID NO: 176707
  Payload ID: 14684
  Gene Symbol: RPS18
  Gene Name: ribosomal protein S18
  Uniprot ID: P62269
  ENST ID: ENST00000434122
  CDS Start-End: 111-569

SEQ ID NO: 176711 - DNA, 613 bp, Homo sapiens; identical to SEQ ID NO: 176707
  Payload ID: 14684
  Gene Symbol: RPS18
  Gene Name: ribosomal protein S18
  Uniprot ID: P62269
  ENST ID: ENST00000457341
  CDS Start-End: 111-569

SEQ ID NO: 176712 - DNA, 613 bp, Homo sapiens; identical to SEQ ID NO: 176707
  Payload ID: 14684
  Gene Symbol: RPS18
  Gene Name: ribosomal protein S18
  Uniprot ID: P62269
  ENST ID: ENST00000454021
  CDS Start-End: 111-569

SEQ ID NO: 176713 - DNA, 685 bp, Homo sapiens
  Payload ID: 14684
  Gene Symbol: RPS18
  Gene Name: ribosomal protein S18
  ENST ID: ENST00000484321
  CDS Start-End: 393-641
cacgccgccgcttgtgctgcagccatgtctctagtgatccctgaaaagttccagcatattttgcgagtactcaacaccaacatcgatgggcggcggaaaatagcctttgccatcactgccattaagtagagacagggtttcaccatgttggccaggctggttttgaactcctgccctcaatgtcatctgcccacttgggcctcccaaagtgctgggattacaggcgtgagccactgcgaccggcccaaagttaaccttctgtcgaacggtttatatctggaaagggtgtgggccgaagatatgctcatgtggtgttgaggaaagcagacattgacctcaccaagagggcgggagaactcactgaggatgaggtggaacgtgtgatcaccattatgcagaatccacgccagtacaagatcccagactggttcttgaacagacagaaggatgtaaaggatggaaaatacagccaggtcctagccaatggtctggacaacaagctccgtgaagacctggagcgactgaagaagattcgggcccatagagggctgcgtcacttctggggccttcgtgtccgaggccagcacaccaagaccactggccgccgtggccgcaccgtgggtgtgtccaagaagaaataagtctgtaggccttgtctgttaataaatagtttatatacctatgg

SEQ ID NO: 176714 - DNA, 685 bp, Homo sapiens; identical to SEQ ID NO: 176713
  Payload ID: 14684
  Gene Symbol: RPS18
  Gene Name: ribosomal protein S18
  ENST ID: ENST00000476288
  CDS Start-End: 393-641

SEQ ID NO: 176715 - DNA, 685 bp, Homo sapiens; identical to SEQ ID NO: 176713
  Payload ID: 14684
  Gene Symbol: RPS18
  Gene Name: ribosomal protein S18
  ENST ID: ENST00000494232
  CDS Start-End: 393-641

SEQ ID NO: 176716 - DNA, 589 bp, Homo sapiens
  Payload ID: 14684
  Gene Symbol: RPS18
  Gene Name: ribosomal protein S18
  ENST ID: ENST00000486781
  CDS Start-End: 297-545
ctctcttccacaggaggcctacacgccgccgcttgtgctgcagccatgtttactgtgtctgatttcttcccccgtactttttcaactagtctctagtgatccctgaaaagttccagcatattttgcgagtactcaacaccaacatcgatgggcggcggaaaatagcctttgccatcactgccattaagggtgtgggccgaagatatgctcatgtggtgttgaggaaagcagacattgacctcaccaagagggcgggagaactcactgaggatgaggtggaacgtgtgatcaccattatgcagaatccacgccagtacaagatcccagactggttcttgaacagacagaaggatgtaaaggatggaaaatacagccaggtcctagccaatggtctggacaacaagctccgtgaagacctggagcgactgaagaagattcgggcccatagagggctgcgtcacttctggggccttcgtgtccgaggccagcacaccaagaccactggccgccgtggccgcaccgtgggtgtgtccaagaagaaataagtctgtaggccttgtctgttaataaatagtttatatacctatgg

SEQ ID NO: 176717 - DNA, 589 bp, Homo sapiens; identical to SEQ ID NO: 176716
  Payload ID: 14684
  Gene Symbol: RPS18
  Gene Name: ribosomal protein S18
  ENST ID: ENST00000474973
  CDS Start-End: 297-545

SEQ ID NO: 176718 - DNA, 654 bp, Homo sapiens
  Payload ID: 14684
  Gene Symbol: RPS18
  Gene Name: ribosomal protein S18
  ENST ID: ENST00000477055
  CDS Start-End: 362-610
cttctcctagatcgcaccgcctcttcctcctggaagctatataatgatatcgcgtcacttccgctctctcttccacaggaggcctacacgccgccgcttgtgctgcagccatgtttactgtgtctgatttcttcccccgtactttttcaactagtctctagtgatccctgaaaagttccagcatattttgcgagtactcaacaccaacatcgatgggcggcggaaaatagcctttgccatcactgccattaagggtgtgggccgaagatatgctcatgtggtgttgaggaaagcagacattgacctcaccaagagggcgggagaactcactgaggatgaggtggaacgtgtgatcaccattatgcagaatccacgccagtacaagatcccagactggttcttgaacagacagaaggatgtaaaggatggaaaatacagccaggtcctagccaatggtctggacaacaagctccgtgaagacctggagcgactgaagaagattcgggcccatagagggctgcgtcacttctggggccttcgtgtccgaggccagcacaccaagaccactggccgccgtggccgcaccgtgggtgtgtccaagaagaaataagtctgtaggccttgtctgttaataaatagtttatatacctatgg

SEQ ID NO: 176719 - DNA, 99 bp, Homo sapiens
  Payload ID: 14684
  Gene Symbol: RPS18
  Gene Name: ribosomal protein S18
  ENST ID: ENST00000630000
  CDS Start-End: 1-99
tctctagtgatccctgaaaagttccagcatattttgcgagtactcaacaccaacatcgatgggcggcggaaaatagcctttgccatcactgccattaag

SEQ ID NO: 176720 - DNA, 500 bp, Homo sapiens
  Payload ID: 14685
  Gene Symbol: RPS19
  Gene Name: ribosomal protein S19
  ENST ID: ENST00000221975
  CDS Start-End: 246-461
ctttcccctggctggcagcgcggaggccgcacgttactgtaaaagacgtgaaccagcaggagttcgtcagagctctggcagccttcctcaaaaagtccgggaagctgaaagtccccgaatgggtggataccgtcaagctggccaagcacaaagagcttgctccctacgatgagaactggttctacacgcgagctgcttccacagcgcggcacctgtacctccggggtggcgctggggttggctccatgaccaagatctatgggggacgtcagagaaacggcgtcatgcccagccacttcagccgaggctccaagagtgtggcccgccgggtcctccaagccctggaggggctgaaaatggtggaaaaggaccaagatggcggccgcaaactgacacctcagggacaaagagatctggacagaatcgccggacaggtggcagctgccaacaagaagcattagaacaaaccatgctgggttaataaattgcctcattcgtaa

SEQ ID NO: 176721 - DNA, 420 bp, Homo sapiens
  Payload ID: 14685
  Gene Symbol: RPS19
  Gene Name: ribosomal protein S19
  ENST ID: ENST00000600467
  CDS Start-End: 192-420
ccctttcccctggctggcagcgcggaggccgcacggtaagcgggggctccgagctggaccgggcgcgaggcggcagggccggacgccgaagcctcagagcgcgtgcctgagggccccgaggcgcccggcgcgggcccgtcccgccccctagagccgcggccacgtgcgagcggcaggcccggacatgcccgatgcctggagttactgtaaaagacgtgaaccagcaggagttcgtcagagctctggcagccttcctcaaaaagtccgggaagctgaaagtccccgaatgggtggataccgtcaagctggccaagcacaaagagcttgctccctacgatgagaactggttctacacgcgagctgcttccacagcgcggcacctgtacctccggggtggcgctggggttggctccatgacca

SEQ ID NO: 176722 - DNA, 307 bp, Homo sapiens
  Payload ID: 14685
  Gene Symbol: RPS19
  Gene Name: ribosomal protein S19
  ENST ID: ENST00000598261
  CDS Start-End: 7-307
cctcagatgcctggagttactgtaaaagacgtgaaccagcaggagttcgtcagagctctggcagccttcctcaaaaagtccgggaagctgaaagtccccgaatgggtggataccgtcaagctggccaagcacaaagagcttgctccctacgatgagaactggttctacacgcgagctggtgaggaacttagcttccacagcgcggcacctgtacctccggggtggcgctggggttggctccatgaccaagatctatgggggacgtcagagaaacggcgtcatgcccagccacttcagccgaggctcc

SEQ ID NO: 176723 - DNA, 526 bp, Homo sapiens
  Payload ID: 14685
  Gene Symbol: RPS19
  Gene Name: ribosomal protein S19
  Uniprot ID: P39019
  ENST ID: ENST00000593863
  CDS Start-End: 50-487
gtcagcgccgtccgggaaccgagcgtgggccccggggggcagcggcgggatgcctggagttactgtaaaagacgtgaaccagcaggagttcgtcagagctctggcagccttcctcaaaaagtccgggaagctgaaagtccccgaatgggtggataccgtcaagctggccaagcacaaagagcttgctccctacgatgagaactggttctacacgcgagctgcttccacagcgcggcacctgtacctccggggtggcgctggggttggctccatgaccaagatctatgggggacgtcagagaaacggcgtcatgcccagccacttcagccgaggctccaagagtgtggcccgccgggtcctccaagccctggaggggctgaaaatggtggaaaaggaccaagatggcggccgcaaactgacacctcagggacaaagagatctggacagaatcgccggacaggtggcagctgccaacaagaagcattagaacaaaccatgctgggttaataaattgcctcattcgtaa

SEQ ID NO: 176724 - DNA, 2359 bp, Homo sapiens
  Payload ID: 14685
  Gene Symbol: RPS19
  Gene Name: ribosomal protein S19
  Uniprot ID: P39019
  ENST ID: ENST00000598742
  CDS Start-End: 373-810
gtactttcgccatcatagtattctccaccactgttccttccagccacgaacgacgcaaacgaagccaagttcccccagctccgaacaggagctctctatcctctctctattacactccgggagaaggaaacgcgggaggaaacccaggcctccacgcgcgaccccttggccctcccctttacctctccacccctcactagacaccctcccctctaggcggggacgaactttcgccctgagagaggcggagcctcagcgtctaccctcgctctcgcgagctttcggaactctcgcgagaccctacgcccgacttgtgcgcccgggaaaccccgtcgttccctttcccctggctggcagcgcggaggccgcacgatgcctggagttactgtaaaagacgtgaaccagcaggagttcgtcagagctctggcagccttcctcaaaaagtccgggaagctgaaagtccccgaatgggtggataccgtcaagctggccaagcacaaagagcttgctccctacgatgagaactggttctacacgcgagctgcttccacagcgcggcacctgtacctccggggtggcgctggggttggctccatgaccaagatctatgggggacgtcagagaaacggcgtcatgcccagccacttcagccgaggctccaagagtgtggcccgccgggtcctccaagccctggaggggctgaaaatggtggaaaaggaccaagatggcggccgcaaactgacacctcagggacaaagagatctggacagaatcgccggacaggtggcagctgccaacaagaagcattagaacaaaccatgctgggttaataaattgcctcattcgtaatcctggtctgggtctcttttttgagtctcttgctctgtcgcccaggctggagtgcagtggcgccatctcagctcactgcaatctccgccttctgggttcaaatgattctcctgcctcagcctcccaaagtgctgggattacaagtgtgagccactgtgcctggtctggtttgggtctcttgattgttcttcaggggcatgaggaagaggcgcttcctcccttcccttgggtgagggggcccagggtgattgggtggctgtttacccggcagccagtcgggccttcccaggtcaaacagttcccatctgggtttggaggaaggacccaggggcccttgtggctcactcccccacatcctgtctttgcaattgtcagaaagtgagaaacgaaaggatggctgtgagctgtgacctcagctgggcctgggctgcagaggtggcttccgctggagtaaagcaagagggcccagggttcatgctcttccctggaaggtagaaaaggacagaccaccagggagcctccaccgcaaactgacctgtgctgcctacacactaactttcctgggcctggggcctgcacaggctgaatggtccttgagccttcactctgcatctgagcggtcttgggcccgctgagtggcagtggcaggaagtcggtggaagcagatccctgtgcagaagttgaattaccagggcggccacacacgggctgcacaacctttgcagtcgtgcacggcaagtgggatgtggcctccgcccatgattgggcacctggtcaggctgggagatccaaatagcacccagtgggcagctgtccgacccctggaggggcaagccaggaaagaaacttagggcccgctgtgaccagatgtccctcccagttgggaagactaaactggtttggccaatatctcccaggattcccctgtccaaattattcctgggatctgacccatttcctggaaaggggcgagcctgggttttgaagttcaaactagagtttaaatcacaactctgcccctaatcccacgtaaccctgtgcaccttatcctctgagccttcgtctcctcgtgtgtaagcctgctaactcctgagagactggacaagatgccgtggagagccttggctctgagtagctctgctgctggacagttcagttggcagtccccaaacgtaaggcgtaagagtttaagaagtatcggccaggcacagtggctcacacctgtaatctcaacactttgggaggccgagacgggctgatcacctgaggttgggagcttgagaacagcctgaccaacatggagaaaccctgtctctaaaaataccaaaattagttgggcatggtggcgcgcacctgtaatcccagctactcaggaggctgaggcagaagaatcgctcgaaccccggaggcggaggttgcagtgggttgagatcgagcaattgcaatccagcctgggcaacagagcgagactccatttcaaaaaaagaatcaataaaaatgttaaaagcac

SEQ ID NO: 176725 - DNA, 342 bp, Homo sapiens
  Payload ID: 14685
  Gene Symbol: RPS19
  Gene Name: ribosomal protein S19
  ENST ID: ENST00000601492
  CDS Start-End: 36-342
ccctttcccctggctggcagcgcggaggccgcacgatgcctggagttactgtaaaagacgtgaaccagcaggagttcgtcagagctctggcagccttcctcaaaaagtccgggaagctgaaagtccccgaatgggtggataccgtcaagctggccaagcacaaagagcttgctccctacgatgagaactggttctacacgcgagctggtggtttaatcctttctatatacacggaggcagactccctgggtttggatccatcttttacatctggctgtgtgtcctctgcttccacagcgcggcacctgtacctccggggtggcgctggggttggctccatga

SEQ ID NO: 176726 - DNA, 1172 bp, Homo sapiens
  Payload ID: 14685
  Gene Symbol: RPS19
  Gene Name: ribosomal protein S19
  ENST ID: ENST00000598399
  CDS Start-End: 1-216
cctggagttactgtaaaagacgtgaaccagcaggagttcgtcagagctctggcagccttcctcaaaaagtccgggaagctgaaagtccccgaatgggtggataccgtcaagctggccaagcacaaagagcttgctccctacgatgagaactggttctacacgcgagctgagttgcactgtcaccaggctggagtacactggtgccgtctcggctaactgcaacctctgcctgccgggttcaagcaattctcctacctcagcctcccaagtacctgggactacaggacctgctgaagatggagatgtgggagtccagtttggtgtcctggtgtgcgtctgagagcagctgctgaattgggatgtctggaaacacttcttgtaggttggaggctgctccatctctggctcctgcatggggctgggcacccacttgtgctatgatagtagaaagaatgagatctgggaggcatcacagaagtgagttaagggatgaatcaaggtcaggagagtggtttcttacaagttcggcagagaagggtcagctagagtgtgctggggaagttcttccctgcctttgactcagtaggtcaggatgggaccaccggtctggactttgctgagctgtgatgactcctaaggagccgtgcttggttggtctgccccgtgctcagatccagagggaccctccctctcggtctagcaggaacacagctgccctcccttgaccatgaactcacagtagagtggagaggggtggcctcctttacagttccaggtagggggtgattcctggacaggggttcctgagaggagtgggttgccatcccaagaatgcacacagcagaggagcagaaggcctctagcatggaggaactggaggagaacccatttgtgacagcaacttgctcgcaattggccctcatgagtaccagctacggcggtctgcatttgtgcagctccacatcaaaagctggggctggaaccttggtctccagggggtgaggaaaaagcttccacagcgcggcacctgtacctccggggtggcgctggggttggctccatgaccaagatctatgggggacgtcagagaaacggcgtcatgcccagccacttcagccgaggctccaagagtgtggcccgccgggtcctccaagccctggaggggctgaaaa

SEQ ID NO: 176727 - DNA, 927 bp, Homo sapiens
  Payload ID: 14686
  Gene Symbol: RPS19BP1
  Gene Name: ribosomal protein S19 binding protein 1
  Uniprot ID: Q86WX3
  ENST ID: ENST00000334678
  CDS Start-End: 118-528
ggcacttccgcccatccccctccggatccctctgttcgggctcgggtttccgccgagacgacagggactgccaggtcggaagtagtgtgaggctcgtgggcggagccaagcgccgccatgtccgccgccctgctgcggcggggcctggagctgctggcggcgtccgaggccccccgggaccctccaggtcaggccaagccgagaggggctccggtgaaacggccccggaagacgaaggcaattcaggcccagaaactgcggaactcggccaagggaaaggtgcccaagtcggcactggacgagtaccggaagcgagagtgtcgagaccacctcagagtaaacctgaagtttctgaccaggacgagaagcaccgtggctgagtctgtgagccagcagattttgcgccagaaccggggccgcaaggcctgtgaccggcctgtggccaagaccaagaagaagaaggctgagggcaccgtgttcaccgaggaagacttccagaagttccagcaggaatacttcggcagctaggctccctggagggcacggtgaagaggccttcaagccctgcagcctccgactcctgctggctccaggaaccggccgtgccgcgcggccagcagatggcgatgcaggaccagcctggctcgaggaagccgcggagctgagccgagtggaggctggaatggagctggtgggccggaagtcctggggaggatttacacacagaccggagctggcttccgcaggcctgggcagagcatctgcacctgccggaaaggaacgtatctgttttgtttgcttttgcccaggtggggcctctgggctgtttgctgtggagcaaggctaattcctgagcccttggggacgacagctccaggagtaggaagaagggtgggcttccaagttacaataaatgtgaacccaaga

SEQ ID NO: 176728 - DNA, 861 bp, Homo sapiens
  Payload ID: 14686
  Gene Symbol: RPS19BP1
  Gene Name: ribosomal protein S19 binding protein 1
  ENST ID: ENST00000420879
  CDS Start-End: 24-233
cgtgggcggagccaagcgccgccatgtccgccgccctgctgcggcggggcctggagctgctggcggcgtccgaggccccccgggaccctccaggtcaggccaagccgagaggggctccggtgaaacggccccggaagacgaaggcaattcaggcccagaaactgcggaactcggccaagggaaaggtgcccaagtcggcactggacggggtttcaccatgttggccacgctgatctcgaactcctgacctcaggtgacctgcctgcctcggcctcccaaagtgctgagattacagacgagtaccggaagcgagagtgtcgagaccacctcagagtaaacctgaagtttctgaccaggacgagaagcaccgtggctgagtctgtgagccagcagattttgcgccagaaccggggccgcaaggcctgtgaccggcctgtggccaagaccaagaagaagaaggctgagggcaccgtgttcaccgaggaagacttccagaagttccagcaggaatacttcggcagctaggctccctggagggcacggtgaagaggccttcaagccctgcagcctccgactcctgctggctccaggaaccggccgtgccgcgcggccagcagatggcgatgcaggaccagcctggctcgaggaagccgcggagctgagccgagtggaggctggaatggagctggtgggccggaagtcctggggaggatttacacacagaccggagctggcttccgcaggcctgggcagagcatctgcacctgccggaaaggaacgtatctgttttgtttgcttttgcccaggtggggcctctgggctgtttgctgtggagcaaggctaattcctgagcccttgggg

SEQ ID NO: 176729 - DNA, 985 bp, Homo sapiens
  Payload ID: 14687
  Gene Symbol: RPS2
  Gene Name: ribosomal protein S2
  Uniprot ID: P15880
  ENST ID: ENST00000343262
  CDS Start-End: 58-939
gtgctataaaagctgcttcccagtaggtctcgttcttcttttccgacaaaacaccaaatggcggatgacgccggtgcagcgggggggcccgggggccctggtggccctgggatggggaaccgcggtggcttccgcggaggtttcggcagtggcatccggggccggggtcgcggccgtggacggggccggggccgaggccgcggagctcgcggaggcaaggccgaggataaggagtggatgcccgtcaccaagttgggccgcttggtcaaggacatgaagatcaagtccctggaggagatctatctcttctccctgcctattaaggaatcagagatcattgatttcttcctgggggcctctctcaaggatgaggttttgaagattatgccagtgcagaagcagacccgtgccggccagcgcaccaggttcaaggcatttgttgctatcggggactacaatggccacgtcggtctgggtgttaagtgctccaaggaggtggccaccgccatccgtggggccatcatcctggccaagctctccatcgtccccgtgcgcagaggctactgggggaacaagatcggcaagccccacactgtcccttgcaaggtgacaggccgctgcggctctgtgctggtacgcctcatccctgcacccaggggcactggcatcgtctccgcacctgtgcctaagaagctgctcatgatggctggtatcgatgactgctacacctcagcccggggctgcactgccaccctgggcaacttcgccaaggccacctttgatgccatttctaagacctacagctacctgacccccgacctctggaaggagactgtattcaccaagtctccctatcaggagttcactgaccacctcgtcaagacccacaccagagtctccgtgcagcggactcaggctccagctgtggctacaacatagggtttttatacaagaaaaataaagtgaattaagcgtgttactgttt

SEQ ID NO: 176730 - DNA, 719 bp, Homo sapiens
  Payload ID: 14687
  Gene Symbol: RPS2
  Gene Name: ribosomal protein S2
  ENST ID: ENST00000527302
  CDS Start-End: 66-719
gtgagtcctgttggtcgctgcagcgggcctctgcgtgggcggcgggaatccgcggacatcggcaaatggcggatgacgccggtgcagcgggggggcccgggggccctggtggccctgggatggggaaccgcggtggcttccgcggaggtttcggcagtggcatccggggccggggtcgcggccgtggacggggccggggccgaggccgcggagctcgcggaggcaaggccgaggataaggagtggatgcccgtcaccaagttgggccgcttggtcaaggacatgaagatcaagtccctggaggagatctatctcttctccctgcctattaaggaatcagagatcattgatttcttcctgggggcctctctcaaggatgaggttttgaagattatgccagtgcagaagcagacccgtgccggccagcgcaccaggttcaaggcatttgttgctatcggggactacaatggccacgtcggtctgggtgttaagtgctccaaggaggtggccaccgccatccgtggggccatcatcctggccaagctctccatcgtccccgtgcgcagaggctactgggggaacaagatcggcaagccccacactgtcccttgcaaggtgacaggccgctgcggctctgtgctggtacgcctcatccctgcacccaggggcactggcatcgtctccgcacctgtgcctaagaagctgctcatgatggctggt

SEQ ID NO: 176731 - DNA, 993 bp, Homo sapiens
  Payload ID: 14687
  Gene Symbol: RPS2
  Gene Name: ribosomal protein S2
  ENST ID: ENST00000529806
  CDS Start-End: 188-817
aaacacgtgagtcctgttggtcgctgcagcgggcctctgcgtgggcggcgggaatccgcggacatcgggtcgggtctaggctcccgagtccgcgctcctgggcgggagcccttgtctgggtctcgcggggggctgccagatgcgtaggccacactgactagttccttcttgtcgcttttcccagcaaatggcggatgacgccggtgcagcgggggggcccgggggccctggtggccctgggatggggaaccgcggtggcttccgcggaggtttcggcagtggcatccggggccggggtcgcggccgtggacggggccggggccgaggccgcggagctcgcggaggcaaggccgaggataaggaggaatcagagatcattgatttcttcctgggggcctctctcaaggatgaggttttgaagattatgccagtgcagaagcagacccgtgccggccagcgcaccaggttcaaggcatttgttgctatcggggactacaatggccacgtcggtctgggtgttaagtgctccaaggaggtggccaccgccatccgtggggccatcatcctggccaagctctccatcgtccccgtgcgcagaggctactgggggaacaagatcggcaagccccacactgtcccttgcaaggtgacaggccgctgcggctctgtgctggtacgcctcatccctgcacccaggggcactggcatcgtctccgcacctgtgcctaagaagctgctcatgatggctggtatcgatgactgctacacctcagcccggggctgcactgccaccctgggcaacttcggccacctttgatgccatttctaagacctacagctacctgacccccgacctctggaaggagactgtattcaccaagtctccctatcaggagttcactgaccacctcgtcaagacccacaccagagtctccgtgcagcggactcaggctccagctgtggctacaacatagggtttttatacaagaaaaa

SEQ ID NO: 176732 - DNA, 931 bp, Homo sapiens
  Payload ID: 14687
  Gene Symbol: RPS2
  Gene Name: ribosomal protein S2
  ENST ID: ENST00000532746
  CDS Start-End: 1-191
agtggatgcccgtcaccaagttgggccgcttggtcaaggacatgaagatcaagtccctggaggagatctatctcttctccctgcctattaagcaaggtacggtggtcatggctaggccaaagctggacaaagcaaaaggaaatctgagtggaaagccacatctcaccaaacaagagaaaaagggcaaataggaagaaacgattgagatgcagaaatagggtaaccttacatacaagcttccaaaaacgaaacgaaggggacagatcggggggaagccaggaatcagagatcattgatttcttcctgggggcctctctcaaggatgaggttttgaagattatgccagtgcagaagcagacccgtgccggccagcgcaccaggttcaaggcatttgttgctatcggggactacaatggccacgtcggtctgggtgttaagtgctccaaggaggtggccaccgccatccgtggggccatcatcctggccaagctctccatcgtccccgtgcgcagaggctactgggggaacaagatcggcaagccccacactgtcccttgcaaggtgacaggccgctgcggctctgtgctggtacgcctcatccctgcacccaggggcactggcatcgtctccgcacctgtgcctaagaagctgctcatgatggctggtatcgatgactgctacacctcagcccggggctgcactgccaccctgggcaacttcgccaaggccacctttgatgccatttctaagacctacagctacctgacccccgacctctggaaggagactgtattcaccaagtctccctatcaggagttcactgaccacctcgtcaagacccacaccagagtctccgtgcagcggactcaggctccagctgtggctacaacatagggtttttatacaagaaaaataaagtgaattaagcgtg

SEQ ID NO: 176733 - DNA, 625 bp, Homo sapiens
  Payload ID: 14687
  Gene Symbol: RPS2
  Gene Name: ribosomal protein S2
  ENST ID: ENST00000533186
  CDS Start-End: 1-588
gtcaccaagttgggccgcttggtcaaggacatgaagatcaagtccctggaggagatctatctcttctccctgcctattaaggcatttgttgctatcggggactacaatggccacgtcggtctgggtgttaagtgctccaaggaggtggccaccgccatccgtggggccatcatcctggccaagctctccatcgtccccgtgcgcagaggctactgggggaacaagatcggcaagccccacactgtcccttgcaaggtgacaggccgctgcggctctgtgctggtacgcctcatccctgcacccaggggcactggcatcgtctccgcacctgtgcctaagaagctgctcatgatggctggtatcgatgactgctacacctcagcccggggctgcactgccaccctgggcaacttcgccaaggccacctttgatgccatttctaagacctacagctacctgacccccgacctctggaaggagactgtattcaccaagtctccctatcaggagttcactgaccacctcgtcaagacccacaccagagtctccgtgcagcggactcaggctccagctgtggctacaacatagggtttttatacaagaaaaataaagtgaattaagcgtg

SEQ ID NO: 176734 - DNA, 765 bp, Homo sapiens
  Payload ID: 14687
  Gene Symbol: RPS2
  Gene Name: ribosomal protein S2
  ENST ID: ENST00000530225
  CDS Start-End: 7-600
cagcaaatggcggatgacgccggtgcagcgggggggcccgggggccctggtggccctgggatggggaaccgcggtggcttccgcggaggtttcggcagtggcatccggggccggggtcgcggccgtggacggggccggggccgaggccgcggagctcgcggaggcaaggccgaggataaggagtggatgcccgtcaccaagttgggccgcttggtcaaggacatgaagatcaagtccctggaggagatctatctcttctccctgcctattaaggaatcagagatcattgatttcttcctgggggcctctctcaaggatgaggttttgaagattatgccagtgcagaagcagacccgtgccggccagcgcaccaggttcaaggcatttgttgctatcggggactacaatggccacgtcggtctgggtgttaagtgctccaaggaggtggccaccgccatccgtggggccatcatcctggccaagctctccatcgtccccgtgcgcagaggctactgggggaacaagatcggcaagccccacactgtcccttgcaagccaaggccacctttgatgccatttctaagacctacagctacctgacccccgacctctggaaggagactgtattcaccaagtctccctatcaggagttcactgaccacctcgtcaagacccacaccagagtctccgtgcagcggactcaggctccagctgtggctacaacatagggtttttatacaagaaaaataaagtgaattaagcgtg

SEQ ID NO: 176735 - DNA, 924 bp, Homo sapiens
  Payload ID: 14687
  Gene Symbol: RPS2
  Gene Name: ribosomal protein S2
  ENST ID: ENST00000526522
  CDS Start-End: 179-886
agtcctgttggtcgctgcagcgggcctctgcgtgggcggcgggaatccgcggacatcgggtcgggtctaggctcccgagtccgcgctcctgggcgggagcccttgtctgggtctcgcggggggctgccagatgcgtaggccacactgactagttccttcttgtcgcttttcccagcaaatggcggatgacgccggtgcagcgggggggcccgggggccctggtggccctgggatggggaaccgcggtggcttccgcggaggtttcggcagtggcatccggggccggggtcgcggccgtggacggggccggggccgaggccgcggagctcgcggaggcaaggccgaggataaggagtggatgcccgtcaccaagttgggccgcttggtcaaggacatgaagatcaagtccctggaggagatctatctcttctccctgcctattaaggaatcagagatcattgatttcttcctgggggcctctctcaaggatgaggttttgaagattatgccagtgcagaagcagacccgtgccggccagcgcaccaggttcaaggtgacaggccgctgcggctctgtgctggtacgcctcatccctgcacccaggggcactggcatcgtctccgcacctgtgcctaagaagctgctcatgatggctggtatcgatgactgctacacctcagcccggggctgcactgccaccctgggcaacttcgccaaggccacctttgatgccatttctaagacctacagctacctgacccccgacctctggaaggagactgtattcaccaagtctccctatcaggagttcactgaccacctcgtcaagacccacaccagagtctccgtgcagcggactcaggctccagctgtggctacaacatagggtttttatacaagaaaaataaagtgaattaagcgtgt

SEQ ID NO: 176736 - DNA, 170 bp, Homo sapiens
  Payload ID: 14687
  Gene Symbol: RPS2
  Gene Name: ribosomal protein S2
  ENST ID: ENST00000563194
  CDS Start-End: 39-170
ccagtaggtctcgttcttcttttccgacaaaacactggatgcccgtcaccaagttgggccgcttggtcaaggacatgaagatcaagtccctggaggagatctatctcttctccctgcctattaaggaatcagagatcattgatttcttcctgggggcctctctcaaggat

SEQ ID NO: 176737 - DNA, 878 bp, Homo sapiens
  Payload ID: 14687
  Gene Symbol: RPS2
  Gene Name: ribosomal protein S2
  ENST ID: ENST00000526586
  CDS Start-End: 1-468
gaatcagagatcattgatttcttcctgggggcctctctcaaggatgaggttttgaagattatgccagtgcagaagcagacccgtgccggccagcgcaccaggttcaaggcatttgttgctatcggggactacaatggccacgtcggtctgggtgttaagtgctccaaggaggtggccaccgccatccgtggggccatcatcctggccaagctctccatcgtccccgtgcgcagaggctactgggggaacaagatcggcaagccccacactgtcccttgcaaggtgacaggccgctgcggctctgtgctggtacgcctcatccctgcacccaggggcactggcatcgtctccgcacctgtgcctaagaagctgctcatgatggctggtatcgatgactgctacacctcagcccggggctgcactgccaccctgggcaacttcggtaggtggtccacacatggggcatagccatggtctctcagctccgcttaaccacacgggtccagtgtgtgcttggcgtgttttcagggaggcagagaaaggctctcctaatgcacgacagacccgcccagaatggcctctctgttcctaggagtgcgacaatttttgggttgggggacttgcctcaagcacaccactgaccctcctggggttcttttgttttgcagccaaggccacctttgatgccatttctaagacctacagctacctgacccccgacctctggaaggagactgtattcaccaagtctccctatcaggagttcactgaccacctcgtcaagacccacaccagagtctccgtgcagcggactcaggctccagctgtggctacaacatagggtttttatacaagaaaaataaagtgaattaagcgtg

SEQ ID NO: 176738 - DNA, 626 bp, Homo sapiens
  Payload ID: 14688
  Gene Symbol: RPS20
  Gene Name: ribosomal protein S20
  Uniprot ID: P60866
  ENST ID: ENST00000009589
  CDS Start-End: 124-483
ctttttgaggaagacgcggtcgtaagggctgaggatttttggtccgcacgctcctgctcctgactcaccgctgttcgctctcgccgaggaacaagtcggtcaggaagcccgcgcgcaacagccatggcttttaaggataccggaaaaacacccgtggagccggaggtggcaattcaccgaattcgaatcaccctaacaagccgcaacgtaaaatccttggaaaaggtgtgtgctgacttgataagaggcgcaaaagaaaagaatctcaaagtgaaaggaccagttcgaatgcctaccaagactttgagaatcactacaagaaaaactccttgtggtgaaggttctaagacgtgggatcgtttccagatgagaattcacaagcgactcattgacttgcacagtccttctgagattgttaagcagattacttccatcagtattgagccaggagttgaggtggaagtcaccattgcagatgcttaagtcaactattttaataaattgatgaccagttgttaacttctgttggtttttattcagaatactggcagattttaggaatataaaggtgtactatgagacttccacttttcaggtggaatatatgggtatcttagagtggtcta

SEQ ID NO: 176739 - DNA, 650 bp, Homo sapiens
  Payload ID: 14688
  Gene Symbol: RPS20
  Gene Name: ribosomal protein S20
  Uniprot ID: P60866
  ENST ID: ENST00000521262
  CDS Start-End: 255-614
ctttctttttgaggaagacgcggtcgtaagggctgaggatttttggtccgcacgctcctgctcctgactcaccgctgttcgctctcgccgaggaacaagtcggtcaggaagcccgcgcgcaacagccatggtgaggcggcagtcggcggcgggcggcgcaacgcagggctcgggcgccggggggaccccggtttcgagttcgtgctcctgagggcagatgccggggcgtgtaggggcggaaaggcgctcctgaaatggcttttaaggataccggaaaaacacccgtggagccggaggtggcaattcaccgaattcgaatcaccctaacaagccgcaacgtaaaatccttggaaaaggtgtgtgctgacttgataagaggcgcaaaagaaaagaatctcaaagtgaaaggaccagttcgaatgcctaccaagactttgagaatcactacaagaaaaactccttgtggtgaaggttctaagacgtgggatcgtttccagatgagaattcacaagcgactcattgacttgcacagtccttctgagattgttaagcagattacttccatcagtattgagccaggagttgaggtggaagtcaccattgcagatgcttaagtcaactattttaataaattgatgaccagttgttaa

SEQ ID NO: 176740 - DNA, 423 bp, Homo sapiens
  Payload ID: 14688
  Gene Symbol: RPS20
  Gene Name: ribosomal protein S20
  ENST ID: ENST00000520627
  CDS Start-End: 193-387
ctttctttttgaggaagacgcggtcgtaagggctgaggatttttggtccgcacgctcctgctcctgactcaccgctgttcgctctcgccgaggaacaagtcggtcaggaagcccgcgcgcaacagccatgtgtgtgctgacttgataagaggcgcaaaagaaaagaatctcaaagtgaaaggaccagttcgaatgcctaccaagactttgagaatcactacaagaaaaactccttgtggtgaaggttctaagacgtgggatcgtttccagatgagaattcacaagcgactcattgacttgcacagtccttctgagattgttaagcagattacttccatcagtattgagccaggagttgaggtggaagtcaccattgcagatgcttaagtcaactattttaataaattgatgaccagttgttaa

SEQ ID NO: 176741 - DNA, 899 bp, Homo sapiens
  Payload ID: 14688
  Gene Symbol: RPS20
  Gene Name: ribosomal protein S20
  ENST ID: ENST00000523936
  CDS Start-End: 101-286
ggcgcaacgcagggctcgggcgccggggggaccccggtttcgagttcgtgctcctgagggcagatgccggggcgtgtaggggcggaaaggcgctcctgaaatggcttttaaggataccggaaaaacacccgtggagccggaggtggcaattcaccgaattcgaatcaccctaacaagccgcaacgtaaaatccttggaaaaggtgtgtgctgacttgataagaggcgcaaaagaaaagaatctcaaagtgaaaggaccagttcgaatgcctaccaaggtaaagtaaatcggaggggcaggaagtaggagttgcttccggatgttgcataaattcaggttctttaaggagttcggctgccaaaattgttaacactgatgctgtctacaaacgcacatagaaatcggtggtagattgcggttcctagtaagtagctaatgtttagatatgattgttgaattattgttgctgtgttcttggtgtgctttggtgcttaacaggcgcaagctctaagggtggtgtcctagcacagtgaaaacagacctggcattttcaacccatggtacctgaaaatctattagtgtaaattggaatcataccaaagggaaactaatgaaatgattagaagtaatgattttccagatgttctagggataagtataaaacgataaacacttggtttcctttgtcttttgttacagactttgagaatcactacaagaaaaactccttgtggtgaaggttctaagacgtgggatcgtttccagatgagaattcacaagcgactcattgacttgcacagtccttctgagattgttaagcagattacttccatcagtattgagccaggagttgaggtggaagtcaccattgcagatgcttaagtcaactattttaataa

SEQ ID NO: 176742 - DNA, 671 bp, Homo sapiens
  Payload ID: 14688
  Gene Symbol: RPS20
  Gene Name: ribosomal protein S20
  ENST ID: ENST00000518875
  CDS Start-End: 116-301
ggaagacgcggtcgtaagggctgaggatttttggtccgcacgctcctgctcctgactcaccgctgttcgctctcgccgaggaacaagtcggtcaggaagcccgcgcgcaacagccatggcttttaaggataccggaaaaacacccgtggagccggaggtggcaattcaccgaattcgaatcaccctaacaagccgcaacgtaaaatccttggaaaaggtgtgtgctgacttgataagaggcgcaaaagaaaagaatctcaaagtgaaaggaccagttcgaatgcctaccaaggtaaagtaaatcggaggggcaggaagtaggagttgcttccggatgttgcataaattcaggttctttaaggagttcggctgccaaaattgttaacactgatgctgtctacaaacgcacatagaaatcggtggtagattgcggttcctagtaagtagctaatgtttagatatgattgttgaattattgttgctgtgttcttggtgtgctttggtgcttaacaggcgcaagctctaagggtggtgtcctagcacagtgaaaacagacctggcattttcaacccatggtacctgaaaatctattagtgtaaattggaatcataccaaagggaaactaatgaaatgattagaagtaatgattttccagatgttctagggataag

SEQ ID NO: 176743 - DNA, 752 bp, Homo sapiens
  Payload ID: 14688
  Gene Symbol: RPS20
  Gene Name: ribosomal protein S20
  ENST ID: ENST00000524349
  CDS Start-End: 510-704
ctttttgaggaagacgcggtcgtaagggctgaggatttttggtccgcacgctcctgctcctgactcaccgctgttcgctctcgccgaggaacaagtcggtcaggaagcccgcgcgcaacagccatggtgaggcggcagtcggcggcgggcggcgcaacgcagggctcgggcgccggggggaccccggtttcgagttcgtgctcctgagggcagatgccggggcgtgtaggggcggaaaggcgctcctgaaatggtggggaaacgcgggaagcttccggaagctgcctttctccagaagtggcagaccatttttggcttattgttctttttcatgtatctaataataggcttttaaggataccggaaaaacacccgtggagccggaggtggcaattcaccgaattcgaatcaccctaacaagccgcaacgtaaaatccttggaaaaggtgtgtgctgacttgataagaggcgcaaaagaaaagaatctcaaagtgaaaggaccagttcgaatgcctaccaagactttgagaatcactacaagaaaaactccttgtggtgaaggttctaagacgtgggatcgtttccagatgagaattcacaagcgactcattgacttgcacagtccttctgagattgttaagcagattacttccatcagtattgagccaggagttgaggtggaagtcaccattgcagatgcttaagtcaactattttaataaattgatgaccagttgttaacttctgttggtt

SEQ ID NO: 176744 - DNA, 424 bp, Homo sapiens
  Payload ID: 14688
  Gene Symbol: RPS20
  Gene Name: ribosomal protein S20
  ENST ID: ENST00000519606
  CDS Start-End: 124-264
ctttttgaggaagacgcggtcgtaagggctgaggatttttggtccgcacgctcctgctcctgactcaccgctgttcgctctcgccgaggaacaagtcggtcaggaagcccgcgcgcaacagccatggcttttaaggataccggaaaaacacccgtggagccggaggtggcaattcaccgaattcgaatcaccctaacaagccgcaacgtaaaatccttggaaaaggactttgagaatcactacaagaaaaactccttgtggtgaaggttctaagacgtgggatcgtttccagatgagaattcacaagcgactcattgacttgcacagtccttctgagattgttaagcagattacttccatcagtattgagccaggagttgaggtggaagtcaccattgcagatgcttaagtcaactattttaat

SEQ ID NO: 176745 - DNA, 1826 bp, Homo sapiens
  Payload ID: 14688
  Gene Symbol: RPS20
  Gene Name: ribosomal protein S20
  Uniprot ID: P60866
  ENST ID: ENST00000519807
  CDS Start-End: 127-555
tttctttttgaggaagacgcggtcgtaagggctgaggatttttggtccgcacgctcctgctcctgactcaccgctgttcgctctcgccgaggaacaagtcggtcaggaagcccgcgcgcaacagccatggcttttaaggataccggaaaaacacccgtggagccggaggtggcaattcaccgaattcgaatcaccctaacaagccgcaacgtaaaatccttggaaaaggtgtgtgctgacttgataagaggcgcaaaagaaaagaatctcaaagtgaaaggaccagttcgaatgcctaccaagactttgagaatcactacaagaaaaactccttgtggtgaaggttctaagacgtgggatcgtttccagatgagaattcacaagcgactcattgacttgcacagtccttctgagattgttaagcagattacttccatcagtattgagccaggagttgagttgatcgaatctacagatgcagaacccatggatacagagggccagcagtacactttgagaagtgtattcgaatccccggggacatgtcctttttaactgcattctcctccgccaaaaaagtgaccaagcagagtctttctctgtcacccaggctggagtgcaatggcgtgatctcagctcactgcaacctctgcctcctgggttcaagtgattctcgtgtctcagcctcctgagtagctgagactacaggtgtgcaccagtgttcccagctgatttttgtattttatgtagagatggggttatgccattttggccaggctagtctcgaactcctgagctcaggtgatacacacacctcagcaaatcttttaaattatacattctgtgatatttccttgactttcttatccagcacttgtattgattatttttcattttgataatgttgggtttttaaaaactcctttatgatggaaaatttcaaacatacacaaaagtagagagagaatggtataataaacccactcagttttaaggattgtcaactaataccagttttatttcatgtatgactccaacaacttccccaaccagccttcagattatttgaaagcaaatttcagacatcgtattttactcatacattttctagtatctaaatctgaaagagactcttttctaacagttctgtagcattaattatactcatactgttgtgcaacaaatatccagaaatcttttgtcttgcgaaactgaacctcttacccattaaacactaactcccttttttttcaccctgaaccattggcaaccacaattttactttctttttctgtgagtttgattacttgatacttcatgtgagtggaatcatataatatttgtctttttgtgactgacattttatttagcttaatgtcttcaagtttgacccataccatatcatgtggcaggatttttccctttttttttttttcagacggagtctcgctctgtcgcccaggctggagtgcagtggcgcgatctcggctcactgcaagctccgcctcccgggttcatgccattctcctgcctcagcctcctgagtagctgggactacaggcgcccaccactaaacccggctaatttttttgtatttttagtagagacagagtttcaccatgttaatgaggatggtctccatctcctgacctcgtgattcgctcgtctcggcctcccaaagtgctgggattacaggcgtgagccaccgcgcccggccatgatttttcttcttttttaaggctgaataatatctcaatgtatgtatatataccactttttaaaaattcattcatctgttggacatttagattgttcccacctcttgg

SEQ ID NO: 176746 - DNA, 627 bp, Homo sapiens
  Payload ID: 14688
  Gene Symbol: RPS20
  Gene Name: ribosomal protein S20
  Uniprot ID: P60866
  ENST ID: ENST00000618656
  CDS Start-End: 199-627
atatttcctgttccggggcgtgtgggacccggatgcaagcgtgctatataagcgttgctcaagtcccacccctttctttttgaggaagacgcggtcgtaagggctgaggatttttggtccgcacgctcctgctcctgactcaccgctgttcgctctcgccgaggaacaagtcggtcaggaagcccgcgcgcaacagccatggcttttaaggataccggaaaaacacccgtggagccggaggtggcaattcaccgaattcgaatcaccctaacaagccgcaacgtaaaatccttggaaaaggtgtgtgctgacttgataagaggcgcaaaagaaaagaatctcaaagtgaaaggaccagttcgaatgcctaccaagactttgagaatcactacaagaaaaactccttgtggtgaaggttctaagacgtgggatcgtttccagatgagaattcacaagcgactcattgacttgcacagtccttctgagattgttaagcagattacttccatcagtattgagccaggagttgagttgatcgaatctacagatgcagaacccatggatacagagggccagcagtacactttgagaagtgtattcgaatccccggggacatgtcctttttaa

SEQ ID NO: 176747 - DNA, 344 bp, Homo sapiens
  Payload ID: 14689
  Gene Symbol: RPS21
  Gene Name: ribosomal protein S21
  Uniprot ID: P63220
  ENST ID: ENST00000343986
  CDS Start-End: 40-291
cgcgcggtgtggtggcagcaggcgcagcccagcctcgaaatgcagaacgacgccggcgagttcgtggacctgtacgtgccgcggaaatgctccgctagcaatcgcatcatcggtgccaaggaccacgcatccatccagatgaacgtggccgaggttgacaaggtcacaggcaggtttaatggccagtttaaaacttatgctatctgcggggccattcgtaggatgggtgagtcagatgattccattctccgattggccaaggccgatggcatcgtctcaaagaacttttgactggagagaatcacagatgtggaatatttgtcataaataaataatgaaaacct

SEQ ID NO: 176748 - DNA, 1002 bp, Homo sapiens
  Payload ID: 14689
  Gene Symbol: RPS21
  Gene Name: ribosomal protein S21
  ENST ID: ENST00000370562
  CDS Start-End: 43-243
cggcgccgcgcggtgactccccaggcgcagcccagcctcgaaatgcagaacgacgccggcgagttcgtggacctgtacgtgccgcggaaatgctccgctagcaatcgcatcatcggtgccaaggaccacgcatccatccagatgaacgtggccgaggtgagctgggagcccgggaggcgggaaggttgtgatatatgtgcgggaaaggcaggctgtcccattgtggaggagcccctggggtgaaggtacaggcagaggctggctttgaggattggtgtttcccaaacctgggggagtggtttgtgacccttcttctctttctaggttgacaaggtcacaggcaggtttaatggccagtttaaaacttatgctatctgcggggccattcgtaggatggtgagtgtttccctgggctttgctcatcacttcgggacatcgtggactttaccgtgcgcattggagtgtgtgatggtgcctgagtagatctgctggcagagtagtttgagccagctggactgggctggccgcctgccgcttcttgagggtggaagaggggtgctctgagaagacactcaggcagcagactctgcctctcactaggaggtgcccccccgaccccgctccaccatagtcaggctgcaggctgccccgggagaggtggctccccttctgcgcctgtctccattcgctcagcgggggagagacgtgggctggtggcacagctgaccttctgccatctcaggcagccggagtggaaatattcttagtgtgcttttttttttttcttaagggtgagtcagatgattccattctccgattggccaaggccgatggcatcgtctcaaagtaaggttgggggctcacatttgggcagagtgagtggactaggactgctccagaggcgtggtcttaacgttgtccttttcccctggttctaggaacttttgactggagagaatcacagatgtggaatatttgtcataaataaataatgaaaaccta

SEQ ID NO: 176749 - DNA, 401 bp, Homo sapiens
  Payload ID: 14689
  Gene Symbol: RPS21
  Gene Name: ribosomal protein S21
  ENST ID: ENST00000370592
  CDS Start-End: 15-287
agcccagcctcgaaatgcagaacgacgccggcgagttcgtggacctgtacgtgccgcggaaatgctccgctagcaatcgcatcatcggtgccaaggaccacgcatccatccagatgaacgtggccgaggttgacaaggtcacaggcaggtttaatggccagtttaaaacttatgctatctgcggggccattcgtaggatggtgagtgtttccctgggctttgctcatcacttcgggacatcgtggactttaccgtgcgcattggagtgtgtgatggtgcctgagtagatctgctggcagagtagtttgagccagctggactgggctggccgcctgccgcttcttgagggtggaagaggggtgctctgagaagacactcaggcagcagactctgcctctcac

SEQ ID NO: 176750 - DNA, 418 bp, Homo sapiens
  Payload ID: 14689
  Gene Symbol: RPS21
  Gene Name: ribosomal protein S21
  ENST ID: ENST00000450116
  CDS Start-End: 22-267
caggcgcagcccagcctcgaaatgcagaacgacgccggcgagttcgtggacctgtacgtgccgcggaaatgctccgctagcaatcgcatcatcggtgccaaggaccacgcatccatccagatgaacgtggccgaggttgacaaggtcacaggcaggtttaatggccagtttaaaacttatgctatctgcggggccattcgtaggatgggtgagtcagatgattccattctccgattggccaaggccgatggcatcgtctcaaagtaaggttgggggctcacatttgggcagagtgagtggactaggactgctccagaggcgtggtcttaacgttgtccttttcccctggttctaggaacttttgactggagagaatcacagatgtggaatatttgtcataaataaataatgaaaacct

SEQ ID NO: 176751 - DNA, 3437 bp, Homo sapiens
  Payload ID: 14690
  Gene Symbol: RPS23
  Gene Name: ribosomal protein S23
  Uniprot ID: P62266
  ENST ID: ENST00000296674
  CDS Start-End: 255-686
tcaaaagaaaaagggggaaaaaaaaccatgcaaattagatatctctgaatttcttgcaaattaaataagacgcagattctggctcaggaaagtgatgcaaacgcgtcgttttcaaaggagagaccccagcctcgggtcaggcgcggcgcagacagcggcgcggggtccttggctgggcggggcttgctcgcggtggcttgtggctccttcctgcggtgcttctctctttcgctcaggcccgtggcgccgacaggatgggcaagtgtcgtggacttcgtactgctaggaagctccgtagtcaccgacgagaccagaagtggcatgataaacagtataagaaagctcatttgggcacagccctaaaggccaacccttttggaggtgcttctcatgcaaaaggaatcgtgctggaaaaagtaggagttgaagccaaacagccaaattctgccattaggaagtgtgtaagggtccagctgatcaagaatggcaagaaaatcacagcctttgtacccaatgacggttgcttgaactttattgaggaaaatgatgaagttctggttgctggatttggtcgcaaaggtcatgctgttggtgatattcctggagtccgctttaaggttgtcaaagtagccaatgtttctcttttggccctatacaaaggcaagaaggaaagaccaagatcataaatattaatggtgaaaacactgtagtaataaattttcatatgccaaaaaatgtttgtatcttactgtcccctgttctcaccacgaagatcatgttcattaccaccaccacccccccttattttttttatcctaaaccagcaaacgcaggacctgtaccaattttaggagacaataagacagggttgtttcaggattctctagagttaataacatttgtaacctggcacagtttccctcatcctgtggaataagaaaatgggatagatctggaataaatgtgcagtattgtagtattactttaagaactttaagggaacttcaaaaactcactgaaattctagtgagatactttcttttttattcttggtattttccatatcgggtgcaacacttcagttaccaaatttcattgcacatagattatcttaggtacccttggaaatgcacattcttgtatccatcttacaggggcccaagatgataaatagtaaactcaaaattgctccccactctgtttattatttaaaggtgtcaggatctgtgttgtaatgtgtctacattaatgtgtttaggagaatacaggcattggatcatttagttgatggaagtatatgccaggcaagggagataaggtatacgacaagactgatgttttcagtatcttctcatgaggttgtcagagaccttcatgtcttcaaagactagtcagcaaatgaagtggtttagtgtagagacaagattggttgtgttttgataatttaagctaggtattgagtacatgtggattttgctgtccacaaatacttgtttcagagttttcatggatacagtggcatggttgaaatgaagctgtgagccttctgctttaaatctgatgtaagaaactcctgttaacaaatagtaagtatgggttaattagccctttgatcaaagcctagctttacattgtttaggatctttggaaaacaattggtttggttgcccactttccgtaggatcaagagcagaacctttcacatggcacagaagaacccaggttgcgcttcatacctgcatattccagccttagcctgccatttctctccttggcactttgtgctccagcaacactggtctcagttggtcatcctcaaacttgggttccatatccagcctcaggacctctgttcctgttactatggttccttgcatgtcgcctgctcttactaaagagctcgtgtgttttccagcacacttcggtttatctcttgatgatgatgctagtctctccctccgcaagggcggaaaggctgcctgttggtttgtaccagtgtttcctaacgtgtagctgcagtcagtatttggctaagctgttcccaggggctcaacagatgctttcggatgagccttaactgacccaatcctttgtgatgcgggagagattgctaggcctcgctcacctggccagaaccagggaaagaggccgcggttgcagcgcgattccaggccctgggcgtcaggcgcggggtgggcagctctccccgggcggtggggcccttgtgaccgcgaggcggggcgcaccaggaagggagtgggacagcgcgggcgcccagggatgtggcctggttacctgccttctctgatacgtcaagacaccttcaacaatggcttgcagctgtaccctgttggctgcacccaggacgcccttttcactgctaagcagtcctacctgaggcccaggggctgccagattgacccataaataatctccggcgcctcagatccagaagctgctgagcctgatcttagtgccttctcctttctctgtgtggccccccagcccctttccccactgccttgtgtccaaggccctttccttcatgtatccatggaggagagacaaaaatacacatcaataaaataagatagggaatccataaatagacattcagaagtatggccaacggatttatcttaaaaccaatggaggaagaagagtttcaataaatgttgtggacttccatttgtcaaagaccaaaacaaaggaaccccaaccttacatgtaatacaaacttaactcaaaatggatcatatatctaaatgtaaaatggaaagctataaaactgaaaacagactatctttacaacctaggcgtaggtatagtttttagacattacaccaaaagcacatgccgtaaaagaaaaaatagataaattggtggatttcattaaaattaaaaaactttttctctctgaaaaatcctgttaagctgggcgctgtggttcatgcctgtaatcccagcactttgggaggctgagttgggaagaaattaatagcttgaggccaggagttcaagatcatcctgggcagcaaagtcatacactcttgagggaagagagagaccttctcatattgttttatattgttttatactcagtacctgttttaagaaaaaaacaaggaagtgaaatcaaagacaggcagcccggcaccaggcctgaaaccagccctgggcctgcctggcctaaacctagtagttaaaaatcaacttacgacttagaacctgatgttatccgtagattccaagcattgtataaaaaaattgtgaaactccctgttgtgttctgtaccagtgcatgaaacccctgtcacatatcccctagattgctcaatcaatcacgaccctttcatgtgaaatctttagtgttgtgagcccttaaaagggacagaaattgtgcacttgaggagctcagattttaaggctgtagcttg

SEQ ID NO: 176752 - DNA, 530 bp, Homo sapiens
  Payload ID: 14690
  Gene Symbol: RPS23
  Gene Name: ribosomal protein S23
  ENST ID: ENST00000511844
  CDS Start-End: 33-200
tctctttcgctcaggcccgtggcgccgacaggatgggcaagtgtcgtggacttcgtactgctaggaagctccgtagtcaccgacgagaccagaagtggcatgataaacagtataagaaagctcatttgggcacagccctaaaggccaacccttttggaggtgcttctcatgcaaaaggaatcgtgctggaaaaagtgtaagtccattgctcccgtcaagttttagtttattataggaattcgagacatgaacttacgaattcttgttttgaaagtaattgcaggtttttgtgtagtagtattcatttgggcattgtggggtaaaattgcaaagcgtttgttctatttaaaagttggtaaaattagtttttgggaattaggtagttaaggttttaatttaacgttggcctggaaggaattggagaagatactagcaatgatgaagtaaaggacacaaacacctttactgtgggagttgttataagtaaatggcacgtgtcagctattgaactttatcgacttgataaaact

SEQ ID NO: 176753 - DNA, 836 bp, Homo sapiens
  Payload ID: 14690
  Gene Symbol: RPS23
  Gene Name: ribosomal protein S23
  ENST ID: ENST00000507980
  CDS Start-End: 32-403
ctctttcgctcaggcccgtggcgccgacaggatgggcaagtgtcgtggacttcgtactgctaggaagctccgtagtcaccgacgagaccagaagtggcatgataaacagtataagaaagctcatttgggcacagccctaaaggccaacccttttggaggtgcttctcatgcaaaaggaatcgtgctggaaaaagtaggagttgaagccaaacagccaaattctgccattaggaagtgtgtaagggtccagctgatcaagaatggcaagaaaatcacagcctttgtacccaatgacggttgcttgaactttattgaggtgagtatttcaactctatcgtaccttctgttcttggggtggcctccctcacatttttatctgatgcaagggagtttcctcacatgaaagtatttttgtgatcgccaccaacaccagaaataaacttcttattttattccaggaaaatgatgaagttctggttgctggatttggtcgcaaaggtcatgctgttggtgatattcctggagtccgctttaaggttgtcaaagtagccaatgtttctcttttggccctatacaaaggcaagaaggaaagaccaagatcataaatattaatggtgaaaacactgtagtaataaattttcatatgccaaaaaatgtttgtatcttactgtcccctgttctcaccacgaagatcatgttcattaccaccaccacccccccttattttttttatcctaaaccagcaaacgcaggacctgtaccaattttaggagacaataagacagggttgtttcaggattctctagagttaataacatttgtaacctggcacagtt

SEQ ID NO: 176754 - DNA, 1019 bp, Homo sapiens
  Payload ID: 14690
  Gene Symbol: RPS23
  Gene Name: ribosomal protein S23
  ENST ID: ENST00000510019
  CDS Start-End: 74-331
gcttgctcgcggtggcttgtggctccttcctgcggtgcttctctctttcgctcaggcccgtggcgccgacaggatgggcaagtgtcgtggacttcgtactgctaggaagctccgtagtcaccgacgagaccagaagtggcatgataaacagtataagaaagctcatttgggcacagccctaaaggccaacccttttggaggtgcttctcatgcaaaaggaatcgtgctggaaaaagtaggagttgaagccaaacagccaaattctgccattaggaagtgtgtaagggtccagctgatcaagaatggcaagaaggaaagaccaagatcataaatattaatggtgaaaacactgtagtaataaattttcatatgccaaaaaatgtttgtatcttactgtcccctgttctcaccacgaagatcatgttcattaccaccaccacccccccttattttttttatcctaaaccagcaaacgcaggacctgtaccaattttaggagacaataagacagggttgtttcaggattctctagagttaataacatttgtaacctggcacagtttccctcatcctgtggaataagaaaatgggatagatctggaataaatgtgcagtattgtagtattactttaagaactttaagggaacttcaaaaactcactgaaattctagtgagatactttcttttttattcttggtattttccatatcgggtgcaacacttcagttaccaaatttcattgcacatagattatcttaggtacccttggaaatgcacattcttgtatccatcttacaggggcccaagatgataaatagtaaactcaaaattgctccccactctgtttattatttaaaggtgtcaggatctgtgttgtaatgtgtctacattaatgtgtttaggagaatacaggcattggatcatttagttgatggaagtatatgccaggcaagggagataaggtatacgacaagactgatgttttcagtatcttctcatgaggttgtcagagaccttc

SEQ ID NO: 176755 - DNA, 443 bp, Homo sapiens
  Payload ID: 14690
  Gene Symbol: RPS23
  Gene Name: ribosomal protein S23
  ENST ID: ENST00000512493
  CDS Start-End: 29-433
tttcgctcaggcccgtggcgccgacaggatgggcaagtgtcgtggacttcgtactgctaggaagctccgtagtcaccgacgagaccagaagtggcatgataaacagtataagaaagctcatttgggcacagccctaaaggccaacccttttggaggtgcttctcatgcaaaaggaatcgtgctggaaaaagtaggagttgaagccaaacagccaaattctgccattaggaagtgtgtaagggtccagctgatcaagaatggcaagaaaatcacagcctttgtacccaatgacggttgcttgaactttattgaggaaaatgatgaagttctggttgctggatttggtcgcaaaggtcatgctgttggtgatattcctggagtccgctttaagagttttcatggatacagtggcatggttgaaatgaagctgtgagccttctgct

SEQ ID NO: 176756 - DNA, 1058 bp, Homo sapiens
  Payload ID: 14690
  Gene Symbol: RPS23
  Gene Name: ribosomal protein S23
  ENST ID: ENST00000510210
  CDS Start-End: 19-423
gcccgtggcgccgacaggatgggcaagtgtcgtggacttcgtactgctaggaagctccgtagtcaccgacgagaccagaagtggcatgataaacagtataagaaagctcatttgggcacagccctaaaggccaacccttttggaggtgcttctcatgcaaaaggaatcgtgctggaaaaagtaggagttgaagccaaacagccaaattctgccattaggaagtgtgtaagggtccagctgatcaagaatggcaagaaaatcacagcctttgtacccaatgacggttgcttgaactttattgaggaaaatgatgaagttctggttgctggatttggtcgcaaaggtcatgctgttggtgatattcctggagtccgctttaagagttttcatggatacagtggcatggttgaaatgaagctgtgagccttctgctttaaatctgatgtaagaaactcctgttaacaaatagatcaagagcagaacctttcacatggcacagaagaacccaggttgcgcttcatacctgcatattccagccttagcctgccatttctctccttggcactttgtgctccagcaacactggtctcagttggtcatcctcaaacttgggttccatatccagcctcaggacctctgttcctgttactatggttccttgcatgtcgcctgctcttactaaagagctcgtgtgttttccagcacacttcggtttatctcttgatgatgatgctagtctctccctccgcaagggcggaaaggctgcctgttggtttgtaccagtgtttcctaacgtgtagctgcagtcagtatttggctaagctgttcccaggggctcaacagatgctttcggatgagccttaactgacccaatcctttgtgatgcgggagagattgctaggcctcgctcacctggccagaaccagggaaagaggccgcggttgcagcgcgattccaggccctgggcgtcaggcgcggggtgggcagctctccccgggcggtggggcccttgtgaccgcgaggcggggcgcaccaggaagggagtgggacagcgcggg

SEQ ID NO: 176757 - DNA, 514 bp, Homo sapiens
  Payload ID: 14691
  Gene Symbol: RPS24
  Gene Name: ribosomal protein S24
  Uniprot ID: P62847
  ENST ID: ENST00000360830
  CDS Start-End: 20-412
ctgaagatagatcgccatcatgaacgacaccgtaactatccgcactagaaagttcatgaccaaccgactacttcagaggaaacaaatggtcattgatgtccttcaccccgggaaggcgacagtgcctaagacagaaattcgggaaaaactagccaaaatgtacaagaccacaccggatgtcatctttgtatttggattcagaactcattttggtggtggcaagacaactggctttggcatgatttatgattccctggattatgcaaagaaaaatgaacccaaacatagacttgcaagacatggcctgtatgagaagaaaaagacctcaagaaagcaacgaaaggaacgcaagaacagaatgaagaaagtcagggggactgcaaaggccaatgttggtgctggcaaaaagtgagctggagattggatcacagccgaaggagtaaaggtgctgcaatgatgttagctgtggccactgtggatttttcgcaagaacattaataaactaaaaacttca

SEQ ID NO: 176758 - DNA, 510 bp, Homo sapiens
  Payload ID: 14691
  Gene Symbol: RPS24
  Gene Name: ribosomal protein S24
  Uniprot ID: P62847
  ENST ID: ENST00000372360
  CDS Start-End: 38-439
cttttcctccttggctgtctgaagatagatcgccatcatgaacgacaccgtaactatccgcactagaaagttcatgaccaaccgactacttcagaggaaacaaatggtcattgatgtccttcaccccgggaaggcgacagtgcctaagacagaaattcgggaaaaactagccaaaatgtacaagaccacaccggatgtcatctttgtatttggattcagaactcattttggtggtggcaagacaactggctttggcatgatttatgattccctggattatgcaaagaaaaatgaacccaaacatagacttgcaagacatggcctgtatgagaagaaaaagacctcaagaaagcaacgaaaggaacgcaagaacagaatgaagaaagtcagggggactgcaaaggccaatgttggtgctggcaaaaagccgaaggagtaaaggtgctgcaatgatgttagctgtggccactgtggatttttcgcaagaacattaataaactaaaaacttca

SEQ ID NO: 176759 - DNA, 2814 bp, Homo sapiens
  Payload ID: 14691
  Gene Symbol: RPS24
  Gene Name: ribosomal protein S24
  Uniprot ID: P62847
  ENST ID: ENST00000440692
  CDS Start-End: 143-1012
aggcatcggcgcggtcagcctcgtggcgcgcccacgcccccacgccggctcttcccggggtccttccgtgcgcgttgatatgattggccggcgaatcgtggttctcttttcctccttggctgtctgaagatagatcgccatcatgaacgacaccgtaactatccgcactagaaagttcatgaccaaccgactacttcagaggaaacaaatggtcattgatgtccttcaccccgggaaggcgacagtgcctaagacagaaattcgggaaaaactagccaaaatgtacaagaccacaccggatgtcatctttgtatttggattcagaactcattttggtggtggcaagacaactggctttggcatgatttatgattccctggattatgcaaagaaaaatgaacccaaacatagacttgcaagacatggcctgtatgagaagaaaaagacctcaagaaagcaacgaaaggaacgcaagaacagaatgaagaaagtcagggggactgcaaaggccaatgttggtgctggcaaaaagatgagggaattggggcttggagtgcaagcattgggaagaatttcccaggaagagagatgcacagatgtgaagaactcgaaggcaagagaaagccggggggttgtgtggcaggtagaagtgccaggaccgtggagcgtgtggacatgtggcagattgcggaggggctgtggcaagtatttacaggtggccgttacctggaggaagactgaaaacagagaacagtgctgccaggcgtgccttttggagagggcactggtcagaaacggagccttcatgtcgcctgcctcacctgctcctgctggttctccccaccctgtggacggtgacttggtcctccacttgccagaagccttgtcagcaaccttgactctgtcaccccacatccaggccatcaacaagtcttttggccctttctttgaaatccaccaggaatccagctgcttctccccaccttcctgcctctctggtctgggccactaatgtcactgccatggccgccttgctgcatttctgaggatgcttcatctctccaccttcttctccactcagcagccagcagggcactgtggaaatcggagtcacatgagctggcacctctgttcagaaccctccagggctccacatctctctcacccaaatgccaaagacctccccacgcccccacaatcccccacgacctggccactggcctcccaccaccttccagctccagcggctcctaccacatttaaggctttccttcctagttttaatttttcctcgtcagcagttgattttattattttcttgtttattggtattttcccactagaaatgaagctgcgtgaagttagagatttttttttttggtctgtgttcctaattagctcattgctatacccctggcgcccagaacaatgccttggacacagtacgcagtagactaaataaatacttgttgaatgactgactgacggaatgacggctgtgtggggagtggattgggtcgtgaggcagaggctgcggtggaaactcaggcaggaggtgatggtggttcttggggctgcggaatgccaagtttagaagctcttcctctgctgtggcacatgaaccggtcactcgagaaggcttttagatttactttgcctaatcccctcttagtgcatgtggggaaactgaggtacacaaaaggaattccccaccaagttaggggcagaacctagcccccttgtctcccagatggatatcttcttttttttttgagacggagtcttgctctgttgcccaggctggagtgcagtggtaccatcttggctcactgcaacctctgcttcccaggttcaagcgattctcctgcctcagcctcctgagtgtctgcgattacaggtgcacacaaccacgcctggctaatttttgtatttttagtagagacggggtttcaccgtgttggtcagggtgacctcaaactcctgacctcatgatccacccagctcagcctcccaacgtgctgggattacaggcatgagccaccgtgcctggctggacatcttgttattaaagcttcttctctctttgtaggggagggggagatgcctctggtggagaagaccagtgtggcagtgactgtgtctgttagtgaacctggtggctggttgagggtctgtcgtggtgactgaggacacatacaaagtgcttttctcagtggtcaccttggtgttggtgaataagggtcagaagatggctcctgtcctagggcactgccagtcggtttggaagctgaaatgcctgcttagcagtttgaggaaacacagaccttggaggatcttctggttgcctcttcaagaattcattctattccccttctgctccccaaatttgcttttcttggggtgggtcttggttggcctaagccaagaaagtatggcatctactccttccatagcaatagctcaggaataggcagtgacccagacctgaaccaatcagtgcatggaattacccctggccaaagtggttgattgaggctgggtgcaagcagagttgtgagaaggctcccatttggtggttggagagatcgcacttgctccagaggtcataatgtgcagatctgaggcttggaactgctgcagacattttgctaccacaagtgaagccaccctgacgacacagttgacaatttggagcagggcagagctgagagaacagcagggaaacagccagagtcttgctcaagcctccctgaagtatctatacccctggactctagttatgggggctaataaatgttatatactgtttaaggt

SEQ ID NO: 176760 - DNA, 656 bp, Homo sapiens
  Payload ID: 14691
  Gene Symbol: RPS24
  Gene Name: ribosomal protein S24
  ENST ID: ENST00000435275
  CDS Start-End: 143-538
aggcatcggcgcggtcagcctcgtggcgcgcccacgcccccacgccggctcttcccggggtccttccgtgcgcgttgatatgattggccggcgaatcgtggttctcttttcctccttggctgtctgaagatagatcgccatcatgaacgacaccgtaactatccgcactagaaagttcatgaccaaccgactacttcagaggaaacaaatggtcattgatgtccttcaccccgggaaggcgacagtgcctaagacagaaattcgggaaaaactagccaaaatgtacaagaccacaccggatgtcatctttgtatttggattcagaactcattttggtggtggcaagacaactggctttggcatgatttatgattccctggattatgcaaagaaaaatgaacccaaacatagacttgcaagacatggcctgtatgagaagaaaaagacctcaagaaagcaacgaaaggaacgcaagaacagaatgaagaaagtcagggggactgcaaaggccaatgttggtgctggcaaaaagcagtgagctggagattggatcacagccgaaggagtaaaggtgctgcaatgatgttagctgtggccactgtggatttttcgcaagaacattaataaactaaaaacttcatgtgtctggttgtttg

SEQ ID NO: 176761 - DNA, 538 bp, Homo sapiens
  Payload ID: 14691
  Gene Symbol: RPS24
  Gene Name: ribosomal protein S24
  ENST ID: ENST00000613865
  CDS Start-End: 143-538
aggcatcggcgcggtcagcctcgtggcgcgcccacgcccccacgccggctcttcccggggtccttccgtgcgcgttgatatgattggccggcgaatcgtggttctcttttcctccttggctgtctgaagatagatcgccatcatgaacgacaccgtaactatccgcactagaaagttcatgaccaaccgactacttcagaggaaacaaatggtcattgatgtccttcaccccgggaaggcgacagtgcctaagacagaaattcgggaaaaactagccaaaatgtacaagaccacaccggatgtcatctttgtatttggattcagaactcattttggtggtggcaagacaactggctttggcatgatttatgattccctggattatgcaaagaaaaatgaacccaaacatagacttgcaagacatggcctgtatgagaagaaaaagacctcaagaaagcaacgaaaggaacgcaagaacagaatgaagaaagtcagggggactgcaaaggccaatgttggtgctggcaaaaagaaacgt

SEQ ID NO: 176762 - DNA, 508 bp, Homo sapiens
  Payload ID: 14692
  Gene Symbol: RPS25
  Gene Name: ribosomal protein S25
  ENST ID: ENST00000532567
  CDS Start-End: 47-166
atcttgacgaggctgcggtgtctgctgctattctccgagcttcgcaatgccgcctaaggacgacaagaagaagaaggacgctggaaagtcggccaagaaagacaaagacccagtgaacaaatccgggggcaaggccaaaaagaaggtagaaataagacctctctgaaagagactagggaagtggtccaaaggcaaagttcgggacaagctcaataacttagtcttgtttgacaaagctacctatgataaactctgtaaggaagttcccaactataaacttataaccccagctgtggtctctgagagactgaagattcgaggctccctggccagggcagcccttcaggagctccttagtaaaggacttatcaaactggtttcaaagcacagagctcaagtaatttacaccagaaataccaagggtggagatgctccagctgctggtgaagatgcatgaataggtccaaccagctgtacatttggaaaaataaaactttattaaatcaaa

SEQ ID NO: 176763 - DNA, 835 bp, Homo sapiens
  Payload ID: 14692
  Gene Symbol: RPS25
  Gene Name: ribosomal protein S25
  Uniprot ID: P62851
  ENST ID: ENST00000527673
  CDS Start-End: 407-784
tcctcctcctcctcccgcgccccccgtgcagccacctgctgcacttgcgcactgggagcgacacgctcgggcataagtagtgccggaaagttagctgccgagacctggtggattgcttttcgtttatcagtgcaggaaaacagcgctatagtatgcgtcacaactagcgcagactccggcagtatttaggcggtgcggcttgggaactagaatccacttcctgtcttccgcctcaggctagagggcgagcgcttcgccgtgggacttcttctgcctggctccgccttttgccccggaagtactcacagcggacggtggtttttgggcccgtttctgagcagcgcttcctttttgtccgacatcttgacgaggctgcggtgtctgctgctattctccgagcttcgcaatgccgcctaaggacgacaagaagaagaaggacgctggaaagtcggccaagaaagacaaagacccagtgaacaaatccgggggcaaggccaaaaagaagaagtggtccaaaggcaaagttcgggacaagctcaataacttagtcttgtttgacaaagctacctatgataaactctgtaaggaagttcccaactataaacttataaccccagctgtggtctctgagagactgaagattcgaggctccctggccagggcagcccttcaggagctccttagtaaaggacttatcaaactggtttcaaagcacagagctcaagtaatttacaccagaaataccaagggtggagatgctccagctgctggtgaagatgcatgaataggtccaaccagctgtacatttggaaaaataaaactttattaaatcaaa

SEQ ID NO: 176764 - DNA, 711 bp, Homo sapiens
  Payload ID: 14692
  Gene Symbol: RPS25
  Gene Name: ribosomal protein S25
  ENST ID: ENST00000527791
  CDS Start-End: 395-514
tcccgcgccccccgtgcagccacctgctgcacttgcgcactgggagcgacacgctcgggcataagtagtgccggaaagttagctgccgagacctggtggattgcttttcgtttatcagtgcaggaaaacagcgctatagtatgcgtcacaactagcgcagactccggcagtatttaggcggtgcggcttgggaactagaatccacttcctgtcttccgcctcaggctagagggcgagcgcttcgccgtgggacttcttctgcctggctccgccttttgccccggaagtactcacagcggacggtggtttttgggcccgtttctgagcagcgcttcctttttgtccgacatcttgacgaggctgcggtgtctgctgctattctccgagcttcgcaatgccgcctaaggacgacaagaagaagaaggacgctggaaagtcggccaagaaagacaaagacccagtgaacaaatccgggggcaaggccaaaaagaagctgtggtctctgagagactgaagattcgaggctccctggccagggcagcccttcaggagctccttagtaaaggacttatcaaactggtttcaaagcacagagctcaagtaatttacaccagaaataccaagggtggagatgctccagctgctggtgaagatgcatgaataggtccaaccagctgtacatttggaaaaataaaactttattaaatcaaa

SEQ ID NO: 176765 - DNA, 711 bp, Homo sapiens; identical to SEQ ID NO: 176764
  Payload ID: 14692
  Gene Symbol: RPS25
  Gene Name: ribosomal protein S25
  ENST ID: ENST00000630540
  CDS Start-End: 395-514

SEQ ID NO: 176766 - DNA, 835 bp, Homo sapiens; identical to SEQ ID NO: 176763
  Payload ID: 14692
  Gene Symbol: RPS25
  Gene Name: ribosomal protein S25
  Uniprot ID: P62851
  ENST ID: ENST00000628770
  CDS Start-End: 407-784

SEQ ID NO: 176767 - DNA, 508 bp, Homo sapiens; identical to SEQ ID NO: 176762
  Payload ID: 14692
  Gene Symbol: RPS25
  Gene Name: ribosomal protein S25
  ENST ID: ENST00000631368
  CDS Start-End: 47-166

SEQ ID NO: 176768 - DNA, 1183 bp, Homo sapiens
  Payload ID: 14693
  Gene Symbol: RPS26
  Gene Name: ribosomal protein S26
  Uniprot ID: P62854
  ENST ID: ENST00000356464
  CDS Start-End: 315-662
ctgcatcgtccagaattgcttccgagtcggcgcggcgcaaggcttgctgggagacacataacctcgattttcttccgccatccggctaaatagtcccatgtgcactttgttccatggataaataaacactaggaacgcatttccaccctagatttcagcagaaatgctgaatgtaaaggaatatttgagtaaagtgagttgccgttcttgaagcccgtctcctaaggattctcccggtgtccgcgtagggatctcatgctatataggagggccctgccaggcaccgtctcctctctccggtccgtgcctccaagatgacaaagaaaagaaggaacaatggtcgtgccaaaaagggccgcggccacgtgcagcctattcgctgcactaactgtgcccgatgcgtgcccaaggacaaggccattaagaaattcgtcattcgaaacatagtggaggccgcagcagtcagggacatttctgaagcgagcgtcttcgatgcctatgtgcttcccaagctgtatgtgaagctacattactgtgtgagttgtgcaattcacagcaaagtagtcaggaatcgatctcgtgaagcccgcaaggaccgaacacccccaccccgatttagacctgcgggtgctgccccacgtcccccaccaaagcccatgtaaggagctgagttcttaaagactgaagacaggctattctctggagaaaaataaaatggaaattgtacttaatattgcatgttaagtgtatctgtgccagataaggtggggattttgtgtgttagaccaagtgtgaagtgacacacattattttcatggggaagaaagcttattcatgtaatttaatttttttcttttttttttttttttttttgagacggagtctttgtcgcccaagctgaattgcagtggcgtgatctcagctcactgcaacctccgtctcccgggttcaagtgattctcctgcctcagcttcttgagtagctgggattacaggtgtctgccaccatgcctggttaatttttgtatttttggtagagatggggtttcactatgttgtccaggctggtcttgaacttctgacctcagttaatccaccagccttggcctcccaaagtgctgggattacaggcttgagccacctcgcctagctatttatgtaaattaaactttaattgtggtcgt

SEQ ID NO: 176769 - DNA, 623 bp, Homo sapiens
  Payload ID: 14693
  Gene Symbol: RPS26
  Gene Name: ribosomal protein S26
  Uniprot ID: P62854
  ENST ID: ENST00000552361
  CDS Start-End: 207-554
ggcttgctgggagacacataacctcgattttcttccgccatccggctaaatagtcccatgtgcactttgttccatggataaataaacactaggaacgcatttccaccctagatttcagcagaaatgctgaatgtaaaggaatatttgagtaaagtgagttgccgttcttgaagcaccgtctcctctctccggtccgtgcctccaagatgacaaagaaaagaaggaacaatggtcgtgccaaaaagggccgcggccacgtgcagcctattcgctgcactaactgtgcccgatgcgtgcccaaggacaaggccattaagaaattcgtcattcgaaacatagtggaggccgcagcagtcagggacatttctgaagcgagcgtcttcgatgcctatgtgcttcccaagctgtatgtgaagctacattactgtgtgagttgtgcaattcacagcaaagtagtcaggaatcgatctcgtgaagcccgcaaggaccgaacacccccaccccgatttagacctgcgggtgctgccccacgtcccccaccaaagcccatgtaaggagctgagttcttaaagactgaagacaggctattctctggagaaaaataaaatggaaattgtacttaa

SEQ ID NO: 176770 - DNA, 350 bp, Homo sapiens
  Payload ID: 14694
  Gene Symbol: RPS27
  Gene Name: ribosomal protein S27
  Uniprot ID: P42677
  ENST ID: ENST00000368567
  CDS Start-End: 39-293
gctcctttccggcggtgacgacctacgcacacgagaacatgcctctcgcaaaggatctccttcatccctctccagaagaggagaagaggaaacacaagaagaaacgcctggtgcagagccccaattcctacttcatggatgtgaaatgcccaggatgctataaaatcaccacggtctttagccatgcacaaacggtagttttgtgtgttggctgctccactgtcctctgccagcctacaggaggaaaagcaaggcttacagaaggatgttccttcaggaggaagcagcactaaaagcactctgagtcaagatgagtgggaaaccatctcaataaacacattttggataaa

SEQ ID NO: 176771 - DNA, 625 bp, Homo sapiens
  Payload ID: 14694
  Gene Symbol: RPS27
  Gene Name: ribosomal protein S27
  ENST ID: ENST00000392558
  CDS Start-End: 36-236
cctttccggcggtgacgacctacgcacacgagaacatgcctctcgcaaaggatctccttcatccctctccagaagaggagaagaggaaacacaagaagaaacgcctggtgcagagccccaattcctacttcatggatgtgaaatgcccaggtgaggagacggcttgctgtagtggggaaagcactggacctcaacagttggaaaatgttgtagtgttagctgtctcgtatccttgaagctgtgcagcagcttcagtttcttcgcctgtggaaaatattttccctgatactcttaaaatttgaatgtatgagactggcaaagttttgcatcttaggaggagtgattcatttcaccgtgatctctcatcacatttcacatacaacccctacgtttttttgtgttgggaaacaatgtaatggatgatgagttgggcataagtgcaggaaagacgggtgtaatagaggaaaaaaatgttatctgcttttctttcaggatgctataaaatcaccacggtctttagccatgcacaaacggtagttttgtgtgttggctgctccactgtcctctgccagcctacaggaggaaaagcaaggcttacagaaggtaaatggtttactaatgtgat

SEQ ID NO: 176772 - DNA, 1071 bp, Homo sapiens
  Payload ID: 14695
  Gene Symbol: RPS27A
  Gene Name: ribosomal protein S27a
  Uniprot ID: P62979
  ENST ID: ENST00000272317
  CDS Start-End: 325-795
cccctcgacctccttttaaaaattctcttagccacgttgattgtacgggaaaagcctttttaaaacatcttttacgttgcttaaacctacagtttcgaaagcattccgaaggctaaagtgagaaataagcccaggctagggagaggagaaacgaagttcacgtcctagtctggcaccgggttggattgtcgctgggacggcagtcaggcatttggtgtggtcgcctaaggggtgggtccttcggcgggagctccgggaaaccccgtgggcctgcgcggcgttcttccttttcgatccgccatctgcggtggagccgccaccaaaatgcagattttcgtgaaaacccttacggggaagaccatcaccctcgaggttgaaccctcggatacgatagaaaatgtaaaggccaagatccaggataaggaaggaattcctcctgatcagcagagactgatctttgctggcaagcagctggaagatggacgtactttgtctgactacaatattcaaaaggagtctactcttcatcttgtgttgagacttcgtggtggtgctaagaaaaggaagaagaagtcttacaccactcccaagaagaataagcacaagagaaagaaggttaagctggctgtcctgaaatattataaggtggatgagaatggcaaaattagtcgccttcgtcgagagtgcccttctgatgaatgtggtgctggggtgtttatggcaagtcactttgacagacattattgtggcaaatgttgtctgacttactgtttcaacaaaccagaagacaagtaactgtatgagttaataaaagacatgaactaacatttattgttgggttttattgcagtaaaaagaatggtttttaagcaccaaattgatggtcacaccatttccttttagtagtgctactgctatcgctgtgtgaatgttgcctctggggattatgtgacccagtggttctgtatacctgccaggtgccaaccacttgtaaaggtcttgatattttcaattcttagactacctatactttggcagaagttatatttaatgtaagttgtctaaatataa

SEQ ID NO: 176773 - DNA, 705 bp, Homo sapiens
  Payload ID: 14695
  Gene Symbol: RPS27A
  Gene Name: ribosomal protein S27a
  Uniprot ID: P62979
  ENST ID: ENST00000402285
  CDS Start-End: 224-694
aagacccagactcttccctaggctgggagagactcggcggttgaaagcagggaggcgctacaggagagaaagggctgaacccccgcttccgcagatttcacctatttttcagtttgcctggagcaggccacgcaaattcccttcccttgaaggcccaaggagcgtctggtagattgctgattctctgcccatcaccgcttctggaagtggagccgccaccaaaatgcagattttcgtgaaaacccttacggggaagaccatcaccctcgaggttgaaccctcggatacgatagaaaatgtaaaggccaagatccaggataaggaaggaattcctcctgatcagcagagactgatctttgctggcaagcagctggaagatggacgtactttgtctgactacaatattcaaaaggagtctactcttcatcttgtgttgagacttcgtggtggtgctaagaaaaggaagaagaagtcttacaccactcccaagaagaataagcacaagagaaagaaggttaagctggctgtcctgaaatattataaggtggatgagaatggcaaaattagtcgccttcgtcgagagtgcccttctgatgaatgtggtgctggggtgtttatggcaagtcactttgacagacattattgtggcaaatgttgtctgacttactgtttcaacaaaccagaagacaagtaactgtatgagtt

SEQ ID NO: 176774 - DNA, 796 bp, Homo sapiens
  Payload ID: 14695
  Gene Symbol: RPS27A
  Gene Name: ribosomal protein S27a
  Uniprot ID: P62979
  ENST ID: ENST00000404735
  CDS Start-End: 148-618
ggcgttcttccttttcgatccgccatctgcggtgggtgtctgcacttcggctgctctcgggttagcaccctatggtgccttctcttgtgatccctgacctaacctgtctcttccttttcctcaacctcaggtggagccgccaccaaaatgcagattttcgtgaaaacccttacggggaagaccatcaccctcgaggttgaaccctcggatacgatagaaaatgtaaaggccaagatccaggataaggaaggaattcctcctgatcagcagagactgatctttgctggcaagcagctggaagatggacgtactttgtctgactacaatattcaaaaggagtctactcttcatcttgtgttgagacttcgtggtggtgctaagaaaaggaagaagaagtcttacaccactcccaagaagaataagcacaagagaaagaaggttaagctggctgtcctgaaatattataaggtggatgagaatggcaaaattagtcgccttcgtcgagagtgcccttctgatgaatgtggtgctggggtgtttatggcaagtcactttgacagacattattgtggcaaatgttgtctgacttactgtttcaacaaaccagaagacaagtaactgtatgagttaataaaagacatgaactaacatttattgttgggttttattgcagtaaaaagaatggtttttaagcaccaaattgatggtcacaccatttccttttagtagtgctactgctatcgctgtgtgaatgttgcctctggggattatgtgacccagtggttctgtatacctg

SEQ ID NO: 176775 - DNA, 422 bp, Homo sapiens
  Payload ID: 14695
  Gene Symbol: RPS27A
  Gene Name: ribosomal protein S27a
  ENST ID: ENST00000449323
  CDS Start-End: 105-422
gccacgttgattgtacgggaaaagcctttttaaaacatcttttacgttgcttaaacctacagtttcgaaagcattccgaaggctaaagtggagccgccaccaaaatgcagattttcgtgaaaacccttacggggaagaccatcaccctcgaggttgaaccctcggatacgatagaaaatgtaaaggccaagatccaggataaggaaggaattcctcctgatcagcagagactgatctttgctggcaagcagctggaagatggacgtactttgtctgactacaatattcaaaaggagtctactcttcatcttgtgttgagacttcgtggtggtgctaagaaaaggaagaagaagtcttacaccactcccaagaagaataagcacaagagaaagaaggttaagctggctgtcctgaaatattat

SEQ ID NO: 176776 - DNA, 6434 bp, Homo sapiens
  Payload ID: 14696
  Gene Symbol: RPS27L
  Gene Name: ribosomal protein S27-like
  Uniprot ID: Q71UM5
  ENST ID: ENST00000330964
  CDS Start-End: 398-652
ccgggggctgagcggcccgccgggttccggggtggcgccggccccggtggccgcgggcgctccctcgccatggcctaagcccgaggccgctccccagccagattctggcctcaggcactgcagagcccgcggcgctcgccaacaagcccgttagacccacgggacttggcaccctggaacgctcaccatccccgggtcttccctgcgccctggacccgagtaccctgctgcggcgtccccctaccaccgagaggagggcctagagcagacaagcccgccccgccgctcctcccagcagcttctatcccggaagttgatgccgagcgcagatcgcttgcagcttgctagctgtgtgggctgggaggtctggtagggctgagcttgcaagaggatcaacatgcctttggctagagatttactacatccgtccttggaagaggaaaagaaaaaacataaaaagaaacgcctagtacaaagtccaaattcttactttatggatgtaaaatgtccaggttgctacaagatcaccacggttttcagccatgctcagacagtggttctttgtgtaggttgttcaacagtgttgtgccagcctacaggaggaaaggccagactcacagaagggtgttcatttagaagaaagcaacactaatgattcaaacagcttcctgaattttaattttgtgttgtctcacagaaagccttatcataaattccataattctaattaatttaccaagataatgtaattacatttggttttgtaaggtatacagcagtaatctcctattttggtgtcagtttttcaataaagttttgattatgggcaaatcccctctttttctttttttaaaatatatttgagtatgccatacatttatatatatggtgtatatgaatttggtttaaacattttaaaatttattctgattagtttgtgtctttttttttttttttgagagagagagtcctgctctgtcactcaagctggagtgcagtggtgcgatctcggctcactgcaacctccgcctcccaggtccaagcaattctcttgccttgtcctcccaagtagctgggattataggcacacaccaccatgcctggctaatttgtgtctcattttcaagagtagaaaccctaaatattttattttcattccttttccaaattgctatgaatgggattaaaggattacagatgtaaagtctattatttgtgaattctaaatgtagttctgctgttgtacctgtggaaacatcttaaagaagtacatattttgcacgtcctgcacgtgtaccccagaacttaaactataattaaaaagaatagtttcaaaaaaatacatattgatcacagtgtaatgccttggatttatgtggccttgctatactactatataatttaggacagtaactgctagctggggtgtgagttatttattggaagctcctttttagggtagaaaatttgaggagaaatctgaagtggcatgatttacccgcagaagtcctggttggggatagtagatggtgttgaattctctggcccagataggtgagcactcctgactacagatgtgtgttgagtggttctggtgcctgcctcattgtcattttcatagtttatgaagtaatcctggggagctgagacggggagtgtatccactcactatacaactcctcattggactaggaagatagtccagtttctactctgcttctatttgatttgttaccttgtggcaggtatttaaaacaggcatttcctatcaacaggtaggcctctaatgtgagcaactgatcctcttacatactgcttaaatcagagaactgttgcacaagaactaaagaatgatggcaagtttggggtgtatatagttgtataaggaaggctgggcgcagtggctcacacctgtaatcccagcactttgggagcctgaggcaggtggatcacctgaggtcgggagttcaagaccagcctgaccaacatggaaaaaccccgtctctactaaaaatgcaaaattagctgggcgtggtggtgcatgcctgtaatctcagctaactcgggaggctgaggcaggagaattcgcttgaacctgggaggtggaggttgtggtgagccaagatcgtgccattgcactctagcctgggcaacaagcacgaaactccgtctcaaaaaaaaaaagaaaaaaaaaatatatatatatacatatatatgtagatgacccagagattctcagacttttagtttctgacatcattagaatctcagtaatttttttcaggccattccttggccaaaagaaatacctaacagttacatttattaacttatgttctaacaactctagtagccatttgaaaaaaactatacacacacaagagcaaaagtgatgtgatgatttttttaaaaatagagacagtgtcttggctctattgcccaggttggagggtcatagctcattgtgacctcaaactcctgggctcaagcaagcctcccacctctgcctcctgagtagcggagacttcaggcacgtgccaccacgcccgcctaatttttttgtagagatggggctctggctgtgttgcccaggctgtaaggaactcctggcctcaggtgatctgccttggcctaccaaagtgctgggattacaggtgtgagccactgtgcccagcctgatgtgataatttttatctcatccttaaatcatcacagttactaatggaatgtgtgtgccttttgggctccatacagtttctcaaaattgaaatcagattggacaccattgtccttatttcttccacattgatttttgcatggtgctttttgtcatagcagtggctccaaacccagcttcacaaggataggatgccatcaaagggaatgtagtgccatatcatattgaaactgaacttcctggaactagtagtttatacaaaagatgcgtcagtgtcaagtgtttttcctgaggtactccaaggcacttcagcttgcacagtttaggatacttggctataaggagagacagtgggatgacagcttttgatgagaaggaatcaaacctatgatgaggactaatctaacaaaccctgaaaattcccttggaagtattttttaaaaaaggattatactttaaagaccacatctaagggctgggcgcggtggctcacacctataatcccagcagtttgggaggctgaggcaggcagatcacttgcagtcaggagttcgagaccagcctggccaacacagtgaaaccccgtctctactaaacatacaaaaattagctgggcgtggtggtgtacacctgtagtcccagctacttgggaggctgaggcacaagaattgcttgaaaccaggaggcagaggttgcagtgagccaaaatcgcaccactgcacttcagcctgggtgacagcgtgaagctgtgtctcaaagaaagaacacatctaaggatttacatggcattgggaaacgaatggtgtattaagttttactttattattaatctagatggtattactggttttgaaaagtgctgaataggacaccaggactttcccaaacttcagggtcagccacatacattattatatactgaatgttttaaatattatttatattgacttcatattttaatgtaaatatatttgtaaaggaaaccttccataaacttaatataaatttatttttaggggaaggcttcctaaatggaaaaaccagttacataaagatagctaaaaataggccgggcgcagtggctcacgcctataatcccagcactttgggaggccgaggcgggtggatcacgaggtcaggagatcgagaccaccctggctaacacggtgtaaccccgtctctactaaaaatacaaaaaattagccgggcatggtggtgggcgcctgtagtcccagctacttgggaggctgaggcaggagaatggcgtgaacctgggaggcggagcttgcagtgagccaagatcacgcctctgcactccagcctgggtgacagagcaagactccagctcaagaaaaaaataaataagctaaaaataaaatgaaattcttggcttctggcctgatgagatgacaaatggttttgtgtctggtcgttcctgtaagtcatctgataaagctctaattcctttctgttttatttttctggagatatgattcagatactataaaatccaaacttctgtgatgtaaaagtcagtagtttttactatatttacaaggttgtgcaaccattactactgtctaatcccagaccattttcatcaccttagaaagaaacttcatacctatcagcattcactccctattcttccctcctctcagccattggcagccactaagctacttttgtctccatggatttgcttcttctcaatatttcatataatgctatttcgtataaatggaatcacatggtatgtagcttctgtatgtttcacttagcataatgttttcaagggctgtccatgctgttgcatgtatcaatatttcattcctttttttgacaatattctgtgtaataatatacaatgtttatccattcatcagttgatagatacttagagtgttttcactttttatttatttatttttgagatggagtcttgctctgttccctaggtggagtgcagtggcgtgatctcagctcactgcaacctcctccacctcccaggcttgagtgaccctctggcctcagcctcccgagtagctggaactacaggcacgtgccaccacaccccgctaattttttgtattttttgtagagatggggtttcgccatgttgcccaggctggtcttgaactccttgcctcaggccatccgcccacctcagcctcccaaagtgctggcattacaggtgtgagccactgcatccggccaaataaagtattcttaatgacatctgcaaaatccattttgctatgtaaggtaacatattcgtaggttctggggattagggtgtgggaatctttagagggccattattctgctaccacagaatataaagttgtaaaattctaccccatatttggaaactgagattcttaaattatgtctttgtaattctcttttttctttttctttcttttttttttttttttttgagacggagtcttgctccgtcgcccaggctgaagtgcagtggcgcaatctcagttcaccgcaagctcctcctcctgggttcacgccattctcctgcctcagcctccagagtacctgagactacaggcgtgtgccaccacgccgggctaatttttttaaagtatttttagtagagatggggtttcaccgtgttagccaggatggtctcgatctgctgacctcgtgatccgcctgcctcggcctctcatgtcttcgtaattttccatggaaaaaaacttaaatctttggaaggaatagagtacattattgcattttacaaagaaaaggataacttttatagaataatgaccttgtattcttttaggattttacagctactttttcacaactataggcatagaaaatgacatcaggggccgggcgcggtggctcacgcctgtaatcccaacactttgggaggcccaggcggcggatcacgaggtcgagattgagaccatcctggccaacatgatgaaaccgcgtctctgctaaaaatacaaaaattagctgggcgtggtgtcgggcgcctgtagtcccagctactcgggaggctgaggcaggagaattgcttgaacctgggaggcggagcttgcagtgagcccagatcgtaccactgcactccagcctgggcgacagagcaagactgtctcagaaaaaaaaaaaaaaaaaaaaaaaagaaatgacatcaggtcatggtgtttgctattgatcgacacttaaatagcctttgaattttgtttcaaaggagatgccagaattgcaaattttctctgctgatttgtgtcctactgattctggctcgctttccccctacactactagggctactctcactttcacacctagcaaaacttcacctttcaaagaatttaggcagaatagtcctaatttagttaataagctttcattttaaatcttagggaagcagtgttagtttcagttattctataggaacagaaattggagctgccacagccttttgaaccagagcccggcagaccctcagcttcagccctgctcagtgttttgtgtctatgaaagtctttttaattttctcattacacattttatatatcatgctatgtatttagaacagaggggttgtgtaagattatgactctatgttctttatcttgtctttgtattaatttgaagttgtgttttttctttatttgtagccaactaattaaaataccaacatatttatttttattcatttttatgtgacaaacttttaaactgaagactgcatcaataaaattgcatgccattaaatatg

SEQ ID NO: 176777 - DNA, 970 bp, Homo sapiens
  Payload ID: 14696
  Gene Symbol: RPS27L
  Gene Name: ribosomal protein S27-like
  ENST ID: ENST00000439025
  CDS Start-End: 95-388
atcccggaagttgatgccgagcgcagatcgcttgcagcttgctagctgtgtgggctgggaggtctggtagggctgagcttgcaagaggatcaacatgcctttggctagagatttactacatccgtccttggaagaggaaaagaaaaaacataaaaagaaacgcctagtacaaagtccaaattcttactttatggatgtaaaatgtccaggttgctacaagatcaccacggttttcagccatgctcagacagtggttctttgtgtaggttgttcaacagtgttgtgccagcctacaggaggaaaggccagactcacagaaggtatatcatttggcattctccaacccagtgatgagattgatgattataaatgtctctatcttcactgaaaagtttaaagaaatcttaatgattaccaaaataacttatctttcattgtgtgctttcagtaaagaatggcctgttcaaatggatatatttatactcttgaccttgcagtgaactccattgacttatttttcttagtttagaacacatttattcacttagtttgcttaacttggaataaattaagtcagaatagaagcaaaagaataactacatgttataggacatgcagatttatttatttatttatttattattttttttttttattaggagtctcgctctgtcacccaggctggagtgcagtggcgccatctcagctcactgcaacttctgcctccccggttcaagtgattctcttgcctctgcctcccaagtagctgggaccacaggcgcgtgccaccatgcctggctaattttttgtatttttagtagaggtggggtttcactgtgttagccaggatggtcttgatctcctgacctcatggtctgcccgcctcggcctcccaaagtgctgggattacaggcatgagccacctcgccggccaggacatacagatttttaaaaccatatagaattttaa

SEQ ID NO: 176778 - DNA, 528 bp, Homo sapiens
  Payload ID: 14696
  Gene Symbol: RPS27L
  Gene Name: ribosomal protein S27-like
  ENST ID: ENST00000411926
  CDS Start-End: 197-355
agaacaaagcaaacctaaggcacagccataccccgcagaaaacttcgaaatctgcgccttgaaaagggaagccaaaaggatacgagcctctttcataatctctctgttggctagagatttactacatccgtccttggaagaggaaaagaaaaaacataaaaagaaacgcctagtacaaagtccaaattcttactttatggatgtaaaatgtccaggttgctacaagatcaccacggttttcagccatgctcagacagtggttctttgtgtaggttgttcaacagtgttgtgccagcctacaggaggaaaggccagactcacagaagggtgttcatttagaagaaagcaacactaatgattcaaacagcttcctgaattttaattttgtgttgtctcacagaaagccttatcataaattccataattctaattaatttaccaagataatgtaattacatttggttttgtaaggtatacagcagtaatctcctattttggtgtcagtttttcaataaagttttgattatg

SEQ ID NO: 176779 - DNA, 923 bp, Homo sapiens
  Payload ID: 14696
  Gene Symbol: RPS27L
  Gene Name: ribosomal protein S27-like
  ENST ID: ENST00000455271
  CDS Start-End: 586-744
aggttgcgcagcgtcttcgcgcgtggcgggcatgtagtgacttgcccggtcaccgcggcgcggctggccctgcaggggcgtgggctgcaattcagaggcggtggctgggaggggaacagttctctgtgtagcttatgagcggtcttggtctttgaggatgcccctgaggttgtgatctttgggtcttttggctttcccagtgattggtgtttctcgccccctctgccttctttcggaagcgatttcctacttgttttccttttttaaaaactgtcctcgttgttgccttatatattaattccgtcaaggacggtcgctcagcaagaattcctgtcagatcagctgttgagccacaggagcaaaaatcacccaggcgctgacgttgtctggtctacttcagcagtttctactctaagcgagtccacagtcggggtcactttctttgcttagcacctcgacttcgcgcagttttcatcgaagacagttcattacgcattggctagagatttactacatccgtccttggaagaggaaaagaaaaaacataaaaagaaacgcctagtacaaagtccaaattcttactttatggatgtaaaatgtccaggttgctacaagatcaccacggttttcagccatgctcagacagtggttctttgtgtaggttgttcaacagtgttgtgccagcctacaggaggaaaggccagactcacagaagggtgttcatttagaagaaagcaacactaatgattcaaacagcttcctgaattttaattttgtgttgtctcacagaaagccttatcataaattccataattctaattaatttaccaagataatgtaattacatttggttttgtaaggtatacagcagtaatctcctattttggtgtcagtttttcaataaagttttgattatgggcaaa

SEQ ID NO: 176780 - DNA, 681 bp, Homo sapiens
  Payload ID: 14696
  Gene Symbol: RPS27L
  Gene Name: ribosomal protein S27-like
  ENST ID: ENST00000462430
  CDS Start-End: 200-502
aggacaaagtttgccttaccatatgtttcctgatcgtgcgaaagcccttttctagggacttggagaacacaagtattatgaaaagtactgatgaaagttattaacaggtttcgaaaaataactttactatctgacgtgttgcttctgccgaggatgaccgttattcctgtttttgcatgtatatttcacgtatggttaaatgtgccagcgttgtggtttaaaactaatagtaataatatgcttctttgttcagttggctagagatttactacatccgtccttggaagaggaaaagaaaaaacataaaaagaaacgcctagtacaaagtccaaattcttactttatggatgtaaaatgtccaggttgctacaagatcaccacggttttcagccatgctcagacagtggttctttgtgtaggttgttcaacagtgttgtgccagcctacaggaggaaaggccagactcacagaagggtgttcatttagaagaaagcaacactaatgattcaaacagcttcctgaattttaattttgtgttgtctcacagaaagccttatcataaattccataattctaattaatttaccaagataatgtaattacatttggttttgtaaggtatacagcagtaatctcctattttggtgtcagtttttcaataaagttttgattatgggcaaa

SEQ ID NO: 176781 - DNA, 693 bp, Homo sapiens
  Payload ID: 14696
  Gene Symbol: RPS27L
  Gene Name: ribosomal protein S27-like
  ENST ID: ENST00000635699
  CDS Start-End: 356-514
gcagatcgcttgcagcttgctagctgtgtgggctgggaggtctggtagggctgagcttgcaagaggatcaacatgcctgacggtcgctcagcaagaattcctgtcagatcagctgttgagccacaggagcaaaaatcacccaggcgctgacgttgtctggtctacttcagcagtttctactctaagcgagtccacagtcggggtcactttctttgcttagcacctcgacttcgcgcagttttcatcgaagacagttcattacgcattggctagagatttactacatccgtccttggaagaggaaaagaaaaaacataaaaagaaacgcctagtacaaagtccaaattcttactttatggatgtaaaatgtccaggttgctacaagatcaccacggttttcagccatgctcagacagtggttctttgtgtaggttgttcaacagtgttgtgccagcctacaggaggaaaggccagactcacagaagggtgttcatttagaagaaagcaacactaatgattcaaacagcttcctgaattttaattttgtgttgtctcacagaaagccttatcataaattccataattctaattaatttaccaagataatgtaattacatttggttttgtaaggtatacagcagtaatctcctattttggtgtcagtttttcaataaagttttgattatgggcaaa

SEQ ID NO: 176782 - DNA, 1326 bp, Homo sapiens
  Payload ID: 14697
  Gene Symbol: RPS28
  Gene Name: ribosomal protein S28
  Uniprot ID: P62857
  ENST ID: ENST00000600659
  CDS Start-End: 32-241
ctctccgccagaccgccgccgcgccgccatcatggacaccagccgtgtgcagcctatcaagctggccagggtcaccaaggtcctgggcaggaccggttctcagggacagtgcacgcaggtgcgcgtggaattcatggacgacacgagccgatccatcatccgcaatgtaaaaggccccgtgcgcgagggcgacgtgctcacccttttggagtcagagcgagaagcccggaggttgcgctgagcttggctgctcgctgggtcttggatgtcgggttcgaccacttggccgatgggaatggtctgtcacagtctgctccttttttttgtccgccacacgtaactgagatgctcctttaaataaagcgtttgtgtttcaagttaactcaggttcttgtctgggttatacgactagggtttctccaggtttcttgagtggctcccaggcggtcaccgatcctccgcactctggaaatcctggccgtgcggtcttgccaaacgaagcttttcctttttgaggcggggggtcgtgtttgtcgattgcaccctctaccccaaacaaaacacaagcgtagtaggaatgttttattagcaaagaagtttcagagagtgggtggatcagggctctatcacttggtccccacctcaccttggtggggccagagtgagccccttcctgccacagtcaccccaactgaaattgcctttctcttcggccagtgttagcctctgagcaggggaccctggacccttctgtgcgccaaaggctgaggtgactgacgaggagatctccccacagctaggtgtagtgagccagacgaggcagcttactgaacctgggggttctctccattgtcaccgcattctccttcaccaggtgtggctgtctgggagccagggggtgactcgctctggagagaggggaaaagaggggggcctgctgcaatctccttgaggcaggaaacgtgggattcagccccagcctcacttagtggaggttcttttaccatggacccaggctgcctggtttgtatccaacctctgccccttctgacctggaagaggcgcttgaccttcctcccacatcccttccagtggggtgagtacaggtgttcctcagtttacaatgggttacattccggtgagtacatcataggttgaaagtattgcaagttgaaatgtgtttaatacacctaatctcccaaacatcacagcttagcatggtccatcttaagcttgttcagaacgccttagcctgtagttggggaaactcgtctaacacgaagcctgttttaataaagtattgaatgtcttatgtaatttattgaa

SEQ ID NO: 176783 - DNA, 296 bp, Homo sapiens
  Payload ID: 14698
  Gene Symbol: RPS29
  Gene Name: ribosomal protein S29
  Uniprot ID: P62273
  ENST ID: ENST00000245458
  CDS Start-End: 31-201
cttttacctcgttgcactgctgagagcaagatgggtcaccagcagctgtactggagccacccgcgaaaattcggccagggttctcgctcttgtcgtgtctgttcaaaccggcacggtctgatccggaaatatggcctcaatatgtgccgccagtgtttccgtcagtacgcgaaggatatcggtttcattaagttggactaaatgctcttccttcagaggattatccggggcatctactcaatgaaaaaccatgataattctttgtatataaaataaacatttgaaaaaacccttca

SEQ ID NO: 176784 - DNA, 7062 bp, Homo sapiens
  Payload ID: 14698
  Gene Symbol: RPS29
  Gene Name: ribosomal protein S29
  Uniprot ID: P62273
  ENST ID: ENST00000396020
  CDS Start-End: 31-234
cttttacctcgttgcactgctgagagcaagatgggtcaccagcagctgtactggagccacccgcgaaaattcggccagggttctcgctcttgtcgtgtctgttcaaaccggcacggtctgatccggaaatatggcctcaatatgtgccgccagtgtttccgtcagtacgcgaaggatatcggtttcattaagaaagacctgagctgtcttccttggcactgcctatggaggtgacacccatctcctccatcatggccatcctgagaccgctcgcgaagcccaagatcatcaaaaagagcaccaagttcactgggaaccagtcagactgatatgtcaaaattaagggtaactggtggaaacacagaggtattaacaacagggttcatagaaggtttgagggccagatctatgcccaacattggttatgggagaaacaaaaagacaaagcacatactgcccagtggcttctggaagttcctggtccacaacgttaaggagctggaagtactgctggtgagcaacaaatcttactgtgttgagatcactcatgatgtttcttccaagaactgcaaagccatcttggaaagagcagcccaggtggtcatcagagtcaccaatgccaatgccagcctgcacagtgcagaaagtgaatagacagtgaatgtgtttgttttattggggtttaaataaaaccaataaaactgtaaaaacaaaaacaacaaaaaccagagaccctggcttttggacagttgttcgtgtggctaatgcccccaacagttttattttttaaaattttatttatgtattgtttttgagatgaagtcttcctctgactggagtgcagtgatgcaagctcagctctctgcaacttccacctcccaggttcaagtgattcttctgtctcagcctcccaagtggctgggattacaggtgcccactaccacacctgactaatttttgtatttttgtagagatggggtttcatcctcttggccaggctggtttcgaactcctgacctcaagggatcctcccacctcagcttcccaaagtgctgggatcacaggcttgtattagttcattttcacactgctgataaagacatacctaagactgggaagaaaaataggtttattggactcacagttccatgtggctggggatgcctcacaattatggtagaaggcaaaaggcacttcttagatggcagcggcaagcaggaaatgaggaagacatgaaagcagatatcccttataaaaccatcagttctcgtgatacttactcactaccatgagaaagtatgggggaaaccgctcccatgattcagttatctcccaccgggtccctctcacaacatgtggggattatgcgagtacaattcaagatgagatttgggtggggacacagcccacaaaccataatcaaggcatgagccactgtgcctggccttcaacagttttaaagcagcctgcttgcataacctctgctaggacatcgttcttaaaaactatctttaatggtaattggtgtattagggatttgggtttttaggtaggcagagaaaaaacacttctagtggtatgattaagaagggtataataaagtgttttaatttcctcaatattgacaaaaattgaaaaaaagaggccaggcaaagtggctcatgcctgtaatcctagccttttgggaggctgaggcaggaggatggtttgatgccaggagttccagaccagcctgggcaacatcaggagatcccctatctaccaaaattaaacaaacaaaaaaacccaaaaacaattagccaggcgtggtggtgcatgtctgtagtcccagtttctcaggaggctgagatgagaggataacttgagcccaagaggtccaggtttcaatgagtcatgtttgtatcacttaaaaaaaaaaaaaaggctgcactattagctgtttctcaggaaggttaatgtagaacataaaaggctcagtttgtagatagactgagtatatgtgtgtgtaggaatcaaggctatacagggtccaaaaattagcctagattatgtgtgctagttccaggtatcttctatcttttagaattttaaaagaatagaggcagaaagtcacaagcttaatctagatgaggtaattatcatttaatgtcttgaacataaagtaatttgctaaattagaatttattttaatttttttggacatggccttgctctatcacccagactggcattcagtggcacaaacatggcttattgcaacctcaacctcctgggctcaagtaatcctcctacctcagactccaagtagctaggaccataagtgtgcaccacaatgcccagctaatttttataaaatttttcgtagagatggaagtctcaccatgttgctcaggctggtctggaactcctgggctcatgcaatcctcccttcctagtctcccaaagtgttgggatcacaggggtgagccactgtgttcagccagaaaataatttagagaagccagaactggcttcctttggtgaaaattctttgagcagattccagactggaccttctgactgttataaataaatggtggattcccattatttgtttgtgggacagaaatattgaaggcctgtagaaccataatgccttccccttccttctgtcactcacccacttcatttctcctattaggccccttagaaagagatccctgatgccaggcacagtggcttacgcctgtaatcctagcagtttgggaggctgaggcgggtggatcacctgaggtcaggagttaaagaccagcctggccaatgcagtgaaaccccatctttactaaaaatacaaaaaaattagccaggcatggtggcgagtgcctgtaatctcagctactcaggaggctgaggcaggagaatggcgtgaacccgggaggcggagcttgcagtgagcggagatcaggccgctgcactccagcctgggcgacagagcgagactccgtctcaaaaaaaaagataaagaaagagatccctgactgcctgtatagtttgagaaccactgatcctggggcaaggactcaaagtctctggctctagaagtggctggtgtggacctcaaatggaccctgttctaagagtccaaaggacacatttcaggaagctgtgctctaagcctaaatgaccaaccttgccttcactttggacatataccatctgatcatcttcctcgatttctgttctttgctcaggccttccaatttcttcgtgggtgacccctccttaccagtgctttgctctgagtcagctcaccagacccagcaggctgccactaaaggtttattgtaaaaccttgattaattcagataaccttgaaatacttacataacatcactgacaaataggaaagggagtgcatttccattgatagagactatggctagagttactaaggtctggaaaaaaggcaggagagtgaagtatctggagacgtagggagagaaagagactggtgttaagagaaaaatcacgcctttttcctgcttgtatcttacagtggttctgccaccagtaatgcaggatcccactgatctctctgaacacattttaggacaggtccatattcgggagctgactttgtaacttcttactgtatatagtttaggttcgaatgggatcaccataggtgtgcttatgaccttaactgtaacagcgatgaaataaaaaaaatggtttagtttaataataatgttgtaagagtgtaagtaccagtagcttcatgtacattctacaacccaataataattatgctgaccgtgtaaacagctccctcgtgtagactgagactccattgccaaacatcaagcattaacagcaagtgctagaaaaatcaataagcctttacccagggaaccaaagatatgtgggttactaaaacccctaacagttgcccataaagagtaatatctcattattttaatgccaaaggaggtttttgtttcatttcctaaataataacaagatcgcatattaaaggacgagttgatggagtgataaacattcctggcagcacagacaaatcaacaagagactaaaataaaaagaaatgaaacttgcctcttggcaatctgtttagttgaatttcatagactgagtctggttcaccctggattttcttttcacacacccacacgtcccatttcatgatgacacttgtgcatctattcttcctttgatggtaattaactcttattaacattcatgaagactaagtgtgagcctctagcacagatgacatattcagacaaccacaaaaagatagggtttataaaaactaatgcatatttggaactgaggccaaaagataaagatggtccactccaacagtgctgacatgcttgagaaatccaaggggtgttgacctaatgtaaaaaggatataggagacaaattttaccattgtgtaattttgtcttaggccagttctgtcaaatatagcttctgaaattctgaatagtcctctgcccagtgtggtttaattgttggtgttgtcaggactcttggggagaagtcacctttctcttttttttttttttttttttgattctaactctgttgtccaggctggagtgcagtggtgccatcttggctcactgcagcctctgtctcctgggttcaagagattctcctgccttaacttagcctctggagtagctgggattacaggtgcgcaccattacatccagctaatttttatatttttagtggagatggggttttgtcatgttggccagtctggtctcaaactcctgacctcaaggatctgtctgctttggtctcccaacgtgctgggattacaggcatgagccaccacgcccagcctatttttttattttttgtattttcttttggtaatctctttctcttgctttttctttctttctctttctttctttctttctttccttctttctttctttctttcttcttttttttctttggagacagggtctcactgtgtcatgcaggctggagtgaagtcgtgtgatcttggcttactgcagcctcaacctgctgggctcaatgcaatcttcccacctcagcctcccaagtatctgggaccacaggcgtgcatcaccagcatggctaatttttgtatttttggtgagacaaacttttgccatgttgcccaggttggccttaaattcctgggctcaagagatccacctgccttggcctcccaaaatgctaggactgcaggcgtgagccaccatgccaggccagggaaatctctttaaacacaattttctttaaagttttctacatggtcaggagacttcattatctgatttctgagtactatagcttctttattgccaagggagcaaagcatgatgacaatgaccacttctcatttgtgtccttcattatagattttctaaatacacttgttccttgttaatgactttaatttgttccagaaaactccaccactgagttaaaagctattaagtgaaaaaattccattaagttttcggaaaaaattatttattctatgacactacagggtacttgagtaattttcacaaaaagaagaatatactagttaaactttgaaaaaaagctcataaaagtaatgtacaataatttgaaagtattctgacctcaaccggtatattgaaattcaattcttgcactaattagggttagagaagaccccacaagttaaagggcatgatcccaaacgaggttgtcctcacttttgatgccagtcacactttgggagtccccagtcaattggctacaaatctaggggtttggctgggtgccgtggctcacacctgtaatctgagcacattgggaggccaaggcaggtggatcacctgaggttaggagttcgagagcagcctggccaacaccgtgaacctcgtatctactaaaaatacaaaaattagccgggcatggtggcagtcacctgtaatcccagctacttgggaggctgaggcacgagaatcgcttgaacctgggaggcagaggttgcagtgagctgagatggtgccactgcacttcagcctgggcaacagagtgagactgggtctcaataaaaaataaaaataaaataaaacaataaaacgtaggggtttctgaagatttccttcaggtttgccgatttgctagaatgactcacattactcaggaagatgctgtatttacaattgttttattatgaaggatataagttaggaccagccaatggagagacacataaagtaaggtctaggagggcgctggatgcgaagctttcatgtcctgcattgtggaatcgggtgtgtcaccctctcaacacattgatatgttcaccaaccaggatgcttcaccatgcttcggtatctaaagtttttattggggtttcattatatatgtataattgattgaatcactggccaagtgattgaactaaatctccaccctaccccttactctgggtgtcaggctgactcaaagcaccagctatgtaatcacatggttgttctcgctggtaactggcctccatcttgggtcatctcatcttccagcccaaattcaggtgtgatccaagaggctcatgaaaaacaaagatatccctgttacttagggaattctaattattttgagtctgcctcctaggaaccagagacaaaagccagtcaaattctttactataaaacagaaagcatgtgaaaacatactgtgcacgctatgtcacacaacaaacacaagtctattgaacttgccaatggtggagtgttggttggtaggagaggtctgagggcatcattctttgcaaagtgtattctttctgtaccattttcttgaccaattttcaccttttctggggattattcctgttttgcactcaaactactcttaaaaataaagttacagtgcaggaaaacttctttagggcacaataaaggctaaactcgtggaaatggtactcattcatctgcacagaatgaagtctctcaagatgtttccttttattcctactcagttggtgcatgtacccaaaataaacattttgagttcatccaaacacaattca

SEQ ID NO: 176785 - DNA, 488 bp, Homo sapiens
  Payload ID: 14698
  Gene Symbol: RPS29
  Gene Name: ribosomal protein S29
  ENST ID: ENST00000557111
  CDS Start-End: 239-400
gttcggggaggattccgagggtttcagctgttgacgctttacgcgttgcgggcgcacgtcgggccgctgtttcccgagggaaggcaggtgtgcctctgcgttacagggaaaggcacttagaactgtctgagtggccccgtaagccagcgagggcgcatttcccggcgcggacgggctgctggtggttttggtggctgctctccggaggcacacctggcacgtcgaaggggggctttatatggctgtatttgacttggcaattcctgctgaacaaataatttttcatggcggtcgtgtctgttcaaaccggcacggtctgatccggaaatatggcctcaatatgtgccgccagtgtttccgtcagtacgcgaaggatatcggtttcattaagttggactaaatgctcttccttcagaggattatccggggcatctactcaatgaaaaaccatgataattctttgtatataaaataaacatttgaaaaaa

SEQ ID NO: 176786 - DNA, 238 bp, Homo sapiens
  Payload ID: 14698
  Gene Symbol: RPS29
  Gene Name: ribosomal protein S29
  Uniprot ID: P62273
  ENST ID: ENST00000611563
  CDS Start-End: 71-238
ctcaaaaatttgaagagcgcatgcgtgggccagcttcttccttttacctcgttgcactgctgagagcaagatgggtcaccagcagctgtactggagccacccgcgaaaattcggccagggttctcgctcttgtcgtgtctgttcaaaccggcacggtctgatccggaaatatggcctcaatatgtgccgccagtgtttccgtcagtacgcgaaggatatcggtttcattaagctagat

SEQ ID NO: 176787 - DNA, 907 bp, Homo sapiens
  Payload ID: 14699
  Gene Symbol: RPS3
  Gene Name: ribosomal protein S3
  Uniprot ID: P23396
  ENST ID: ENST00000278572
  CDS Start-End: 19-798
gcggagcgcggcggcaagatggcagtgcaaatatccaagaagaggaagtttgtcgctgatggcatcttcaaagctgaactgaatgagtttcttactcgggagctggctgaagatggctactctggagttgaggtgcgagttacaccaaccaggacagaaatcattatcttagccaccagaacacagaatgttcttggtgagaagggccggcggattcgggaactgactgctgtagttcagaagaggtttggctttccagagggcagtgtagagttgaaaataatggtgatggtaacaggatatcccttgcttcctttaaagctttatgctgaaaaggtggccactagaggtctgtgtgccattgcccaggcagagtctctgcgttacaaactcctaggagggcttgctgtgcggagggcctgctatggtgtgctgcggttcatcatggagagtggggccaaaggctgcgaggttgtggtgtctgggaaactccgaggacagagggctaaatccatgaagtttgtggatggcctgatgatccacagcggagaccctgttaactactacgttgacactgctgtgcgccacgtgttgctcagacagggtgtgctgggcatcaaggtgaagatcatgctgccctgggacccaactggtaagattggccctaagaagcccctgcctgaccacgtgagcattgtggaacccaaagatgagatactgcccaccacccccatctcagaacagaagggtgggaagccagagccgcctgccatgccccagccagtccccacagcataacagtttcttacttttgtgctttatttggtttcagggtctccttggcagctgtattctggagtctggatgttgctctctaaagacctttaataaaattttgtacaaagac

SEQ ID NO: 176788 - DNA, 903 bp, Homo sapiens
  Payload ID: 14699
  Gene Symbol: RPS3
  Gene Name: ribosomal protein S3
  ENST ID: ENST00000422465
  CDS Start-End: 276-586
tttcctttcagcggagcgcggcggcaagatggcagtgcaaatatccaagaagaggaagaacacagaatgttcttggtgagaagggccggcggattcgggaactgactgctgtagttcagaagaggtttggctttccagagggcagtgtagagctttatgctgaaaaggtggccactagaggtctgtgtgccattgcccaggcagagtctctgcgttacaaactcctaggagggcttgctgtgcggagggcctgctatggtgtgctgcggttcatcatggagagtggggccaaaggctgcgaggttgtggtgtctgggaaactccgaggacagagggctaaatccatgaagtttgtggatggcctgatgatccacagcggagaccctgttaactactacgttgacactgctgtgcgccacgtgttgctcagacagggtgtgctgggcatcaaggtgaagatcatgctgccctgggacccaactggtaagattggccctaagaagcccctgcctgaccacgtgagcattgtggaacccaaagatgagatactgcccaccacccccatctcagaacagaagggtgggaagccagagccgcctgccatgccccagccagtccccacagcataacagggtctccttggcagctgtattctggagtctggatgttgctctctaaagacctttaataaaattttgtacaaagacacaaggtctgactagactgttcagtattcagactgaggggcatgttggcctctggagcattacatatcttcttggttttaaccatacttgtggtatttgcaagggccagaacagtaagacccaagcagagccaaccagagaaataatatttgtgtgatagagaaggctgatagcaagcaaggcagcaccttgattc

SEQ ID NO: 176789 - DNA, 771 bp, Homo sapiens
  Payload ID: 14699
  Gene Symbol: RPS3
  Gene Name: ribosomal protein S3
  ENST ID: ENST00000526248
  CDS Start-End: 1-408
caaatatccaagaagaggaagtttgtcgctgatggcatcttcaaagctgaactgaatgagtttcttactcgggagctggctgaagatggctactctggagttgaggtgcgagttacaccaaccaggacagaaatcattatcttagccaccagaacacagaatgttcttggtgagaagggccggcggattcgggaactgactgctgtagttcagaagaggtttggctttccagagggcagtgtagagctttatgctgaaaaggtggccactagaggtctgtgtgccattgcccaggcagagtctctgcgttacaaactcctaggagggcttgctgtgcggagagtggggccaaaggctgcgaggttgtggtgtctgggaaactccgaggacagagggctaaatccatgaagtttgtggatggcctgatgatccacagcggagaccctgttaactactacgttgacactgctgtgcgccacgtgttgctcagacagggtgtgctgggcatcaaggtgaagatcatgctgccctgggacccaactggtaagattggccctaagaagcccctgcctgaccacgtgagcattgtggaacccaaagatgagatactgcccaccacccccatctcagaacagaagggtgggaagccagagccgcctgccatgccccagccagtccccacagcataacagggtctccttggcagctgtattctggagtctggatgttgctctctaaagacctttaataaaattttgtacaaagacacaa

SEQ ID NO: 176790 - DNA, 737 bp, Homo sapiens
  Payload ID: 14699
  Gene Symbol: RPS3
  Gene Name: ribosomal protein S3
  ENST ID: ENST00000532872
  CDS Start-End: 19-366
gcggagcgcggcggcaagatggcagtgcaaatatccaagaagaggaagtttgtcgctgatggcatcttcaaagctgaactgaatgagtttcttactcgggagctggctgaagatggctactctggagttgaggtgcgagttacaccaaccaggacagaaatcattatcttagccaccagaacacagaatgttcttggtgagaagggccggcggattcgggaactgactgctgtagttcagaagaggtttggctttccagagggcagtgtagagggcctgctatggtgtgctgcggttcatcatggagagtggggccaaaggctgcgaggttgtggtgtctgggaaactccgaggacagagggctaaatccatgaagtttgtggatggcctgatgatccacagcggagaccctgttaactactacgttgacactgctgtgcgccacgtgttgctcagacagggtgtgctgggcatcaaggtgaagatcatgctgccctgggacccaactggtaagattggccctaagaagcccctgcctgaccacgtgagcattgtggaacccaaagatgagatactgcccaccacccccatctcagaacagaagggtgggaagccagagccgcctgccatgccccagccagtccccacagcataacagggtctccttggcagctgtattctggagtctggatgttgctctctaaagacctttaataaaattttgtacaaagacacaa

SEQ ID NO: 176791 - DNA, 796 bp, Homo sapiens
  Payload ID: 14699
  Gene Symbol: RPS3
  Gene Name: ribosomal protein S3
  ENST ID: ENST00000530721
  CDS Start-End: 30-164
ctttcctttcagcggagcgcggcggcaagatggcagtgcaaatatccaagaagaggaagtttgtcgctgatggcatcttcaaagctgaactgaatgagtttcttactcgggagctggctgaagatggctactctggagttgagaacacagaatgttcttggtgagaagggccggcggattcgggaactgactgctgtagttcagaagaggtttggctttccagagggcagtgtagagctttatgctgaaaaggtggccactagaggtctgtgtgccattgcccaggcagagtctctgcgttacaaactcctaggagggcttgctgtgcggagggcctgctatggtgtgctgcggttcatcatggagagtggggccaaaggctgcgaggttgtggtgtctgggaaactccgaggacagagggctaaatccatgaagtttgtggatggcctgatgatccacagcggagaccctgttaactactacgttgacactgctgtgcgccacgtgttgctcagacagggtgtgctgggcatcaaggtgaagatcatgctgccctgggacccaactggtaagattggccctaagaagcccctgcctgaccacgtgagcattgtggaacccaaagatgagatactgcccaccacccccatctcagaacagaagggtgggaagccagagccgcctgccatgccccagccagtccccacagcataacagggtctccttggcagctgtattctggagtctggatgttgctctctaaagacctttaataaaattttgtacaaagacacaa

SEQ ID NO: 176792 - DNA, 473 bp, Homo sapiens
  Payload ID: 14699
  Gene Symbol: RPS3
  Gene Name: ribosomal protein S3
  ENST ID: ENST00000528439
  CDS Start-End: 31-306
cctttcctttcagcggagcgcggcggcaagatggcagtgcaaatatccaagaagaggaagtttgtcgctgatggcatcttcaaagctgaactgaatgagtttcttactcgggagctggctgaagatggctactctggagttgaggtgcgagttacaccaaccaggacagaaatcattatcttagccaccagaacacagaatgttcttggtgagaagggccggcggattcgggaactgactgctgtagttcagaagaggtttggctttccagagggcagtgtagagcattgtggaacccaaagatgagatactgcccaccacccccatctcagaacagaagggtgggaagccagagccgcctgccatgccccagccagtccccacagcataacagggtctccttggcagctgtattctggagtctggatgttgctctctaaagacctttaataaaattttgtacaaagacacaa

SEQ ID NO: 176793 - DNA, 1878 bp, Homo sapiens
  Payload ID: 14699
  Gene Symbol: RPS3
  Gene Name: ribosomal protein S3
  ENST ID: ENST00000530164
  CDS Start-End: 30-383
ctttcctttcagcggagcgcggcggcaagatggcagtgcaaatatccaagaagaggaagtttgtcgctgatggcatcttcaaagctgaactgaatgagtttcttactcgggagctggctgaagatggctactctggagttgaggtgcgagttacaccaaccaggacagaaatcattatcttagccaccagaacacagaatgttcttggtgagaagggccggcggattcgggaactgactgctgtagttcagaagaggtttggctttccagagggcagtgtagagctttatgctgaaaaggtggccactagaggtctgtgtgccattgcccaggcagagtctctgcgttacaaactcctaggagggcttgctgtgcggaggtaagtgtcctgagacctaatggtcatgaccttttgtgtgtatcaacatacatgtctgccatttgttaatttagcagatgaactgttacaaagttacaggatctgctagtctcccagggttataataagatactaagtcatgccctcactgaactggcaggctaacaagactactaaagcagcaagaactgtaaagggtggtcagtcctgtaatggagaagtgttctgggtgctttgggagttaaacacaaatagaactgtccaaggaggggaccaactcctgttggtcttcttgagaaggctttacaaagagccctgttgcggggggcggggcagtgggcaatgaggaataattaggcctgttactgggtgtgttacgtatccctaggtagaagtgccttagtactagttaggataccatgaaactttagtagcaatcattcaaatctgcttagtgtgttcactcttaagatggtattgtgaagagataagatagacctgatgcaaaatagcttaaaatctagacacttaacctctgagttgcatgcagatagtagtaatgtgagggtctactggtaagatttcaacaggaagttctttgtgcagtttgactgtatgtaaaggcactgaaatgccttgcctagaggaatgacaggaaagctgtgctgtaggaaggttgactggtagggatgggtagtgtaggcaaggctctaggtaaggacatagaaaagacggcttacctggtttgagtgccagctaggctgcttagaacaatggttctcaagattaatgccagccccagacccaccaaatgggaaactggatgtgtgactcagcaatctgtcttaataacccctccacatgctgtttgcacacattgaagcaagttaatgaacctctcagcctgggatctgttatcttctaaggtggaccattataccacctctcagttgtggaatattaagtaagataatgtgaaagggcctggaggtggctagctctccagttagtatctcgcagagcgtaaactgccgaatgagttggggggtaggtcatattttaaagtgttttatcagcgttctaatagcaagatagccaggatcctaggtgggtaagctttcctagtgaatgagacttcggaggttgcagagtatttcaagggaccacaaagtgggtaattgtggagtgtaaatgtggttctcagttttggttatacatgagaatcacccagggagcatttttaaatagatattcctggactttgcacatttaattggcctagagtagggcctagatgtcagggtttcttttgttttttattttagccttctgaggtgattccagtatgcagccagggttggaaagtacatatttaggagcttgacatacttgatgaatattaccctaaggttcggaatgataggtgtggaagagaattggtattcttggggccggactctggtcaaattattctccattaaaggaacattgaaaaccaa

SEQ ID NO: 176794 - DNA, 710 bp, Homo sapiens
  Payload ID: 14699
  Gene Symbol: RPS3
  Gene Name: ribosomal protein S3
  ENST ID: ENST00000526608
  CDS Start-End: 12-707
gcggcggcaagatggcagtgcaaatatccaagaagaggaagtttgtcgctgatggcatcttcaaagctgaactgaatgagtttcttactcgggagctggctgaagatggctactctggagttgaggtgcgagttacaccaaccaggacagaaatcattatcttagccaccagaacacagaatgttcttggtgagaagggccggcggattcgggaactgactgctgtagttcagaagaggtttggctttccagagggcagtctgtgtgccattgcccaggcagagtctctgcgttacaaactcctaggagggcttgctgtgcggagggcctgctatggtgtgctgcggttcatcatggagagtggggccaaaggctgcgaggttgtggtgtctgggaaactccgaggacagagggctaaatccatgaagtttgtggatggcctgatgatccacagcggagaccctgttaactactacgttgacactgctgtgcgccacgtgttgctcagacagggtgtgctgggcatcaaggtgaagatcatgctgccctgggacccaactggtaagattggccctaagaagcccctgcctgaccacgtgagcattgtggaacccaaagatgagatactgcccaccacccccatctcagaacagaagggtgggaagccagagccgcctgccatgccccagccagtccccacagcataacag

SEQ ID NO: 176795 - DNA, 866 bp, Homo sapiens
  Payload ID: 14699
  Gene Symbol: RPS3
  Gene Name: ribosomal protein S3
  Uniprot ID: P23396
  ENST ID: ENST00000524851
  CDS Start-End: 6-737
gcaagatggcagtgcaaatatccaagaagaggaagtttgtcgctgatggcatcttcaaagctgaactgaatgagtttcttactcgggagctggctgaagatggctactctggagttgaggtgcgagttacaccaaccaggacagaaatcattatcttagccaccagaacacagaatgttcttggtgagaagggccggcggattcgggaactgactgctgtagttcagaagaggtttggctttccagagggcagtgtagagctttatgctgaaaaggtggccactagaggtctgtgtgccattgcccaggcagagtctctgcgttacaaactcctaggagggcttgctgtgcggagggcctgctatggtgtgctgcggttcatcatggagagtggggccaaaggctgcgaggttgtggtgtctgggaaactccgaggacagagggctaaatccatgaagtttgtggatggcctgatgatccacagcggagaccctgttaactactacgttgacactgctgtgcgccacgtgttgctcagacagggtgtgctgggcatcaaggtgaagatcatgctgccctgggacccaactggtaagattggccctaagaagcccctgcctgaccacgtgagcattgtggaacccaaagatgagatactgcccaccacccccatctcagaacagaagggtgggaagccagagccgcctgccatgccccagccagtccccacagcataacaggtatgtctgcaagggcaggggcctcttggggcataatagggtccttccgagtctttctgttaatacttgtatcccacattctggtaagcgtttggtgaataaaaatttcatttatttgctttatgt

SEQ ID NO: 176796 - DNA, 2097 bp, Homo sapiens
  Payload ID: 14699
  Gene Symbol: RPS3
  Gene Name: ribosomal protein S3
  Uniprot ID: P23396
  ENST ID: ENST00000531188
  CDS Start-End: 63-794
cctttatactcacttccgcccgcgagccacttcctttcctttcagcggagcgcggcggcaagatggcagtgcaaatatccaagaagaggaagtttgtcgctgatggcatcttcaaagctgaactgaatgagtttcttactcgggagctggctgaagatggctactctggagttgaggtgcgagttacaccaaccaggacagaaatcattatcttagccaccagaacacagaatgttcttggtgagaagggccggcggattcgggaactgactgctgtagttcagaagaggtttggctttccagagggcagtgtagagctttatgctgaaaaggtggccactagaggtctgtgtgccattgcccaggcagagtctctgcgttacaaactcctaggagggcttgctgtgcggagggcctgctatggtgtgctgcggttcatcatggagagtggggccaaaggctgcgaggttgtggtgtctgggaaactccgaggacagagggctaaatccatgaagtttgtggatggcctgatgatccacagcggagaccctgttaactactacgttgacactgctgtgcgccacgtgttgctcagacagggtgtgctgggcatcaaggtgaagatcatgctgccctgggacccaactggtaagattggccctaagaagcccctgcctgaccacgtgagcattgtggaacccaaagatgagatactgcccaccacccccatctcagaacagaagggtgggaagccagagccgcctgccatgccccagccagtccccacagcataacagggtctccttggcagctgtattctggagtctggatgttgctctctaaagacctttaataaaattttgtacaaagacacaaggtctgactagactgttcagtattcagactgaggggcatgttggcctctggagcattacatatcttcttggttttaaccatacttgtggtatttgcaagggccagaacagtaagacccaagcagagccaaccagagaaataatatttgtgtgatagagaaggctgatagcaagcaaggcagcaccttgattcgttgtcctgtagttcaggattgtaggtttagaagagggatatgtttgagtttttcctatgcataaggcgatccacgttgcacatagaaagtgaatataaatggccattatattttgtgtcatgctgtgctctaagtgttctttacatatgtactcgttaatcaacctctctaaagtgtaaaggaaatttgcttgcaccactgaaggcacataaggctcagaagtaaatttgcctaagcagtataaagctatcattagaatccacattcctaagttgtgttctcttaggggatcatggaaccagtcattggtactacaggctattatgttctggagaactgtgaagaacatttaaattgtctctgattttatctatcaatgttttgaagtattttctaccagtgtctgtacttcacaagaaattcggcactattttttcaggcaaaactagtgagggacaggttggcttgaaaatcatgagactgttgttaaatcagatgctggttgatcacagaggggacttccagggaaagctgttatcaggtggctgcttcctggtgatgcagcctggctgatgagataaccctggctccacagatggcttagcaggtgctgtgatgatttggttttcttctcaattagactgagctgcacatggtgtttatattgcttggcacatggtaagggcttaatatttgaggtaattatgtagggcgtacactgacaagtatctgacccccccttcctttttgactcataaattggtcatcttaaccatttaagtgtacacttctatagtgacagagttagccctctgtccaagggatttgcatctgtggattcaaccaactttgggtcaaaaataatcaaaaaggatggttgtgtgtgtattgaacatgtagacttatttttcttattttcaaaatactatattttcttgtcacttattttcttgtacactgcagttgtaacagctatgtagcatgtacattaggtattaaaagtaatccagtgaagattgaaagtctaa

SEQ ID NO: 176797 - DNA, 390 bp, Homo sapiens
  Payload ID: 14699
  Gene Symbol: RPS3
  Gene Name: ribosomal protein S3
  ENST ID: ENST00000527273
  CDS Start-End: 7-390
ggcaagatggcagtgcaaatatccaagaagaggaagtttgtcgctgatggcatcttcaaagctgaactgaatgagtttcttactcgggagctggctgaagatggctactctggagttgaggtgcgagttacaccaaccaggacagaaatcattatcttagccaccagaacacagaatgttcttggtgagaagggccggcggattcgggaactgactgctgtagttcagaagaggtctgtgtgccattgcccaggcagagtctctgcgttacaaactcctaggagggcttgctgtgcggagggcctgctatggtgtgctgcggttcatcatggagagtggggccaaaggctgcgaggttgtggtgtctgggaaactccgaggacagagggc

SEQ ID NO: 176798 - DNA, 639 bp, Homo sapiens
  Payload ID: 14699
  Gene Symbol: RPS3
  Gene Name: ribosomal protein S3
  ENST ID: ENST00000528847
  CDS Start-End: 531-639
atgatgacgagtctgacttggggatgttctctttgcccaggtggcctactctgtgctgcgttctgtggcacagtttaaagagccctggttgaagtaatttcctaaagatgacttagaggcatttgtctgagaagggttgctgcactcctgttggaacaagggtttggaaccattggttggagtttgtcgctgatggcatcttcaaagctgaactgaatgagtttcttactcgggagctggctgaagatggctactctggagttgaggtgcgagttacaccaaccaggacagaaatcattatcttagccaccagaacacagaatgttcttggtgagaagggccggcggattcgggaactgactgctgtagttcagaagaggtttggctttccagagggcagtgtagagctttatgctgaaaaggtggccactagaggtctgtgtgccattgcccaggcagagtctctgcgttacaaactcctaggagggcttgctgtgcggagggcctgctatggtgtgctgcggttcatcatggagagtggggccaaaggctgcgaggttgtggtgtctgggaaactccgaggacagagggctaaatccatgaagtttgtggatggcctgatgatccacagcggagacc

SEQ ID NO: 176799 - DNA, 564 bp, Homo sapiens
  Payload ID: 14699
  Gene Symbol: RPS3
  Gene Name: ribosomal protein S3
  ENST ID: ENST00000534440
  CDS Start-End: 18-494
cggagcgcggcggcaagatggcagtgcaaatatccaagaagaggaagtttgtcgctgatggcatcttcaaagctgaactgaatgagtttcttactcgggagctggctgaagatggctactctggagttgaggtgcgagttacaccaaccaggacagaaatcattatcttagccaccagaacacagaatgttcttggtgagaagggccggcggattcgggaactgactgctgtagttcagaagaggtttggctttccagagggcagtgtagagctttatgctgaaaaggtggccactagaggtgtgctgggcatcaaggtgaagatcatgctgccctgggacccaactggtaagattggccctaagaagcccctgcctgaccacgtgagcattgtggaacccaaagatgagatactgcccaccacccccatctcagaacagaagggtgggaagccagagccgcctgccatgccccagccagtccccacagcataacagggtctccttggcagctgtattctggagtctggatgttgctctctaaagacctttaataaaattttgt

SEQ ID NO: 176800 - DNA, 421 bp, Homo sapiens
  Payload ID: 14699
  Gene Symbol: RPS3
  Gene Name: ribosomal protein S3
  ENST ID: ENST00000525690
  CDS Start-End: 1-101
agtttgtcgctgatggcatcttcaaagctgaactgaatgagtttcttactcgggagctggctgaagatggctactctggagttgagcggagaccctgttaactactacgttgacactgctgtgcgccacgtgttgctcagacagggtgtgctgggcatcaaggtgaagatcatgctgccctgggacccaactggtaagattggccctaagaagcccctgcctgaccacgtgagcattgtggaacccaaagatgagatactgcccaccacccccatctcagaacagaagggtgggaagccagagccgcctgccatgccccagccagtccccacagcataacagggtctccttggcagctgtattctggagtctggatgttgctctctaaagacctttaataaaattttgtacaaagacacaa

SEQ ID NO: 176801 - DNA, 1307 bp, Homo sapiens
  Payload ID: 14699
  Gene Symbol: RPS3
  Gene Name: ribosomal protein S3
  ENST ID: ENST00000525933
  CDS Start-End: 1-515
agtttgtcgctgatggcatcttcaaagctgaactgaatgagtttcttactcgggagctggctgaagatggctactctggagttgaggtgcgagttacaccaaccaggacagaaatcattatcttagccaccagggcctgctatggtgtgctgcggttcatcatggagagtggggccaaaggctgcgaggttgtggtgtctgggaaactccgaggacagagggctaaatccatgaagtttgtggatggcctgatgatccacagcggagaccctgttaactactacgttgacactgctgtgcgccacgtgttgctcagacagggtgtgctgggcatcaaggtgaagatcatgctgccctgggacccaactggtaagattggccctaagaagcccctgcctgaccacgtgagcattgtggaacccaaagatgagatactgcccaccacccccatctcagaacagaagggtgggaagccagagccgcctgccatgccccagccagtccccacagcataacaggtatgtctgcaagggcaggggcctcttggggcataatagggtccttccgagtctttctgttaatacttgtatcccacattctggtaagcgtttggtgaataaaaatttcatttatttgctttatgtgggagaatacaagttgaaacctggggtctatttaacccttggttccaatgggacaggtgttgcctttattctttccagaaagaagttcctgcttttactcgtgtatatgaaatagttttcccttatcctcccttatttgctcaaaatttttggctcagtgcaacctctgcctcccatgttcaagcaattctcctgtctcagcctcccgagtagctgggattataggcacctgccaccaagcccagctaatttttgtgtttttagtagagacggggtttcaccttgttggccaggctggtctcagactcctgacctcaggtgagccactgtgcttggctgctcaagattttctaggcacttttgctattctgtcctttagcagcccctgtaaaacactaacaagcctcctgtggtcaacacttggggtttttttgtttataggtgttgtctctccaggtgccttgtattttttttttttatatgaaaaaggacaaacccttatgtatgcattttattaatgttgctgcaaaccctaagtgggagtgtgtatccatttggtaaatcaggaacttaataactctggtaaagtttcttacttttgtgctttatttggtttcagggtctccttggcagctgtattctggagtctggatgttgctctct

SEQ ID NO: 176802 - DNA, 1306 bp, Homo sapiens
  Payload ID: 14699
  Gene Symbol: RPS3
  Gene Name: ribosomal protein S3
  Uniprot ID: P23396
  ENST ID: ENST00000527446
  CDS Start-End: 18-749
cggagcgcggcggcaagatggcagtgcaaatatccaagaagaggaagtttgtcgctgatggcatcttcaaagctgaactgaatgagtttcttactcgggagctggctgaagatggctactctggagttgaggtgcgagttacaccaaccaggacagaaatcattatcttagccaccagaacacagaatgttcttggtgagaagggccggcggattcgggaactgactgctgtagttcagaagaggtttggctttccagagggcagtgtagagctttatgctgaaaaggtggccactagaggtctgtgtgccattgcccaggcagagtctctgcgttacaaactcctaggagggcttgctgtgcggagggcctgctatggtgtgctgcggttcatcatggagagtggggccaaaggctgcgaggttgtggtgtctgggaaactccgaggacagagggctaaatccatgaagtttgtggatggcctgatgatccacagcggagaccctgttaactactacgttgacactgctgtgcgccacgtgttgctcagacagggtgtgctgggcatcaaggtgaagatcatgctgccctgggacccaactggtaagattggccctaagaagcccctgcctgaccacgtgagcattgtggaacccaaagatgagatactgcccaccacccccatctcagaacagaagggtgggaagccagagccgcctgccatgccccagccagtccccacagcataacagcctcttccatgagtggggagcccgctgcttgtctccagctcctagcagtgagtcctgataatctcaaatttaaggacagtaactttgtctgggatgagtgtgggaaaggatgtgtttgggaacagacgcgagcctgcagaggtgtttgtaaccatctctttctaagtggtgggaagcagacattttattctttaactgttaatatatatagtgtgtgttttttatgcatgaaatattttatagtttttaaaaatgcccacactactattttgaaagtaaatgaggtaatgtatgtgtcagaacccaatacccaaagcgatcgtagtaagaggtggggcctttgggaaggcattaaattgcttagggaatgagggtggaaccctcatgaatgagattagagccttataggagaggttggagggagttgcctggcctccctctcccatgtgaagactcagcaagaaaacattatttaggaagcagagagccctcatcaaacaccagatctgctggccacctgatctggcactttccagccttcagaactgtgagaa

SEQ ID NO: 176803 - DNA, 531 bp, Homo sapiens
  Payload ID: 14699
  Gene Symbol: RPS3
  Gene Name: ribosomal protein S3
  ENST ID: ENST00000530170
  CDS Start-End: 1-371
ttgtcgctgatggcatcttcaaagctgaactgaatgagtttcttactcgggagctggctgaagatggctactctggagttgaggtgcgagttacaccaaccaggacagaaatcattatcttagccaccagaacacagaatgttcttggtgagaagggccggcggattcgggaactgactgctgtagttcagaagaggtttggctttccagagggcagtgtagagctttatgctgaaaaggtggccactagaggtctgtgtgccattgcccaggcagagtctctgcgttacaaactcctaggagggcttgctgtgcggaggtgtgctgggcatcaaggtgaagatcatgctgccctgggacccaactggtaagattggccctaagaagcccctgcctgaccacgtgagcattgtggaacccaaagatgagatactgcccaccacccccatctcagaacagaagggtgggaagccagagccgcctgccatgccccagccagtccccacagcataacagggtctccttggcagc

SEQ ID NO: 176804 - DNA, 934 bp, Homo sapiens
  Payload ID: 14700
  Gene Symbol: RPS3A
  Gene Name: ribosomal protein S3A
  Uniprot ID: P61247
  ENST ID: ENST00000274065
  CDS Start-End: 81-875
tagacggcgcgccccgcccccgtacgcctaagttctcgcgcgactcccacttccgcccttttggctctctgaccagcaccatggcggttggcaagaacaagcgccttacgaaaggcggcaaaaagggagccaagaagaaagtggttgatccattttctaagaaagattggtatgatgtgaaagcacctgctatgttcaatataagaaatattggaaagacgctcgtcaccaggacccaaggaaccaaaattgcatctgatggtctcaagggtcgtgtgtttgaagtgagtcttgctgatttgcagaatgatgaagttgcatttagaaaattcaagctgattactgaagatgttcagggtaaaaactgcctgactaacttccatggcatggatcttacccgtgacaaaatgtgttccatggtcaaaaaatggcagacaatgattgaagctcacgttgatgtcaagactaccgatggttacttgcttcgtctgttctgtgttggttttactaaaaaacgcaacaatcagatacggaagacctcttatgctcagcaccaacaggtccgccaaatccggaagaagatgatggaaatcatgacccgagaggtgcagacaaatgacttgaaagaagtggtcaataaattgattccagacagcattggaaaagacatagaaaaggcttgccaatctatttatcctctccatgatgtcttcgttagaaaagtaaaaatgctgaagaagcccaagtttgaattgggaaagctcatggagcttcatggtgaaggcagtagttctggaaaagccactggggacgagacaggtgctaaagttgaacgagctgatggatatgaaccaccagtccaagaatctgtttaaagttcagacttcaaatagtggcaaataaaaagtgctatttgtgatggtttgcttctgaa

SEQ ID NO: 176805 - DNA, 480 bp, Homo sapiens
  Payload ID: 14700
  Gene Symbol: RPS3A
  Gene Name: ribosomal protein S3A
  ENST ID: ENST00000503002
  CDS Start-End: 286-480
ttttggctctctgaccagcaccatggcggttggcaagaacaagcgccttacgaaaggcggcaaaaagggagccaagaagaaagtgtaagtcgcgactgtcgtggcgtcttgctttttgggggtctgctggaatcggcgggctggtcctagatcgcggcgtaggccggatggcgaggattccagtcggattgtgcgggccgtggcgggttggtgcacccaggaacgcggcctggaggggttgatccattttctaagaaagattggtatgatgtgaaagcacctgctatgttcaatataagaaatattggaaagacgctcgtcaccaggacccaaggaaccaaaattgcatctgatggtctcaagggtcgtgtgtttgaagtgagtcttgctgatttgcagaatgatgaagttgcatttagaaaattcaagctgattactgaagatgttcagggtaaaaactgcctgactaacttccatggc

SEQ ID NO: 176806 - DNA, 686 bp, Homo sapiens
  Payload ID: 14700
  Gene Symbol: RPS3A
  Gene Name: ribosomal protein S3A
  ENST ID: ENST00000512797
  CDS Start-End: 1-573
aacaagcgccttacgaaaggcggcaaaaagggagccaagaagaaagtggttgatccattttctaagaaagattggtatgatgtgaaagcacctgctatgttcaatataagaaatattggaaagacgctcgtcaccaggacccaaggaaccaaaattgcatctgatggtctcaagggtcgtgtgtttgaagtgagtcttgctgatttgcagaatgatgaagttgcatttagaaaattcaagctgattactgaagatgttcagggtaaaaactgcctgactaacttccatggcatggatcttacccgtgacaaaatgtgttccatggtcaaaaaatggcagacaatgattgaagctcacgttgatgtcaagactaccgatggttacttgcttcgtctgttctgtgttggttttactaaaaaacgcaacaatcagatacggaagacctcttatgctcagcaccaacaggtccgccaaatccggaagaagatgatggaaatcatgacccgagaggattccagacagcattggaaaagacatagaaaaggcttgccaatctatttatcctctccatgatgtcttcgttagaaaagtaaaaatgctgaagaagcccaagtttgaattgggaaagctcatggagcttcatggtgaaggcagtagttctggaaaagccactggggacgagacag

SEQ ID NO: 176807 - DNA, 985 bp, Homo sapiens
  Payload ID: 14700
  Gene Symbol: RPS3A
  Gene Name: ribosomal protein S3A
  ENST ID: ENST00000514682
  CDS Start-End: 258-941
ccttttggctctctgaccagcaccatggcggttggcaagaacaagcgccttacgaaaggcggcaaaaagggagccaagaagaaagtgtaagtcgcgactgtcgtggcgtcttgctttttgggggtctgctggaatcggcgggctggtcctagatcgcggcgtaggccggatggcgaggattccagtcggattgtgcgggccgtggcggggttgatccattttctaagaaagattggtatgatgtgaaagcacctgctatgttcaatataagaaatattggaaagacgctcgtcaccaggacccaaggaaccaaaattgcatctgatggtctcaagggtcgtgtgtttgaagtgagtcttgctgatttgcagaatgatgaagttgcatttagaaaattcaagctgattactgaagatgttcagggtaaaaactgcctgactaacttccatggcatggatcttacccgtgacaaaatgtgttccatggtcaaaaaatggcagacaatgattgaagctcacgttgatgtcaagactaccgatggttacttgcttcgtctgttctgtgttggttttactaaaaaacgcaacaatcagatacggaagacctcttatgctcagcaccaacaggtccgccaaatccggaagaagatgatggaaatcatgacccgagaggtgcagacaaatgacttgaaagaagtggtcaataaattgattccagacagcattggaaaagacatagaaaaggcttgccaatctatttatcctctccatgatgtcttcgttagaaaagtaaaaatgctgaagaagcccaagtttgaattgggaaagctcatggagcttcatggtgaaggcagtagttctggaaaagccactggggacgagacaggtgctaaagttgaacgagctgatggatatgaaccaccagtccaagaatctgtttaaagttcagacttcaaatagtggcaaataaaaagtgctatttgtga

SEQ ID NO: 176808 - DNA, 587 bp, Homo sapiens
  Payload ID: 14700
  Gene Symbol: RPS3A
  Gene Name: ribosomal protein S3A
  ENST ID: ENST00000508783
  CDS Start-End: 211-587
tctgaccagcaccatggcggttggcaagaacaagcgccttacgaaaggcggcaaaaagggagccaagaagaaagtgtaagtcgcgactgtcgtggcgtcttgctttttgggggtctgctggaatcggcgggctggtcctagatcgcggcgtaggccggatgggttgatccattttctaagaaagattggtatgatgtgaaagcacctgctatgttcaatataagaaatattggaaagacgctcgtcaccaggacccaaggaaccaaaattgcatctgatggtctcaagggtcgtgtgtttgaagtgagtcttgctgatttgcagaatgatgaagttgcatttagaaaattcaagctgattactgaagatgttcagggtaaaaactgcctgactaacttccatggcatggatcttacccgtgacaaaatgtgttccatggtcaaaaaatggcagacaatgattgaagctcacgttgatgtcaagactaccgatggttacttgcttcgtctgttctgtgttggttttactaaaaaacgcaacaatcagatacggaagacctcttatgctcagcaccaacaggtccgcca

SEQ ID NO: 176809 - DNA, 576 bp, Homo sapiens
  Payload ID: 14700
  Gene Symbol: RPS3A
  Gene Name: ribosomal protein S3A
  ENST ID: ENST00000509736
  CDS Start-End: 95-532
tccgcccttttggctctctgaccagcaccatggcggttggcaagaacaagcgccttacgaaaggcggcaaaaagggagccaagaagaaagtacaatgattgaagctcacgttgatgtcaagactaccgatggttacttgcttcgtctgttctgtgttggttttactaaaaaacgcaacaatcagatacggaagacctcttatgctcagcaccaacaggtccgccaaatccggaagaagatgatggaaatcatgacccgagaggtgcagacaaatgacttgaaagaagtggtcaataaattgattccagacagcattggaaaagacatagaaaaggcttgccaatctatttatcctctccatgatgtcttcgttagaaaagtaaaaatgctgaagaagcccaagtttgaattgggaaagctcatggagcttcatggtgaaggcagtagttctggaaaagccactggggacgagacaggtgctaaagttgaacgagctgatggatatgaaccaccagtccaagaatctgtttaaagttcagacttcaaatagtggcaaataaaaagtgctatttgtga

SEQ ID NO: 176810 - DNA, 845 bp, Homo sapiens
  Payload ID: 14700
  Gene Symbol: RPS3A
  Gene Name: ribosomal protein S3A
  ENST ID: ENST00000512690
  CDS Start-End: 15-632
ctctgaccagcaccatggcggttggcaagaacaagcgccttacgaaaggcggcaaaaagggagccaagaagaaagtggttgatccattttctaagaaagattggtatgatgtgaaagcacctgctatgttcaatataagaaatattggaaagacgctcgtcaccaggacccaaggaaccaaaattgcatctgatggtctcaagggtcgtgtgtttgaagtgagtcttgctgatttgcagaatgatgaagttgcatttagaaaattcaagctgattactgaagatgttcagggtaaaaactgcctgactaacttccatggcatggatcttacccgtgacaaaatgtgttccatggtcaaaaaatggcagacaatgattgaagctcacgttgatgtcaagactaccgatggttacttgcttcgtctgttctgtgttggttttactaaaaaacgcaacaatcagatacggaagacctcttatgctcagcaccaacaggtccgccaaatccggaagaagatgatggaaatcatgacccgagaggtgcagacaaatgacttgaaagaagtggtcaataaattacagcattggaaaagacatagaaaaggcttgccaatctatttatcctctccatgatgtcttcgttagaaaagtaaaaatgctgaagaagcccaagtttgaattgggaaagctcatggagcttcatggtgaaggcagtagttctggaaaagccactggggacgagacaggtgctaaagttgaacgagctgatggatatgaaccaccagtccaagaatctgtttaaagttcagacttcaaatagtggcaaataaaaagtgctatttgtga

SEQ ID NO: 176811 - DNA, 674 bp, Homo sapiens
  Payload ID: 14700
  Gene Symbol: RPS3A
  Gene Name: ribosomal protein S3A
  ENST ID: ENST00000507327
  CDS Start-End: 94-674
acaagcgccttacgaaaggcggcaaaaagggagccaagaagaaaggttgatccattttctaagaaagattggtatgatgtgaaagcacctgctatgttcaatataagaaatattggaaagacgctcgtcaccaggacccaaggaaccaaaattgcatctgatggtctcaagggtcgtgtgtttgaagtgagtcttgctgatttgcagaatgatgaagttgcatttagaaaattcaagctgattactgaagatgttcagggtaaaaactgcctgactaacttccatggcatggatcttacccgtgacaaaatgtgttccatggtcaaaaaatggcagacaatgattgaagctcacgttgatgtcaagactaccgatggttacttgcttcgtctgttctgtgttggttttactaaaaaacgcaacaatcagatacggaagacctcttatgctcagcaccaacaggtccgccaaatccggaagaagatgatggaaatcatgacccgagaggtgcagacaaatgacttgaaagaagtggtcaataaattgattccagacagcattggaaaagacatagaaaaggcttgccaatctatttatcctctccatgatgtcttcgttagaaaagtaaaaatgctgaagaagcccaagtttgaattgggaaagctcatggagct

SEQ ID NO: 176812 - DNA, 614 bp, Homo sapiens
  Payload ID: 14700
  Gene Symbol: RPS3A
  Gene Name: ribosomal protein S3A
  ENST ID: ENST00000505243
  CDS Start-End: 310-614
cccttttggctctctgaccagcaccatggcggttggcaagaacaagcgccttacgaaaggcggcaaaaagggagccaagaagaaagtgtaagtcgcgactgtcgtggcgtcttgctttttgggggtctgctggaatcggcgggctggtcctagatcgcggcgtaggccggatggcgaggattccagtcggattgtgcgggccgtggcgggttggtgcacccaggaacgcggcctggagggtcggtgttgagtagcggcagggttgatccattttctaagaaagattggtatgatgtgaaagcacctgctatgttcaatataagaaatattggaaagacgctcgtcaccaggacccaaggaaccaaaattgcatctgatggtctcaagggtcgtgtgtttgaagtgagtcttgctgatttgcagaatgatgaagttgcatttagaaaattcaagctgattactgaagatgttcagggtaaaaactgcctgactaacttccatggcatggatcttacccgtgacaaaatgtgttccatggtcaaaaaatggcagacaatgattgaagctcacgttgatgtcaagactaccgatggttacttgcttcgtctgttctg

SEQ ID NO: 176813 - DNA, 671 bp, Homo sapiens
  Payload ID: 14700
  Gene Symbol: RPS3A
  Gene Name: ribosomal protein S3A
  ENST ID: ENST00000515792
  CDS Start-End: 1-627
aagcgccttacgaaaggcggcaaaaagggagccaagaagaaagtggttgatccattttctaagaaagattggtatgatgtgaaagcacctgctatgttcaatataagaaatattggaaagacgctcgtcaccaggacccaaggaaccaaaattgcatctgatggtctcaagggtcgtgtgtttgaaacaatgattgaagctcacgttgatgtcaagactaccgatggttacttgcttcgtctgttctgtgttggttttactaaaaaacgcaacaatcagatacggaagacctcttatgctcagcaccaacaggtccgccaaatccggaagaagatgatggaaatcatgacccgagaggtgcagacaaatgacttgaaagaagtggtcaataaattgattccagacagcattggaaaagacatagaaaaggcttgccaatctatttatcctctccatgatgtcttcgttagaaaagtaaaaatgctgaagaagcccaagtttgaattgggaaagctcatggagcttcatggtgaaggcagtagttctggaaaagccactggggacgagacaggtgctaaagttgaacgagctgatggatatgaaccaccagtccaagaatctgtttaaagttcagacttcaaatagtggcaaataaaaagtgctatttgtga

SEQ ID NO: 176814 - DNA, 572 bp, Homo sapiens
  Payload ID: 14700
  Gene Symbol: RPS3A
  Gene Name: ribosomal protein S3A
  ENST ID: ENST00000515818
  CDS Start-End: 25-312
ccttttggctctctgaccagcaccatggcggttggcaagaacaagcgccttacgaaaggcggcaaaaagggagccaagaagaaagtggttgatccattttctaagaaagattggtatgatgtgaaagcacctgctatgttcaatataagaaatattggaaagacgctcgtcaccaggacccaaggaaccaaaattgcatctgatggtctcaagggtcgtgtgtttgaagtgagtcttgctgatttgcagaatgatgaagttgcatttagaaaattcaagctgattactgaagatgttcaggacaatgattgaagctcacgttgatgtcaagactaccgatggttacttgcttcgtctgttctgtgttggttttactaaaaaacgcaacaatcagatacggaagacctcttatgctcagcaccaacaggtccgccaaatccggaagaagatgatggaaatcatgacccgagaggtgcagacaaatgacttgaaagaagtggtcaataaattgattccagacagcattggaaaagacatagaaaaggcttgccaatctatttatcctctccatg

SEQ ID NO: 176815 - DNA, 862 bp, Homo sapiens
  Payload ID: 14700
  Gene Symbol: RPS3A
  Gene Name: ribosomal protein S3A
  ENST ID: ENST00000506126
  CDS Start-End: 149-832
cgccttacgaaaggcggcaaaaagggagccaagaagaaagttgaaaaatacagtaagaattgatctgcaatggaacttaagcatcttcttaaaatccagggttgatccattttctaagaaagattggtatgatgtgaaagcacctgctatgttcaatataagaaatattggaaagacgctcgtcaccaggacccaaggaaccaaaattgcatctgatggtctcaagggtcgtgtgtttgaagtgagtcttgctgatttgcagaatgatgaagttgcatttagaaaattcaagctgattactgaagatgttcagggtaaaaactgcctgactaacttccatggcatggatcttacccgtgacaaaatgtgttccatggtcaaaaaatggcagacaatgattgaagctcacgttgatgtcaagactaccgatggttacttgcttcgtctgttctgtgttggttttactaaaaaacgcaacaatcagatacggaagacctcttatgctcagcaccaacaggtccgccaaatccggaagaagatgatggaaatcatgacccgagaggtgcagacaaatgacttgaaagaagtggtcaataaattgattccagacagcattggaaaagacatagaaaaggcttgccaatctatttatcctctccatgatgtcttcgttagaaaagtaaaaatgctgaagaagcccaagtttgaattgggaaagctcatggagcttcatggtgaaggcagtagttctggaaaagccactggggacgagacaggtgctaaagttgaacgagctgatggatatgaaccaccagtccaagaatctgtttaaagttcagacttcaaatagtggcaaataaaa

SEQ ID NO: 176816 - DNA, 762 bp, Homo sapiens
  Payload ID: 14700
  Gene Symbol: RPS3A
  Gene Name: ribosomal protein S3A
  ENST ID: ENST00000510993
  CDS Start-End: 93-762
gttgagtagcggcaggtcggctgcctttcccaggccttctggtccttgcgcgcgtcgcgtttgagccggcttgccggcgcgactcggctggaatggttgatccattttctaagaaagattggtatgatgtgaaagcacctgctatgttcaatataagaaatattggaaagacgctcgtcaccaggacccaaggaaccaaaattgcatctgatggtctcaagggtcgtgtgtttgaagtgagtcttgctgatttgcagaatgatgaagttgcatttagaaaattcaagctgattactgaagatgttcagggtaaaaactgcctgactaacttccatggcatggatcttacccgtgacaaaatgtgttccatggtcaaaaaatggcagacaatgattgaagctcacgttgatgtcaagactaccgatggttacttgcttcgtctgttctgtgttggttttactaaaaaacgcaacaatcagatacggaagacctcttatgctcagcaccaacaggtccgccaaatccggaagaagatgatggaaatcatgacccgagaggtgcagacaaatgacttgaaagaagtggtcaataaattgattccagacagcattggaaaagacatagaaaaggcttgccaatctatttatcctctccatgatgtcttcgttagaaaagtaaaaatgctgaagaagcccaagtttgaattgggaaagctcatggagcttcatggtgaaggcagtagttctggaaaagccactgggg

SEQ ID NO: 176817 - DNA, 1526 bp, Homo sapiens
  Payload ID: 14701
  Gene Symbol: RPS4X
  Gene Name: ribosomal protein S4, X-linked
  Uniprot ID: P62701
  ENST ID: ENST00000316084
  CDS Start-End: 106-897
ggctgagctgggcggagcagctgaaaatccggcgcgcgcagtctccagccccaatttctacgcgcaccggaagacggaggtcctctttccttgcctaacgcagccatggctcgtggtcccaagaagcatctgaagcgggtggcagctccaaagcattggatgctggataaattgaccggtgtgtttgctcctcgtccatccaccggtccccacaagttgagagagtgtctccccctcatcattttcctgaggaacagacttaagtatgccctgacaggagatgaagtaaagaagatttgcatgcagcggttcattaaaatcgatggcaaggtccgaactgatataacctaccctgctggattcatggatgtcatcagcattgacaagacgggagagaatttccgtctgatctatgacaccaagggtcgctttgctgtacatcgtattacacctgaggaggccaagtacaagttgtgcaaagtgagaaagatctttgtgggcacaaaaggaatccctcatctggtgactcatgatgcccgcaccatccgctaccccgatcccctcatcaaggtgaatgataccattcagattgatttggagactggcaagattactgatttcatcaagttcgacactggtaacctgtgtatggtgactggaggtgctaacctaggaagaattggtgtgatcaccaacagagagaggcaccctggatcttttgacgtggttcacgtgaaagatgccaatggcaacagctttgccactcgactttccaacatttttgttattggcaagggcaacaaaccatggatttctcttccccgaggaaagggtatccgcctcaccattgctgaagagagagacaaaagactggcggccaaacagagcagtgggtgaaatgggtccctgggtgacatgtcagatctttgtacgtaattaaaaatattgtggcaggattaatagcattttggttttgtgggttgtttttttttttaattcagtttcctgctattttactgtataacatgaacagtgattaagttctcaggcaggcttaggcagtctgttattggctgggcttagttagtggtgggaagtagaagataccagacttgggaaaggaacagcaactaaccaaggagtagaaagagccaagaaatcccggagtatttatctcccccgccttgacttggccaagaacttctctacacagtggacccctctgccctgttaagttcccttggctttctaaaaatctgccctcattttcttctccagtctgtattgcactagcccatccacaagcctggctcatctgtttttcccactcctgtgcccatcttgccaaacgcaggatgaaaatctccagttgccattaaaggtggtcataaatgggctgttgatgttgcaaagcattgcagttccttggacttagtgcccttattctccagctgccgctgcagtcctcaactctgtttttcagaggacagagatgtagaacataaacttgttcttgcttgtccaaa

SEQ ID NO: 176818 - DNA, 1305 bp, Homo sapiens
  Payload ID: 14702
  Gene Symbol: RPS4Y1
  Gene Name: ribosomal protein S4, Y-linked 1
  Uniprot ID: P22090
  ENST ID: ENST00000250784
  CDS Start-End: 140-931
ttccaggatatgaactctacagcggaagaataagaaaccggaactaaacttctcactcatctgacttcctgcggtttacgacaacagactttggttgcaccggaaaagaacagattctcttccgtcgcagagtttcgccatggcccggggccccaagaagcacttaaagcgtgttgcagcgccgaagcattggatgcttgacaaactaacgggtgtatttgcacctcgtccatcgacaggtccccacaagctgagggaatgtcttcctctgatcgtcttcctcaggaatagactcaagtatgcgttgactggagatgaggtaaagaagatatgtatgcaacgtttcatcaaaattgatggcaaggttcgagtggatgtcacataccctgctggattcatggatgtcatcagcatcgagaagacaggtgaacatttccgcctggtctatgacaccaagggccgttttgctgttcaccgcatcacagtggaagaggcaaagtacaagttgtgcaaagtgaggaagattactgtgggagtgaagggaatccctcacctggtgactcatgatgctcgaaccatccgctacccagatcctgtcatcaaggtgaacgatactgtgcagattgatttagggactggcaagataatcaactttatcaaatttgatacaggcaatttgtgtatggtgattggtggagccaacctcggtcgtgttggtgtgatcaccaacagggaaagacatcctggttcttttgatgtggtgcatgtgaaggatgccaatggcaacagctttgccacgaggctttccaacatttttgtcattggcaatggcaataaaccttggatttccctgcccaggggaaagggcattcgacttactgttgctgaagagagagataagaggctggccaccaaacagagcagtggctaaattgcagtagcagcatatctttttttctttgcacaaataaacagtgaattctcgtttcttaatgtgttttttcccccttgtggataatagtagggtttgaatttgctcatgattttggcactgtcttaagatctctaggaataccacctatacttcctctgaccctccagtaaataaacctttgcttccctcatacatgttacccacaccatctctgtgggcagagtgatggagtagcattccaaaacgaagtacaaaaaacgtatgacatttcagaaaggacggcattcttttgtggaagctatgggagatggtcttagttttcttgcttgttcacattattggtagaaattaaatcctgtggctgtaggaaa

SEQ ID NO: 176819 - DNA, 811 bp, Homo sapiens
  Payload ID: 14702
  Gene Symbol: RPS4Y1
  Gene Name: ribosomal protein S4, Y-linked 1
  ENST ID: ENST00000430575
  CDS Start-End: 25-811
gcactgtggacgctctcttgacggatgctagggagacccgccaagttttcaaaggcccggggccccaagaagcacttaaagcgtgttgcagcgccgaagcattggatgcttgacaaactaacgggtgtatttgcacctcgtccatcgacaggtccccacaagctgagggaatgtcttcctctgatcgtcttcctcaggaatagactcaagtatgcgttgactggagatgaggtaaagaagatatgtatgcaacgtttcatcaaaattgatggcaaggttcgagtggatgtcacataccctgctggattcatggatgtcatcagcatcgagaagacaggtgaacatttccgcctggtctatgacaccaagggccgttttgctgttcaccgcatcacagtggaagaggcaaagtacaagttgtgcaaagtgaggaagattactgtgggagtgaagggaatccctcacctggtgactcatgatgctcgaaccatccgctacccagatcctgtcatcaaggtgaacgatactgtgcagattgatttagggactggcaagataatcaactttatcaaatttgatacaggcaatttgtgtatggtgattggtggagccaacctcggtcgtgttggtgtgatcaccaacagggaaagacatcctggttcttttgatgtggtgcatgtgaaggatgccaatggcaacagctttgccacgaggctttccaacatttttgtcattggcaatggcaataaaccttggatttccctgcccaggggaaagggcattcgacttactgttgctgaagagagagata

SEQ ID NO: 176820 - DNA, 792 bp, Homo sapiens
  Payload ID: 14703
  Gene Symbol: RPS4Y2
  Gene Name: ribosomal protein S4, Y-linked 2
  Uniprot ID: Q8TD47
  ENST ID: ENST00000629237
  CDS Start-End: 1-792
atggcccggggccccaagaagcacttgaagcgtgttgcagcgccgaagcattggatgctggataaactaactggtgtatttgcacctcgtccatcgacaggtcctcacaagctgagggaatgtcttcccctgatagtcttcctcaggaatagactcaagtatgcattgactggagatgaggtaaagaagatatgtatgcaacacttcctcaaaattgatggcaaggttcgagtggacatcacataccctgctggattcatagatgtcatcagcattgagaaaacaggtgagcatttccgcctggtctataataccaagggctgttttgctgttcatcgtatcacagtggaagaggcaaagtacaagttgtgcaaagtgaggaagattactgtggggacaaagggaattccacacctggtgactcatgatgctcgaaccattcgctacccagatcctctcatcaaggtgaacgatactgtgcagattgatttagggactgggaagataaccagctttatcaaatttgacacaggcaatgtatgtatggtgattgctggagctaacctcggtcgtgttggtgtgatcacaaacagggaaagacatcctggttcttgcgatgtggtacatgtgaaggatgccaacggcaacagctttgccacaaggatttccaacatttttgtcattggcaatggtaataaaccttggatttccctgcccaggggaaagggcatccgacttactattgctgaagagagagacaagaggctggctgccaaacagagcagtggctaa

SEQ ID NO: 176821 - DNA, 740 bp, Homo sapiens
  Payload ID: 14704
  Gene Symbol: RPS5
  Gene Name: ribosomal protein S5
  Uniprot ID: P46782
  ENST ID: ENST00000196551
  CDS Start-End: 73-687
ctcttcctgtctgtaccagggcggcgcgtggtctacgccgagtgacagagacgctcaggctgtgttctcaggatgaccgagtgggagacagcagcaccagcggtggcagagaccccagacatcaagctctttgggaagtggagcaccgatgatgtgcagatcaatgacatttccctgcaggattacattgcagtgaaggagaagtatgccaagtacctgcctcacagtgcagggcggtatgccgccaaacgcttccgcaaagctcagtgtcccattgtggagcgcctcactaactccatgatgatgcacggccgcaacaacggcaagaagctcatgactgtgcgcatcgtcaagcatgccttcgagatcatacacctgctcacaggcgagaaccctctgcaggtcctggtgaacgccatcatcaacagtggtccccgggaggactccacacgcattgggcgcgccgggactgtgagacgacaggctgtggatgtgtcccccctgcgccgtgtgaaccaggccatctggctgctgtgcacaggcgctcgtgaggctgccttccggaacattaagaccattgctgagtgcctggcagatgagctcatcaatgctgccaagggctcctcgaactcctatgccattaagaagaaggacgagctggagcgtgtggccaagtccaaccgctgattttcccagctgctgcccaataaacctgtctgccctttggggcagtcccagcc

SEQ ID NO: 176822 - DNA, 1203 bp, Homo sapiens
  Payload ID: 14704
  Gene Symbol: RPS5
  Gene Name: ribosomal protein S5
  Uniprot ID: P46782
  ENST ID: ENST00000601521
  CDS Start-End: 533-1147
gggctgcaacccctcgcgcgggctccccggccgtggaggacacaaggacaaacacgaagggtccccgacctgccgaccccctcctcccggacaccgcgcgtagcctgtaggctacctccgcgctccacccagagacgggtcgcgctgctcccgccgccgcaaccccgggccctcgtgccggcggtctcccctcttccacgggcgagattactgcatagcagaggcgcccacaagacagggcaactacggggtagcggacatccgccaggcacgcttctagggccgcttctgcaactgcgcatgcgcttgggctgcacccattccgtctagcccaaaaggttcctctacaaccttcctccggattggtctatagggacacgatggccttttacgcaagcgtcacccgtgctgacccggaagttttcttcccagttaaaagtgttggcccgcggcgcgcggcctcttcctgtctgtaccagggcggcgcgtggtctacgccgagtgacagagacgctcaggctgtgttctcaggatgaccgagtgggagacagcagcaccagcggtggcagagaccccagacatcaagctctttgggaagtggagcaccgatgatgtgcagatcaatgacatttccctgcaggattacattgcagtgaaggagaagtatgccaagtacctgcctcacagtgcagggcggtatgccgccaaacgcttccgcaaagctcagtgtcccattgtggagcgcctcactaactccatgatgatgcacggccgcaacaacggcaagaagctcatgactgtgcgcatcgtcaagcatgccttcgagatcatacacctgctcacaggcgagaaccctctgcaggtcctggtgaacgccatcatcaacagtggtccccgggaggactccacacgcattgggcgcgccgggactgtgagacgacaggctgtggatgtgtcccccctgcgccgtgtgaaccaggccatctggctgctgtgcacaggcgctcgtgaggctgccttccggaacattaagaccattgctgagtgcctggcagatgagctcatcaatgctgccaagggctcctcgaactcctatgccattaagaagaaggacgagctggagcgtgtggccaagtccaaccgctgattttcccagctgctgcccaataaacctgtctgccctttggggcagtcccagccacc

SEQ ID NO: 176823 - DNA, 536 bp, Homo sapiens
  Payload ID: 14704
  Gene Symbol: RPS5
  Gene Name: ribosomal protein S5
  ENST ID: ENST00000598098
  CDS Start-End: 78-482
gcggcctcttcctgtctgtaccagggcggcgcgtggtctacgccgagtgacagagacgctcaggctgtgttctcaggatgaccgagtgggagacagcagcaccagcggtggcagagaccccagacatcaagctctttgggaagtggagcaccgatgatgtgcagatcaatgacatttccctgcagaaccctctgcaggtcctggtgaacgccatcatcaacagtggtccccgggaggactccacacgcattgggcgcgccgggactgtgagacgacaggctgtggatgtgtcccccctgcgccgtgtgaaccaggccatctggctgctgtgcacaggcgctcgtgaggctgccttccggaacattaagaccattgctgagtgcctggcagatgagctcatcaatgctgccaagggctcctcgaactcctatgccattaagaagaaggacgagctggagcgtgtggccaagtccaaccgctgattttcccagctgctgcccaataaacctgtctgccctttggggcagtcccagcca

SEQ ID NO: 176824 - DNA, 718 bp, Homo sapiens
  Payload ID: 14704
  Gene Symbol: RPS5
  Gene Name: ribosomal protein S5
  ENST ID: ENST00000596314
  CDS Start-End: 118-718
taggctacctccgcgctccacccagagacgggtcgcgctgctcccgccgccgcaaccccgggccctcgtgccggcggtctcccctcttccacgggcgagattactgcatagcagaggatgaccgagtgggagacagcagcaccagcggtggcagagaccccagacatcaagctctttgggaagtggagcaccgatgatgtgcagatcaatgacatttccctgcaggattacattgcagtgaaggagaagtatgccaagtacctgcctcacagtgcagggcggtatgccgccaaacgcttccgcaaagctcagtgtcccattgtggagcgcctcactaactccatgatgatgcacggccgcaacaacggcaagaagctcatgactgtgcgcatcgtcaagcatgccttcgagatcatacacctgctcacaggcgagaaccctctgcaggtcctggtgaacgccatcatcaacagtggtccccgggaggactccacacgcattgggcgcgccgggactgtgagacgacaggctgtggatgtgtcccccctgcgccgtgtgaaccaggccatctggctgctgtgcacaggcgctcgtgaggctgccttccggaacattaagaccattgctgagtgcctggcagatgagctcatcaatgctgccaagggctcctcgaactcctatgccattaagaagaaggacgagctggagcgtgtggcca

SEQ ID NO: 176825 - DNA, 800 bp, Homo sapiens
  Payload ID: 14704
  Gene Symbol: RPS5
  Gene Name: ribosomal protein S5
  ENST ID: ENST00000598495
  CDS Start-End: 73-750
ctcttcctgtctgtaccagggcggcgcgtggtctacgccgagtgacagagacgctcaggctgtgttctcaggatgaccgagtgggagacagcagcaccagcggtggcagagaccccagacatcaagctctttgggaagtggagcaccgatgatgtgcagatcaatgacatttccctgcagatgactacaacttctgtcatgagaggactccttcaccagaaggagcatcacatctcacatatggattacattgcagtgaaggagaagtatgccaagtacctgcctcacagtgcagggcggtatgccgccaaacgcttccgcaaagctcagtgtcccattgtggagcgcctcactaactccatgatgatgcacggccgcaacaacggcaagaagctcatgactgtgcgcatcgtcaagcatgccttcgagatcatacacctgctcacaggcgagaaccctctgcaggtcctggtgaacgccatcatcaacagtggtccccgggaggactccacacgcattgggcgcgccgggactgtgagacgacaggctgtggatgtgtcccccctgcgccgtgtgaaccaggccatctggctgctgtgcacaggcgctcgtgaggctgccttccggaacattaagaccattgctgagtgcctggcagatgagctcatcaatgctgccaagggctcctcgaactcctatgccattaagaagaaggacgagctggagcgtgtggccaagtccaaccgctgattttcccagctgctgcccaataaacctgtctgccctttggggcagtccca

SEQ ID NO: 176826 - DNA, 1520 bp, Homo sapiens
  Payload ID: 14704
  Gene Symbol: RPS5
  Gene Name: ribosomal protein S5
  Uniprot ID: P46782
  ENST ID: ENST00000596046
  CDS Start-End: 850-1464
gcggcgcgtggtctacgccgagtgacagagacgctcaggctgtgttctcaggtgagaccgccgcggggccggggatcctagggacggttcatggtctttcggggatagtgccccgcggcctgggccttttctcattaggtctcatttctgtctctggaaaagaaaatgtagaagaaacgggcgcgggccgagttactcttgacttctttctggtgctccgccgcttctagcttttccccatagcggggcttggggaacttggtttgaactatgcggttgtactctgagataggaagtttccatttcttagggacacgatgccctcttttgctctgtgtaactttccccccgtaatagcagcccctagagccttcatactgtcggtcaagaatcgaaacctttgggttgattgtgccacacggtacctaccgtggtccttgatgtcatataacggtcccgcctcacggccaaagaaacagtccgagacggaacgttgacttgggtcaaagaccatgtaaatcgcgagattgtggtttgaattacagcccatgcagtgtgaggacgtatggcatctgctgagccattataccttggtcccagtgcagcagctgttgactggtggctgccaagtcttgggcccaggggttctaggtgaaagacagatgcttcttgctgacagctgagtaatttttctagtgcttgaaaacacgttcacggcctttcttggtcctttgcgaccccccagttcatcactagatggcggctagcctcagagttgggaatgagtgcgcctttgctccatgctagctgagctctgacgtttttttcctgtcatcaccctgtcccaggatgaccgagtgggagacagcagcaccagcggtggcagagaccccagacatcaagctctttgggaagtggagcaccgatgatgtgcagatcaatgacatttccctgcaggattacattgcagtgaaggagaagtatgccaagtacctgcctcacagtgcagggcggtatgccgccaaacgcttccgcaaagctcagtgtcccattgtggagcgcctcactaactccatgatgatgcacggccgcaacaacggcaagaagctcatgactgtgcgcatcgtcaagcatgccttcgagatcatacacctgctcacaggcgagaaccctctgcaggtcctggtgaacgccatcatcaacagtggtccccgggaggactccacacgcattgggcgcgccgggactgtgagacgacaggctgtggatgtgtcccccctgcgccgtgtgaaccaggccatctggctgctgtgcacaggcgctcgtgaggctgccttccggaacattaagaccattgctgagtgcctggcagatgagctcatcaatgctgccaagggctcctcgaactcctatgccattaagaagaaggacgagctggagcgtgtggccaagtccaaccgctgattttcccagctgctgcccaataaacctgtctgccctttggggcagtcccagccacc

SEQ ID NO: 176827 - DNA, 892 bp, Homo sapiens
  Payload ID: 14705
  Gene Symbol: RPS6
  Gene Name: ribosomal protein S6
  ENST ID: ENST00000380381
  CDS Start-End: 42-317
ctcttttccgtggcgcctcggaggcgttcagctgcttcaagatgaagctgaacatctccttcccagccactggctgccagaaactcattgaagtggacgatgaacgcaaacttcgtactttctatgagaagcgtatggccacagaagttgctgctgacgctctgggtgaagaatggaaggtaaaagttgacaaattgttgcaggtatttaagtcagagacggtaaacgccattggtaactggtatttggaatggggttcagactccgggttctggcttctgacctttggtaagttgcttccgaatgccactttataaagttagaggtattaccttggagggggggacgtagagtaagccataaaatatacgtaaagtttacatcaacataattcttgccctgcatcatgcatttggcaatatgtcacatagctgtcctcataatccccaaagtgccaaaaagggttgtatctgatttgtttgttgctgtttgatattttatcttcttagtgctgttatctctaataaaacatcggttagaaatgcgacttgaaagacatttgataattgaacttgacaagttgggaatatagacaaaactcactgaacagagaaaacgtgcttaagttcaaattggttttcataattatactttctcatataggtgtgttcacagaggtcacaatcctgtactgtataattttggaatagaaatagtaaatgtgtcattcattgtatgctcttgcagggttatgtggtccgaatcagtggtgggaacgacaaacaaggtttccccatgaagcagggtgtcttgacccatggccgtgtccgcctgctactgagtaaggggcattcctgttacagaccaaggagaactggagaaagaaagagaa

SEQ ID NO: 176828 - DNA, 863 bp, Homo sapiens
  Payload ID: 14705
  Gene Symbol: RPS6
  Gene Name: ribosomal protein S6
  ENST ID: ENST00000315377
  CDS Start-End: 199-855
aagatgaaggtaggtgatggtggcgagtgttagactgggtttggggaacgtgaatcgagtcccagaacgcggcattgcctcagttccagcactccaggatcctggctttagctgaacatctccttcccagccactggctgccagaaactcattgaagtggacgatgaacgcaaacttcgtactttctatgagaagcgtatggccacagaagttgctgctgacgctctgggtgaagaatggaagggttatgtggtccgaatcagtggtgggaacgacaaacaaggtttccccatgaagcagggtgtcttgacccatggccgtgtccgcctgctactgagtaaggggcattcctgttacagaccaaggagaactggagaaagaaagagaaaatcagttcgtggttgcattgtggatgcaaatctgagcgttctcaacttggttattgtaaaaaaaggagagaaggatattcctggactgactgatactacagtgcctcgccgcctgggccccaaaagagctagcagaatccgcaaacttttcaatctctctaaagaagatgatgtccgccagtatgttgtaagaaagcccttaaataaagaaggtaagaaacctaggaccaaagcacccaagattcagcgtcttgttactccacgtgtcctgcagcacaaacggcggcgtattgctctgaagaagcagcgtaccaagaaaaataaagaagaggctgcagaatatgctaaacttttggccaagagaatgaaggaggctaaggagaagcgccaggaacaaattgcgaagagacgcagactttcctctctgcgagcttctacttctaagtctgaatccagtcagaaataagatttttt

SEQ ID NO: 176829 - DNA, 1355 bp, Homo sapiens
  Payload ID: 14705
  Gene Symbol: RPS6
  Gene Name: ribosomal protein S6
  ENST ID: ENST00000380384
  CDS Start-End: 676-1332
gctgcttcaagatgaaggtaggtgatggtggcgagtgttagactgggtttggggaacgtgaatcgagtcccagaacgcggcattgcctcagttccagcactccaggatcctggctttaggtggagaagggtctcaagtaggagaaggctcgcctttctggggcatggagctttttggccgaacggatggcaggcgattgcggctggagccgcggcgggccgggagcgccatggtggcgtccccgcgcccagccgggacggatgcggcgtgttgcccagtttgcggcaggcctgtggtgcggctcttgaccccggctttcttgcttcgggagggtgaacggctgcggagtgccctcgcccccagagtcattccgcggggcttgaggggaaaacgtcctgctgagtgcggcgcttcttgactgctactctgctttcacgtgcttttagtgagtacagtcggcatcttatatttcctgcttgtgtggaggcaacatgaaaggctttttgcagtggaattaactttgtagatggctctacaattacctgtatagatagtttcgtaaactatttccccccttttaatccttagctgaacatctccttcccagccactggctgccagaaactcattgaagtggacgatgaacgcaaacttcgtactttctatgagaagcgtatggccacagaagttgctgctgacgctctgggtgaagaatggaagggttatgtggtccgaatcagtggtgggaacgacaaacaaggtttccccatgaagcagggtgtcttgacccatggccgtgtccgcctgctactgagtaaggggcattcctgttacagaccaaggagaactggagaaagaaagagaaaatcagttcgtggttgcattgtggatgcaaatctgagcgttctcaacttggttattgtaaaaaaaggagagaaggatattcctggactgactgatactacagtgcctcgccgcctgggccccaaaagagctagcagaatccgcaaacttttcaatctctctaaagaagatgatgtccgccagtatgttgtaagaaagcccttaaataaagaaggtaagaaacctaggaccaaagcacccaagattcagcgtcttgttactccacgtgtcctgcagcacaaacggcggcgtattgctctgaagaagcagcgtaccaagaaaaataaagaagaggctgcagaatatgctaaacttttggccaagagaatgaaggaggctaaggagaagcgccaggaacaaattgcgaagagacgcagactttcctctctgcgagcttctacttctaagtctgaatccagtcagaaataagattttttgagtaacaaataaat

SEQ ID NO: 176830 - DNA, 1387 bp, Homo sapiens
  Payload ID: 14705
  Gene Symbol: RPS6
  Gene Name: ribosomal protein S6
  Uniprot ID: P62753
  ENST ID: ENST00000380394
  CDS Start-End: 60-809
gctaagcggaagttggccctcttttccgtggcgcctcggaggcgttcagctgcttcaagatgaagctgaacatctccttcccagccactggctgccagaaactcattgaagtggacgatgaacgcaaacttcgtactttctatgagaagcgtatggccacagaagttgctgctgacgctctgggtgaagaatggaagggttatgtggtccgaatcagtggtgggaacgacaaacaaggtttccccatgaagcagggtgtcttgacccatggccgtgtccgcctgctactgagtaaggggcattcctgttacagaccaaggagaactggagaaagaaagagaaaatcagttcgtggttgcattgtggatgcaaatctgagcgttctcaacttggttattgtaaaaaaaggagagaaggatattcctggactgactgatactacagtgcctcgccgcctgggccccaaaagagctagcagaatccgcaaacttttcaatctctctaaagaagatgatgtccgccagtatgttgtaagaaagcccttaaataaagaaggtaagaaacctaggaccaaagcacccaagattcagcgtcttgttactccacgtgtcctgcagcacaaacggcggcgtattgctctgaagaagcagcgtaccaagaaaaataaagaagaggctgcagaatatgctaaacttttggccaagagaatgaaggaggctaaggagaagcgccaggaacaaattgcgaagagacgcagactttcctctctgcgagcttctacttctaagtctgaatccagtcagaaataagattttttgagtaacaaataaataagatcagactctgatctctgttgacttttcattgctgatagaaaactacataaatgaagagagggaaagttaggtcatagaaaatggggatatgtatatatggtattccaatggtggataaagtcagacctattgtgtgtggtagtggaagacaaggtcagtgtacaggggttcctttcaggggatgggtggcacaggaagggattctgagcataagacacctgcctcttcagaatggcatggaacttaggggaaatgatgaggactattaatcttttttatatagtttatttttgaggaatatagctctttaaagcactatacacaatttaatacatgaaaattgaccttgtgaagatgaacatgtcttttttaaaaggtaacttttaaggcatagttttagtggatacctagttttagtggataccatccactaaatggtttttaagccatttcaaatttgttttaacaaagcttttcaactccagtgaattgttaggctgttcacacactgaaaaggaaatgactaaaaacattcttggatcagtgaaaaa

SEQ ID NO: 176831 - DNA, 5454 bp, Homo sapiens
  Payload ID: 14706
  Gene Symbol: RPS6KC1
  Gene Name: ribosomal protein S6 kinase, 52kDa, polypeptide 1
  Uniprot ID: Q96S38
  ENST ID: ENST00000366959
  CDS Start-End: 151-3315
gctgtgcagctgaggcgccgccgtggagccgccttggagccaccgccccctcgccgcttcgccgctgcgttggggaacctggaccgcggcggcgccgggtttccctcatgatcccgggcgggtggcggcggcggcagaggcggcgggaggatgacctcttaccgggagcggagtgccgacctggcccgtttctacactgtcaccgagccccagcgacacccgaggggctacacagtatataaggtcaccgcccggataattgtatggaagagatacagtgattttaagaaactacacaaagaactatggcaaattcacaaaaacttattccgacattcagagttgtttcctccatttgctaaaggaatagtgtttgggcgatttgatgaaactgttatcgaagagagaagacaatgtgctgaagacctgctacagttctctgccaatattcctgctctttacaatagtaaacagcttgaagactttttcaagggtggaataattaatgatagttctgaattaattggtcctgctgaagctcactcagattccctcattgatacctttcctgagtgtagtacggaaggcttctccagtgacagtgatctggtatctcttactgttgatgtggattctcttgctgagttagatgatggaatggcttccaatcaaaattctcccattagaacttttggtctcaatctttcttcggattcttcagcactaggggctgttgcttctgacagtgaacagagcaaaacagaagaagaacgggaaagtcgtagcctctttcctggcagtttaaagccgaagcttggcaagagagattatttggagaaagcaggagaattaataaagctggctttaaaaaaggaagaagaagacgactatgaagctgcttctgatttttataggaagggagttgatttactcctagaaggtgttcaaggagagtcaagccctacccgtcgagaagctgtgaagagaagaacagccgagtacctcatgcgggcagaaagtatctctagtctttatgggaaacctcagcttgatgatgtatctcagcctccaggatcactaagttcaaggcccctttggaacctaaggagccctgccgaggagctgaaggccttcagagtccttggggtgattgacaaggttttacttgtaatggacacaaggacagaacagactttcattttaaaaggtctaaggaaaagcagtgaatacagcaggaacagaaagaccatcatcccccgctgtgtgcccaacatggtgtgtctgcataagtacatcatctctgaggagtcagtatttcttgtgctgcagcatgcggaaggtggcaaactgtggtcatatatcagtaaatttctaaacagaagtcctgaagaaagctttgacatcaaggaagtgaaaaaacctacacttgcaaaagttcacctgcagcagccaacttctagtcctcaggacagcagtagctttgaatccagaggaagtgatggtggaagcatgcttaaagctctgcctttgaagagtagtcttactccaagttctcaagatgacagcaaccaggaagatgatggccaagatagctctccaaagtggccagattctggttcaagttcagaagaagaatgtactactagttatttaacattatgcaatgaatatgggcaagaaaagattgaaccagggtctttgaatgaggagcccttcatgaagactgaagggaatggtgttgatacaaaagctattaaaagcttcccagcacaccttgctgctgacagtgacagccccagcacacagctgagagctcacgagctgaagttcttccccaacgatgacccagaagcagttagttctccaagaacatcagattccctcagtagatcaaaaaatagccccatggaattctttaggatagacagtaaggatagcgcaagtgaactcctgggacttgactttggagaaaaattgtatagtctaaaatcagaacctttgaaaccattctttactcttccagatggagacagtgcttctaggagttttaatactagtgaaagcaaggtagagtttaaagctcaggacaccattagcaggggctcagatgactcagtgccagttatttcatttaaagatgctgcttttgatgatgtcagtggtactgatgaaggaagacctgatcttcttgtaaatttacctggtgaattggagtcaacaagagaagctgcagcaatgggacctactaagtttacacaaactaatatagggataatagaaaataaactcttggaagcccctgatgttttatgcctcaggcttagtactgaacaatgccaagcacatgaggagaaaggcatagaggaactgagtgatccctctgggcccaaatcctatagtataacagagaaacactatgcacaggaggatcccaggatgttatttgtagcagctgttgatcatagtagttcaggagatatgtctttgttacccagctcagatcctaagtttcaaggacttggagtggttgagtcagcagtaactgcaaacaacacagaagaaagcttattccgtatttgtagtccactctcaggtgctaatgaatatattgcaagcacagacactttaaaaacagaagaagtattgctgtttacagatcagactgatgatttggctaaagaggaaccaacttctttattccagagagactctgagactaagggtgaaagtggtttagtgctagaaggagacaaggaaatacatcagatttttgaggaccttgataaaaaattagcactagcctccaggttttacatcccagagggctgcattcaaagatgggcagctgaaatggtggtagcccttgatgctttacatagagagggaattgtgtgccgcgatttgaacccaaacaacatcttattgaatgatagaggacacattcagctaacgtattttagcaggtggagtgaggttgaagattcctgtgacagcgatgccatagagagaatgtactgtgccccagaggttggagcaatcactgaagaaactgaagcctgtgattggtggagtttgggtgctgtcctctttgaacttctcactggcaagactctggttgaatgccatccagcaggaataaatactcacactactttgaacatgccagaatgtgtctctgaagaggctcgctcactcattcaacagctcttgcagttcaatcctctggaacgacttggtgctggagttgctggtgttgaagatatcaaatctcatccattttttacccctgtggattgggcagaactgatgagatgaacgtaatgcagggttatcttcacacattctgatcttctctgtgacaggcatctccagcactgaggcacctctgactcacagttacttatggagcaccaaagcatttggataaagaccgttataggaaatgggggggaaatggctaaaagagaacaattcgtttacaattacaagatattagctaattgtgccaggggctgttatatacatatatacacaaccaaggtgtgatctgaatttaatccacatttggtgttgcagatgagttgtaaagccaactgaaagagttccttcaagaagttcctctgataggaagctagaagtgtagaatgaagttttacttgacagaaggacctttacatggcagctaacagtgctttttgctgaccaggattggtttatatgattaaattaatatttgcttaataatacactaaaagtatatgaacaatgtcatcaatgaaacttaaaagcgagaaaaaagaatatacacataatttctgacggaaaacctgtaccctgatgctgtataatgtatgttgaatgtggtcccagattatttctgtaagaagacactccatgttgtcagctttgtactctttgttgatactgcttatttagagaagggttcatataaacactcactctgtgtcttcaacagcatctttctttccccatctttctattttctgcaccctctgcttgttccctcatattctgttcttccgactcctgctaacacacatgcaacaaaaaagggaagggagtgcttatttccctttgtgtaaggactaagaaatcatgatatcaaataaacatggtgaaacattagatctcttcttcatttaataaccctcccccctttttttccttgaagaaatgcgtctgttcctttccttgtgaaatattatcagtttctaccattgcttctcatgcttgactttgttttactttttggcttggtatactaagaagcaaaggatctcatctaaatggaattgaatggcagtcctagtttgttacttatggtgatgagattttcagatttgaactaatctatttgacgtgatttagaaagaatgtaagtattcacacatctccaaacatttgtatttgttacttctttttgttgctaaggtagctcctgtagttatgcattgttgcaaaaatttacaaatgttttaaaagtgttaacatctgtttttttttaaacgttagccaaagaagaagtcactatttccaagttagaaaccaccagaaataattgaaatttttgatatgttctaatcttctttgcatttttgagatctgtgtgagagcccaaccccactccaggagcatctgtacagcttccatctgccatcgaccaggtcctctcatcaaattaaatggaacagaaaatgctctagtgaaacaaaggaaatgtgcaagcatttttcctttttctattattctatttccctttttcctttttggcccccttataatccaaaccccagctgaaaggctgcaacaacaccaggttggggagcaggtcaccaggatcatagttcagtcaaaatgacatcactccctggaactagatttcaactcactagtcccctggcctcataacaggaacttatgcaggtgagacacaagaatgacttcctgtgtaggactagtaggaaatctgcaagtacttagagctggccattacagaacttccttccagaagtgccctgtgacatgaaagtaggacttcacaactaaggtgaagatccctgccctaccacatgatttgagtctcttggattcaaaggacattaatgtcaacagatggttgccatgtcagtctgttgacacaattccattgcttcagtttctccccttttctctctatatgtttggttggagcttgtgcctaatgtaaatacatcattcataattagaatggacattaattattttagtaataaacacaggataaatagctttggggtgatgaaccagagtctgtttttattttatggtgtgtacatattttaagctgtacttctgtgaatggtactgatttttgtggttgttttttttttatattttgtttgtttaagcagaagagtggaatatggggtcaaaatcataaaagaagttgccatg

SEQ ID NO: 176832 - DNA, 5490 bp, Homo sapiens
  Payload ID: 14706
  Gene Symbol: RPS6KC1
  Gene Name: ribosomal protein S6 kinase, 52kDa, polypeptide 1
  Uniprot ID: Q96S38
  ENST ID: ENST00000366960
  CDS Start-End: 151-3351
gctgtgcagctgaggcgccgccgtggagccgccttggagccaccgccccctcgccgcttcgccgctgcgttggggaacctggaccgcggcggcgccgggtttccctcatgatcccgggcgggtggcggcggcggcagaggcggcgggaggatgacctcttaccgggagcggagtgccgacctggcccgtttctacactgtcaccgagccccagcgacacccgaggggctacacagtatataaggtcaccgcccgggttgtttcacgaagaaatccagaggatgtccaggagataattgtatggaagagatacagtgattttaagaaactacacaaagaactatggcaaattcacaaaaacttattccgacattcagagttgtttcctccatttgctaaaggaatagtgtttgggcgatttgatgaaactgttatcgaagagagaagacaatgtgctgaagacctgctacagttctctgccaatattcctgctctttacaatagtaaacagcttgaagactttttcaagggtggaataattaatgatagttctgaattaattggtcctgctgaagctcactcagattccctcattgatacctttcctgagtgtagtacggaaggcttctccagtgacagtgatctggtatctcttactgttgatgtggattctcttgctgagttagatgatggaatggcttccaatcaaaattctcccattagaacttttggtctcaatctttcttcggattcttcagcactaggggctgttgcttctgacagtgaacagagcaaaacagaagaagaacgggaaagtcgtagcctctttcctggcagtttaaagccgaagcttggcaagagagattatttggagaaagcaggagaattaataaagctggctttaaaaaaggaagaagaagacgactatgaagctgcttctgatttttataggaagggagttgatttactcctagaaggtgttcaaggagagtcaagccctacccgtcgagaagctgtgaagagaagaacagccgagtacctcatgcgggcagaaagtatctctagtctttatgggaaacctcagcttgatgatgtatctcagcctccaggatcactaagttcaaggcccctttggaacctaaggagccctgccgaggagctgaaggccttcagagtccttggggtgattgacaaggttttacttgtaatggacacaaggacagaacagactttcattttaaaaggtctaaggaaaagcagtgaatacagcaggaacagaaagaccatcatcccccgctgtgtgcccaacatggtgtgtctgcataagtacatcatctctgaggagtcagtatttcttgtgctgcagcatgcggaaggtggcaaactgtggtcatatatcagtaaatttctaaacagaagtcctgaagaaagctttgacatcaaggaagtgaaaaaacctacacttgcaaaagttcacctgcagcagccaacttctagtcctcaggacagcagtagctttgaatccagaggaagtgatggtggaagcatgcttaaagctctgcctttgaagagtagtcttactccaagttctcaagatgacagcaaccaggaagatgatggccaagatagctctccaaagtggccagattctggttcaagttcagaagaagaatgtactactagttatttaacattatgcaatgaatatgggcaagaaaagattgaaccagggtctttgaatgaggagcccttcatgaagactgaagggaatggtgttgatacaaaagctattaaaagcttcccagcacaccttgctgctgacagtgacagccccagcacacagctgagagctcacgagctgaagttcttccccaacgatgacccagaagcagttagttctccaagaacatcagattccctcagtagatcaaaaaatagccccatggaattctttaggatagacagtaaggatagcgcaagtgaactcctgggacttgactttggagaaaaattgtatagtctaaaatcagaacctttgaaaccattctttactcttccagatggagacagtgcttctaggagttttaatactagtgaaagcaaggtagagtttaaagctcaggacaccattagcaggggctcagatgactcagtgccagttatttcatttaaagatgctgcttttgatgatgtcagtggtactgatgaaggaagacctgatcttcttgtaaatttacctggtgaattggagtcaacaagagaagctgcagcaatgggacctactaagtttacacaaactaatatagggataatagaaaataaactcttggaagcccctgatgttttatgcctcaggcttagtactgaacaatgccaagcacatgaggagaaaggcatagaggaactgagtgatccctctgggcccaaatcctatagtataacagagaaacactatgcacaggaggatcccaggatgttatttgtagcagctgttgatcatagtagttcaggagatatgtctttgttacccagctcagatcctaagtttcaaggacttggagtggttgagtcagcagtaactgcaaacaacacagaagaaagcttattccgtatttgtagtccactctcaggtgctaatgaatatattgcaagcacagacactttaaaaacagaagaagtattgctgtttacagatcagactgatgatttggctaaagaggaaccaacttctttattccagagagactctgagactaagggtgaaagtggtttagtgctagaaggagacaaggaaatacatcagatttttgaggaccttgataaaaaattagcactagcctccaggttttacatcccagagggctgcattcaaagatgggcagctgaaatggtggtagcccttgatgctttacatagagagggaattgtgtgccgcgatttgaacccaaacaacatcttattgaatgatagaggacacattcagctaacgtattttagcaggtggagtgaggttgaagattcctgtgacagcgatgccatagagagaatgtactgtgccccagaggttggagcaatcactgaagaaactgaagcctgtgattggtggagtttgggtgctgtcctctttgaacttctcactggcaagactctggttgaatgccatccagcaggaataaatactcacactactttgaacatgccagaatgtgtctctgaagaggctcgctcactcattcaacagctcttgcagttcaatcctctggaacgacttggtgctggagttgctggtgttgaagatatcaaatctcatccattttttacccctgtggattgggcagaactgatgagatgaacgtaatgcagggttatcttcacacattctgatcttctctgtgacaggcatctccagcactgaggcacctctgactcacagttacttatggagcaccaaagcatttggataaagaccgttataggaaatgggggggaaatggctaaaagagaacaattcgtttacaattacaagatattagctaattgtgccaggggctgttatatacatatatacacaaccaaggtgtgatctgaatttaatccacatttggtgttgcagatgagttgtaaagccaactgaaagagttccttcaagaagttcctctgataggaagctagaagtgtagaatgaagttttacttgacagaaggacctttacatggcagctaacagtgctttttgctgaccaggattggtttatatgattaaattaatatttgcttaataatacactaaaagtatatgaacaatgtcatcaatgaaacttaaaagcgagaaaaaagaatatacacataatttctgacggaaaacctgtaccctgatgctgtataatgtatgttgaatgtggtcccagattatttctgtaagaagacactccatgttgtcagctttgtactctttgttgatactgcttatttagagaagggttcatataaacactcactctgtgtcttcaacagcatctttctttccccatctttctattttctgcaccctctgcttgttccctcatattctgttcttccgactcctgctaacacacatgcaacaaaaaagggaagggagtgcttatttccctttgtgtaaggactaagaaatcatgatatcaaataaacatggtgaaacattagatctcttcttcatttaataaccctcccccctttttttccttgaagaaatgcgtctgttcctttccttgtgaaatattatcagtttctaccattgcttctcatgcttgactttgttttactttttggcttggtatactaagaagcaaaggatctcatctaaatggaattgaatggcagtcctagtttgttacttatggtgatgagattttcagatttgaactaatctatttgacgtgatttagaaagaatgtaagtattcacacatctccaaacatttgtatttgttacttctttttgttgctaaggtagctcctgtagttatgcattgttgcaaaaatttacaaatgttttaaaagtgttaacatctgtttttttttaaacgttagccaaagaagaagtcactatttccaagttagaaaccaccagaaataattgaaatttttgatatgttctaatcttctttgcatttttgagatctgtgtgagagcccaaccccactccaggagcatctgtacagcttccatctgccatcgaccaggtcctctcatcaaattaaatggaacagaaaatgctctagtgaaacaaaggaaatgtgcaagcatttttcctttttctattattctatttccctttttcctttttggcccccttataatccaaaccccagctgaaaggctgcaacaacaccaggttggggagcaggtcaccaggatcatagttcagtcaaaatgacatcactccctggaactagatttcaactcactagtcccctggcctcataacaggaacttatgcaggtgagacacaagaatgacttcctgtgtaggactagtaggaaatctgcaagtacttagagctggccattacagaacttccttccagaagtgccctgtgacatgaaagtaggacttcacaactaaggtgaagatccctgccctaccacatgatttgagtctcttggattcaaaggacattaatgtcaacagatggttgccatgtcagtctgttgacacaattccattgcttcagtttctccccttttctctctatatgtttggttggagcttgtgcctaatgtaaatacatcattcataattagaatggacattaattattttagtaataaacacaggataaatagctttggggtgatgaaccagagtctgtttttattttatggtgtgtacatattttaagctgtacttctgtgaatggtactgatttttgtggttgttttttttttatattttgtttgtttaagcagaagagtggaatatggggtcaaaatcataaaagaagttgccatg

SEQ ID NO: 176833 - DNA, 4082 bp, Homo sapiens
  Payload ID: 14706
  Gene Symbol: RPS6KC1
  Gene Name: ribosomal protein S6 kinase, 52kDa, polypeptide 1
  ENST ID: ENST00000543354
  CDS Start-End: 595-3252
tctctgctgacccggaagcagagctgtgcagctgaggcgccgccgtggagccgccttggagccaccgccccctcgccgcttcgccgctgcgttggggaacctggaccgcggcggcgccgggtttccctcatgatcccgggcgggtggcggcggcggcagaggcggcgggaggatgacctcttaccgggagcggagtgccgacctggcccgtttctacactgtcaccgagccccagcgacacccgaggggctacacagtatataaggtcaccgcccgggttgtttcacgaagaaatccagaggatgtccaggagggcgatttgatgaaactgttatcgaagagagaagacaatgtgctgaagacctgctacagttctctgccaatattcctgctctttacaatagtaaacagcttgaagactttttcaagggtggaataattaatgatagttctgaattaattggtcctgctgaagctcactcagattccctcattgatacctttcctgagtgtagtacggaaggcttctccagtgacagtgatctggtatctcttactgttgatgtggattctcttgctgagttagatgatggaatggcttccaatcaaaattctcccattagaacttttggtctcaatctttcttcggattcttcagcactaggggctgttgcttctgacagtgaacagagcaaaacagaagaagaacgggaaagtcgtagcctctttcctggcagtttaaagccgaagcttggcaagagagattatttggagaaagcaggagaattaataaagctggctttaaaaaaggaagaagaagacgactatgaagctgcttctgatttttataggaagggagttgatttactcctagaaggtgttcaaggagagtcaagccctacccgtcgagaagctgtgaagagaagaacagccgagtacctcatgcgggcagaaagtatctctagtctttatgggaaacctcagcttgatgatgtatctcagcctccaggatcactaagttcaaggcccctttggaacctaaggagccctgccgaggagctgaaggccttcagagtccttggggtgattgacaaggttttacttgtaatggacacaaggacagaacagactttcattttaaaaggtctaaggaaaagcagtgaatacagcaggaacagaaagaccatcatcccccgctgtgtgcccaacatggtgtgtctgcataagtacatcatctctgaggagtcagtatttcttgtgctgcagcatgcggaaggtggcaaactgtggtcatatatcagtaaatttctaaacagaagtcctgaagaaagctttgacatcaaggaagtgaaaaaacctacacttgcaaaagttcacctgcagcagccaacttctagtcctcaggacagcagtagctttgaatccagaggaagtgatggtggaagcatgcttaaagctctgcctttgaagagtagtcttactccaagttctcaagatgacagcaaccaggaagatgatggccaagatagctctccaaagtggccagattctggttcaagttcagaagaagaatgtactactagttatttaacattatgcaatgaatatgggcaagaaaagattgaaccagggtctttgaatgaggagcccttcatgaagactgaagggaatggtgttgatacaaaagctattaaaagcttcccagcacaccttgctgctgacagtgacagccccagcacacagctgagagctcacgagctgaagttcttccccaacgatgacccagaagcagttagttctccaagaacatcagattccctcagtagatcaaaaaatagccccatggaattctttaggatagacagtaaggatagcgcaagtgaactcctgggacttgactttggagaaaaattgtatagtctaaaatcagaacctttgaaaccattctttactcttccagatggagacagtgcttctaggagttttaatactagtgaaagcaaggtagagtttaaagctcaggacaccattagcaggggctcagatgactcagtgccagttatttcatttaaagatgctgcttttgatgatgtcagtggtactgatgaaggaagacctgatcttcttgtaaatttacctggtgaattggagtcaacaagagaagctgcagcaatgggacctactaagtttacacaaactaatatagggataatagaaaataaactcttggaagcccctgatgttttatgcctcaggcttagtactgaacaatgccaagcacatgaggagaaaggcatagaggaactgagtgatccctctgggcccaaatcctatagtataacagagaaacactatgcacaggaggatcccaggatgttatttgtagcagctgttgatcatagtagttcaggagatatgtctttgttacccagctcagatcctaagtttcaaggacttggagtggttgagtcagcagtaactgcaaacaacacagaagaaagcttattccgtatttgtagtccactctcaggtgctaatgaatatattgcaagcacagacactttaaaaacagaagaagtattgctgtttacagatcagactgatgatttggctaaagaggaaccaacttctttattccagagagactctgagactaagggtgaaagtggtttagtgctagaaggagacaaggaaatacatcagatttttgaggaccttgataaaaaattagcactagcctccaggttttacatcccagagggctgcattcaaagatgggcagctgaaatggtggtagcccttgatgctttacatagagagggaattgtgtgccgcgatttgaacccaaacaacatcttattgaatgatagaggacacattcagctaacgtattttagcaggtggagtgaggttgaagattcctgtgacagcgatgccatagagagaatgtactgtgccccagaggttggagcaatcactgaagaaactgaagcctgtgattggtggagtttgggtgctgtcctctttgaacttctcactggcaagactctggttgaatgccatccagcaggaataaatactcacactactttgaacatgccagaatgtgtctctgaagaggctcgctcactcattcaacagctcttgcagttcaatcctctggaacgacttggtgctggagttgctggtgttgaagatatcaaatctcatccattttttacccctgtggattgggcagaactgatgagatgaacgtaatgcagggttatcttcacacattctgatcttctctgtgacaggcatctccagcactgaggcacctctgactcacagttacttatggagcaccaaagcatttggataaagaccgttataggaaatgggggggaaatggctaaaagagaacaattcgtttacaattacaagatattagctaattgtgccaggggctgttatatacatatatacacaaccaaggtgtgatctgaatttaatccacatttggtgttgcagatgagttgtaaagccaactgaaagagttccttcaagaagttcctctgataggaagctagaagtgtagaatgaagttttacttgacagaaggacctttacatggcagctaacagtgctttttgctgaccaggattggtttatatgattaaattaatatttgcttaataatacactaaaagtatatgaacaatgtcatcaatgaaacttaaaagcgagaaaaaagaatatacacataatttctgacggaaaacctgtaccctgatgctgtataatgtatgttgaatgtggtcccagattatttctgtaagaagacactccatgttgtcagctttgtactctttgttgatactgcttatttagagaagggttcatataaacactcactctgtgtcttcaacagcatctttctttccccatctttctattttctgcaccctctgcttgttccctcatattctgttcttccgactcctgctaacacacatgcaacaaaaaagggaagggagtgcttatttccctttgtgtaaggactaagaaatcatgatatcaaataaacatggtgaaacatt

SEQ ID NO: 176834 - DNA, 4227 bp, Homo sapiens
  Payload ID: 14706
  Gene Symbol: RPS6KC1
  Gene Name: ribosomal protein S6 kinase, 52kDa, polypeptide 1
  ENST ID: ENST00000543470
  CDS Start-End: 833-3397
tctctgctgacccggaagcagagctgtgcagctgaggcgccgccgtggagccgccttggagccaccgccccctcgccgcttcgccgctgcgttggggaacctggaccgcggcggcgccgggtttccctcatgatcccgggcgggtggcggcggcggcagaggcggcgggaggatgacctcttaccgggagcggagtgccgacctggcccgtttctacactgtcaccgagccccagcgacacccgaggggctacacagtatataaggtcaccgcccgggttgtttcacgaagaaatccagaggatgtccaggagggagaatcctgaaccaacctatccatgaacatactctctgccattttcttagtccttttttcgggaaaactcttttataataacaactgttggtgaaccattcatctgaaaactcttataattgtatggaagagatacagtgattttaagaaactacacaaagaactatggcaaattcacaaaaacttattccgacattcagagttgtttcctccatttgctaaaggaatagtgtttgggcgatttgatgaaactgttatcgaagagagaagacaatgtgctgaagacctgctacagttctctgccaatattcctgctctttacaatagtaaacagcttgaagactttttcaagggtggaataattaatgatagttctgaattaattggtcctgctgaagctcactcagattccctcattgatacctttcctgagtgtagtacggaaggcttctccagtgacagtgatctggtatctcttactgttgatgtggattctcttgctgagttagatgatggaatggcttccaatcaaaattctcccattagaacttttggtctcaatctttcttcggattcttcagcactaggggctgttgcttctgacagtgaacagagcaaaacagaagaagaacgggaaagtcgtagcctctttcctggcagtttaaagccgaagcttggcaagagagattatttggagaaagcaggagaattaataaagctggctttaaaaaaggaagaagaagacgactatgaagctgcttctgatttttataggaagggagttgatttactcctagaaggtgttcaaggagagtcaagccctacccgtcgagaagctgtgaagagaagaacagccgagtacctcatgcgggcagaaagtatctctagtctttatgggaaacctcagcttgatgatgtatctcaggttttacttgtaatggacacaaggacagaacagactttcattttaaaaggtctaaggaaaagcagtgaatacagcaggaacagaaagaccatcatcccccgctgtgtgcccaacatggtgtgtctgcataagtacatcatctctgaggagtcagtatttcttgtgctgcagcatgcggaaggtggcaaactgtggtcatatatcagtaaatttctaaacagaagtcctgaagaaagctttgacatcaaggaagtgaaaaaacctacacttgcaaaagttcacctgcagcagccaacttctagtcctcaggacagcagtagctttgaatccagaggaagtgatggtggaagcatgcttaaagctctgcctttgaagagtagtcttactccaagttctcaagatgacagcaaccaggaagatgatggccaagatagctctccaaagtggccagattctggttcaagttcagaagaagaatgtactactagttatttaacattatgcaatgaatatgggcaagaaaagattgaaccagggtctttgaatgaggagcccttcatgaagactgaagggaatggtgttgatacaaaagctattaaaagcttcccagcacaccttgctgctgacagtgacagccccagcacacagctgagagctcacgagctgaagttcttccccaacgatgacccagaagcagttagttctccaagaacatcagattccctcagtagatcaaaaaatagccccatggaattctttaggatagacagtaaggatagcgcaagtgaactcctgggacttgactttggagaaaaattgtatagtctaaaatcagaacctttgaaaccattctttactcttccagatggagacagtgcttctaggagttttaatactagtgaaagcaaggtagagtttaaagctcaggacaccattagcaggggctcagatgactcagtgccagttatttcatttaaagatgctgcttttgatgatgtcagtggtactgatgaaggaagacctgatcttcttgtaaatttacctggtgaattggagtcaacaagagaagctgcagcaatgggacctactaagtttacacaaactaatatagggataatagaaaataaactcttggaagcccctgatgttttatgcctcaggcttagtactgaacaatgccaagcacatgaggagaaaggcatagaggaactgagtgatccctctgggcccaaatcctatagtataacagagaaacactatgcacaggaggatcccaggatgttatttgtagcagctgttgatcatagtagttcaggagatatgtctttgttacccagctcagatcctaagtttcaaggacttggagtggttgagtcagcagtaactgcaaacaacacagaagaaagcttattccgtatttgtagtccactctcaggtgctaatgaatatattgcaagcacagacactttaaaaacagaagaagtattgctgtttacagatcagactgatgatttggctaaagaggaaccaacttctttattccagagagactctgagactaagggtgaaagtggtttagtgctagaaggagacaaggaaatacatcagatttttgaggaccttgataaaaaattagcactagcctccaggttttacatcccagagggctgcattcaaagatgggcagctgaaatggtggtagcccttgatgctttacatagagagggaattgtgtgccgcgatttgaacccaaacaacatcttattgaatgatagaggacacattcagctaacgtattttagcaggtggagtgaggttgaagattcctgtgacagcgatgccatagagagaatgtactgtgccccagaggttggagcaatcactgaagaaactgaagcctgtgattggtggagtttgggtgctgtcctctttgaacttctcactggcaagactctggttgaatgccatccagcaggaataaatactcacactactttgaacatgccagaatgtgtctctgaagaggctcgctcactcattcaacagctcttgcagttcaatcctctggaacgacttggtgctggagttgctggtgttgaagatatcaaatctcatccattttttacccctgtggattgggcagaactgatgagatgaacgtaatgcagggttatcttcacacattctgatcttctctgtgacaggcatctccagcactgaggcacctctgactcacagttacttatggagcaccaaagcatttggataaagaccgttataggaaatgggggggaaatggctaaaagagaacaattcgtttacaattacaagatattagctaattgtgccaggggctgttatatacatatatacacaaccaaggtgtgatctgaatttaatccacatttggtgttgcagatgagttgtaaagccaactgaaagagttccttcaagaagttcctctgataggaagctagaagtgtagaatgaagttttacttgacagaaggacctttacatggcagctaacagtgctttttgctgaccaggattggtttatatgattaaattaatatttgcttaataatacactaaaagtatatgaacaatgtcatcaatgaaacttaaaagcgagaaaaaagaatatacacataatttctgacggaaaacctgtaccctgatgctgtataatgtatgttgaatgtggtcccagattatttctgtaagaagacactccatgttgtcagctttgtactctttgttgatactgcttatttagagaagggttcatataaacactcactctgtgtcttcaacagcatctttctttccccatctttctattttctgcaccctctgcttgttccctcatattctgttcttccgactcctgctaacacacatgcaacaaaaaagggaagggagtgcttatttccctttgtgtaaggactaagaaatcatgatatcaaataaacatggtgaaacatt

SEQ ID NO: 176835 - DNA, 4188 bp, Homo sapiens
  Payload ID: 14706
  Gene Symbol: RPS6KC1
  Gene Name: ribosomal protein S6 kinase, 52kDa, polypeptide 1
  ENST ID: ENST00000614059
  CDS Start-End: 794-3358
tctctgctgacccggaagcagagctgtgcagctgaggcgccgccgtggagccgccttggagccaccgccccctcgccgcttcgccgctgcgttggggaacctggaccgcggcggcgccgggtttccctcatgatcccgggcgggtggcggcggcggcagaggcggcgggaggatgacctcttaccgggagcggagtgccgacctggcccgtttctacactgtcaccgagccccagcgacacccgaggggctacacagtatataaggtcaccgcccgggttgtttcacgaagaaatccagaggatgtccaggagataattgtatggaagagatacagtgattttaagaaactacacaaagaactatggcaaattcacaaaaacttattccgacattcagagttgtttcctccatttgctaaaggaatagtgtttgggcgatttgatgaaactgttatcgaagagagaagacaatgtgctgaagacctgctacagttctctgccaatattcctgctctttacaatagtaaacagcttgaagactttttcaagggtggaataattaatgatagttctgaattaattggtcctgctgaagctcactcagattccctcattgatacctttcctgagtgtagtacggaaggtattttaatggtcttacttttttgatctaatctcatttaatcatgattctcattgctaataaaatatgatttgaaaggcttctccagtgacagtgatctggtatctcttactgttgatgtggattctcttgctgagttagatgatggaatggcttccaatcaaaattctcccattagaacttttggtctcaatctttcttcggattcttcagcactaggggctgttgcttctgacagtgaacagagcaaaacagaagaagaacgggaaagtcgtagcctctttcctggcagtttaaagccgaagcttggcaagagagattatttggagaaagcaggagaattaataaagctggctttaaaaaaggaagaagaagacgactatgaagctgcttctgatttttataggaagggagttgatttactcctagaaggtgttcaaggagagtcaagccctacccgtcgagaagctgtgaagagaagaacagccgagtacctcatgcgggcagaaagtatctctagtctttatgggaaacctcagcttgatgatgtatctcaggttttacttgtaatggacacaaggacagaacagactttcattttaaaaggtctaaggaaaagcagtgaatacagcaggaacagaaagaccatcatcccccgctgtgtgcccaacatggtgtgtctgcataagtacatcatctctgaggagtcagtatttcttgtgctgcagcatgcggaaggtggcaaactgtggtcatatatcagtaaatttctaaacagaagtcctgaagaaagctttgacatcaaggaagtgaaaaaacctacacttgcaaaagttcacctgcagcagccaacttctagtcctcaggacagcagtagctttgaatccagaggaagtgatggtggaagcatgcttaaagctctgcctttgaagagtagtcttactccaagttctcaagatgacagcaaccaggaagatgatggccaagatagctctccaaagtggccagattctggttcaagttcagaagaagaatgtactactagttatttaacattatgcaatgaatatgggcaagaaaagattgaaccagggtctttgaatgaggagcccttcatgaagactgaagggaatggtgttgatacaaaagctattaaaagcttcccagcacaccttgctgctgacagtgacagccccagcacacagctgagagctcacgagctgaagttcttccccaacgatgacccagaagcagttagttctccaagaacatcagattccctcagtagatcaaaaaatagccccatggaattctttaggatagacagtaaggatagcgcaagtgaactcctgggacttgactttggagaaaaattgtatagtctaaaatcagaacctttgaaaccattctttactcttccagatggagacagtgcttctaggagttttaatactagtgaaagcaaggtagagtttaaagctcaggacaccattagcaggggctcagatgactcagtgccagttatttcatttaaagatgctgcttttgatgatgtcagtggtactgatgaaggaagacctgatcttcttgtaaatttacctggtgaattggagtcaacaagagaagctgcagcaatgggacctactaagtttacacaaactaatatagggataatagaaaataaactcttggaagcccctgatgttttatgcctcaggcttagtactgaacaatgccaagcacatgaggagaaaggcatagaggaactgagtgatccctctgggcccaaatcctatagtataacagagaaacactatgcacaggaggatcccaggatgttatttgtagcagctgttgatcatagtagttcaggagatatgtctttgttacccagctcagatcctaagtttcaaggacttggagtggttgagtcagcagtaactgcaaacaacacagaagaaagcttattccgtatttgtagtccactctcaggtgctaatgaatatattgcaagcacagacactttaaaaacagaagaagtattgctgtttacagatcagactgatgatttggctaaagaggaaccaacttctttattccagagagactctgagactaagggtgaaagtggtttagtgctagaaggagacaaggaaatacatcagatttttgaggaccttgataaaaaattagcactagcctccaggttttacatcccagagggctgcattcaaagatgggcagctgaaatggtggtagcccttgatgctttacatagagagggaattgtgtgccgcgatttgaacccaaacaacatcttattgaatgatagaggacacattcagctaacgtattttagcaggtggagtgaggttgaagattcctgtgacagcgatgccatagagagaatgtactgtgccccagaggttggagcaatcactgaagaaactgaagcctgtgattggtggagtttgggtgctgtcctctttgaacttctcactggcaagactctggttgaatgccatccagcaggaataaatactcacactactttgaacatgccagaatgtgtctctgaagaggctcgctcactcattcaacagctcttgcagttcaatcctctggaacgacttggtgctggagttgctggtgttgaagatatcaaatctcatccattttttacccctgtggattgggcagaactgatgagatgaacgtaatgcagggttatcttcacacattctgatcttctctgtgacaggcatctccagcactgaggcacctctgactcacagttacttatggagcaccaaagcatttggataaagaccgttataggaaatgggggggaaatggctaaaagagaacaattcgtttacaattacaagatattagctaattgtgccaggggctgttatatacatatatacacaaccaaggtgtgatctgaatttaatccacatttggtgttgcagatgagttgtaaagccaactgaaagagttccttcaagaagttcctctgataggaagctagaagtgtagaatgaagttttacttgacagaaggacctttacatggcagctaacagtgctttttgctgaccaggattggtttatatgattaaattaatatttgcttaataatacactaaaagtatatgaacaatgtcatcaatgaaacttaaaagcgagaaaaaagaatatacacataatttctgacggaaaacctgtaccctgatgctgtataatgtatgttgaatgtggtcccagattatttctgtaagaagacactccatgttgtcagctttgtactctttgttgatactgcttatttagagaagggttcatataaacactcactctgtgtcttcaacagcatctttctttccccatctttctattttctgcaccctctgcttgttccctcatattctgttcttccgactcctgctaacacacatgcaacaaaaaagggaagggagtgcttatttccctttgtgtaaggactaagaaatcatgatatcaaataaacatggtgaaacatt

SEQ ID NO: 176836 - DNA, 4022 bp, Homo sapiens
  Payload ID: 14706
  Gene Symbol: RPS6KC1
  Gene Name: ribosomal protein S6 kinase, 52kDa, polypeptide 1
  ENST ID: ENST00000615329
  CDS Start-End: 1387-3192
tctctgctgacccggaagcagagctgtgcagctgaggcgccgccgtggagccgccttggagccaccgccccctcgccgcttcgccgctgcgttggggaacctggaccgcggcggcgccgggtttccctcatgatcccgggcgggtggcggcggcggcagaggcggcgggaggatgacctcttaccgggagcggagtgccgacctggcccgtttctacactgtcaccgagccccagcgacacccgaggggctacacagtatataaggtcaccgcccgggttgtttcacgaagaaatccagaggatgtccaggagataattgtatggaagagatacagtgattttaagaaactacacaaagaactatggcaaattcacaaaaacttattccgacattcagagttgtttcctccatttgctaaaggaatagtgtttgggcgatttgatgaaactgttatcgaagagagaagacaatgtgctgaagacctgctacagttctctgccaatattcctgctctttacaatagtaaacagcttgaagactttttcaagggtggaataattaatgatagttctgaattaattggtcctgctgaagctcactcagattccctcattgatacctttcctgagtgtagtacggaaggcttctccagtgacagtgatctggtatctcttactgttgatgtggattctcttgctgagttagatgatggaatggcttccaatcaaaattctcccattagaacttttggtctcaatctttcttcggattcttcagcactaggggctgttgcttctgacagtgaacagagcaaaacagaagaagaacgggaaagtcgtagcctctttcctggcagtttaaagccgaagcttggcaagagagattatttggagaaagcaggagaattaataaagctggctttaaaaaaggaagaagaagacgactatgaagctgcttctgatttttataggaagggagttgatttactcctagaaggtgttcaaggagagtcaagccctacccgtcgagaagctgtgaagagaagaacagccgagtacctcatgcgggcagaaagtatctctagtctttatgggaaacctcagcttgatgatgtatctcagcctccaggatcactaagttcaaggcccctttggaacctaaggagccctgccgaggagctgaaggccttcagagtccttggggtgattgacaaggtggcaaactgtggtcatatatcagtaaatttctaaacagaagtcctgaagaaagctttgacatcaaggaagtgaaaaaacctacacttgcaaaagttcacctgcagcagccaacttctagtcctcaggacagcagtagctttgaatccagaggaagtgatggtggaagcatgcttaaagctctgcctttgaagagtagtcttactccaagttctcaagatgacagcaaccaggaagatgatggccaagatagctctccaaagtggccagattctggttcaagttcagaagaagaatgtactactagttatttaacattatgcaatgaatatgggcaagaaaagattgaaccagggtctttgaatgaggagcccttcatgaagactgaagggaatggtgttgatacaaaagctattaaaagcttcccagcacaccttgctgctgacagtgacagccccagcacacagctgagagctcacgagctgaagttcttccccaacgatgacccagaagcagttagttctccaagaacatcagattccctcagtagatcaaaaaatagccccatggaattctttaggatagacagtaaggatagcgcaagtgaactcctgggacttgactttggagaaaaattgtatagtctaaaatcagaacctttgaaaccattctttactcttccagatggagacagtgcttctaggagttttaatactagtgaaagcaaggtagagtttaaagctcaggacaccattagcaggggctcagatgactcagtgccagttatttcatttaaagatgctgcttttgatgatgtcagtggtactgatgaaggaagacctgatcttcttgtaaatttacctggtgaattggagtcaacaagagaagctgcagcaatgggacctactaagtttacacaaactaatatagggataatagaaaataaactcttggaagcccctgatgttttatgcctcaggcttagtactgaacaatgccaagcacatgaggagaaaggcatagaggaactgagtgatccctctgggcccaaatcctatagtataacagagaaacactatgcacaggaggatcccaggatgttatttgtagcagctgttgatcatagtagttcaggagatatgtctttgttacccagctcagatcctaagtttcaaggacttggagtggttgagtcagcagtaactgcaaacaacacagaagaaagcttattccgtatttgtagtccactctcaggtgctaatgaatatattgcaagcacagacactttaaaaacagaagaagtattgctgtttacagatcagactgatgatttggctaaagaggaaccaacttctttattccagagagactctgagactaagggtgaaagtggtttagtgctagaaggagacaaggaaatacatcagatttttgaggaccttgataaaaaattagcactagcctccaggttttacatcccagagggctgcattcaaagatgggcagctgaaatggtggtagcccttgatgctttacatagagagggaattgtgtgccgcgatttgaacccaaacaacatcttattgaatgatagaggacacattcagctaacgtattttagcaggtggagtgaggttgaagattcctgtgacagcgatgccatagagagaatgtactgtgccccagaggttggagcaatcactgaagaaactgaagcctgtgattggtggagtttgggtgctgtcctctttgaacttctcactggcaagactctggttgaatgccatccagcaggaataaatactcacactactttgaacatgccagaatgtgtctctgaagaggctcgctcactcattcaacagctcttgcagttcaatcctctggaacgacttggtgctggagttgctggtgttgaagatatcaaatctcatccattttttacccctgtggattgggcagaactgatgagatgaacgtaatgcagggttatcttcacacattctgatcttctctgtgacaggcatctccagcactgaggcacctctgactcacagttacttatggagcaccaaagcatttggataaagaccgttataggaaatgggggggaaatggctaaaagagaacaattcgtttacaattacaagatattagctaattgtgccaggggctgttatatacatatatacacaaccaaggtgtgatctgaatttaatccacatttggtgttgcagatgagttgtaaagccaactgaaagagttccttcaagaagttcctctgataggaagctagaagtgtagaatgaagttttacttgacagaaggacctttacatggcagctaacagtgctttttgctgaccaggattggtttatatgattaaattaatatttgcttaataatacactaaaagtatatgaacaatgtcatcaatgaaacttaaaagcgagaaaaaagaatatacacataatttctgacggaaaacctgtaccctgatgctgtataatgtatgttgaatgtggtcccagattatttctgtaagaagacactccatgttgtcagctttgtactctttgttgatactgcttatttagagaagggttcatataaacactcactctgtgtcttcaacagcatctttctttccccatctttctattttctgcaccctctgcttgttccctcatattctgttcttccgactcctgctaacacacatgcaacaaaaaagggaagggagtgcttatttccctttgtgtaaggactaagaaatcatgatatcaaataaacatggtgaaacatt

SEQ ID NO: 176837 - DNA, 5375 bp, Homo sapiens
  Payload ID: 14707
  Gene Symbol: RPS6KB1
  Gene Name: ribosomal protein S6 kinase, 70kDa, polypeptide 1
  Uniprot ID: P23443
  ENST ID: ENST00000225577
  CDS Start-End: 22-1599
ggctgcggcgggtccgggcccatgaggcgacgaaggaggcgggacggcttttacccagccccggacttccgagacagggaagctgaggacatggcaggagtgtttgacatagacctggaccagccagaggacgcgggctctgaggatgagctggaggaggggggtcagttaaatgaaagcatggaccatgggggagttggaccatatgaacttggcatggaacattgtgagaaatttgaaatctcagaaactagtgtgaacagagggccagaaaaaatcagaccagaatgttttgagctacttcgggtacttggtaaagggggctatggaaaggtttttcaagtacgaaaagtaacaggagcaaatactgggaaaatatttgccatgaaggtgcttaaaaaggcaatgatagtaagaaatgctaaagatacagctcatacaaaagcagaacggaatattctggaggaagtaaagcatcccttcatcgtggatttaatttatgcctttcagactggtggaaaactctacctcatccttgagtatctcagtggaggagaactatttatgcagttagaaagagagggaatatttatggaagacactgcctgcttttacttggcagaaatctccatggctttggggcatttacatcaaaaggggatcatctacagagacctgaagccggagaatatcatgcttaatcaccaaggtcatgtgaaactaacagactttggactatgcaaagaatctattcatgatggaacagtcacacacacattttgtggaacaatagaatacatggcccctgaaatcttgatgagaagtggccacaatcgtgctgtggattggtggagtttgggagcattaatgtatgacatgctgactggagcacccccattcactggggagaatagaaagaaaacaattgacaaaatcctcaaatgtaaactcaatttgcctccctacctcacacaagaagccagagatctgcttaaaaagctgctgaaaagaaatgctgcttctcgtctgggagctggtcctggggacgctggagaagttcaagctcatccattctttagacacattaactgggaagaacttctggctcgaaaggtggagcccccctttaaacctctgttgcaatctgaagaggatgtaagtcagtttgattccaagtttacacgtcagacacctgtcgacagcccagatgactcaactctcagtgaaagtgccaatcaggtctttctgggttttacatatgtggctccatctgtacttgaaagtgtgaaagaaaagttttcctttgaaccaaaaatccgatcacctcgaagatttattggcagcccacgaacacctgtcagcccagtcaaattttctcctggggatttctggggaagaggtgcttcggccagcacagcaaatcctcagacacctgtggaatacccaatggaaacaagtggcatagagcagatggatgtgacaatgagtggggaagcatcggcaccacttccaatacgacagccgaactctgggccatacaaaaaacaagcttttcccatgatctccaaacggccagagcacctgcgtatgaatctatgacagagcaatgcttttaatgaatttaaggcaaaaaaggtggagagggagatgtgtgagcatcctgcaaggtgaaacgactcaaaatgacagtttcagagagtcaatgtcattacatagaacacttcagacacaggaaaaataaacgtggattttaaaaaatcaatcaatggtgcaaaaaaaaacttaaagcaaaatagtattgctgaactcttaggcacatcaattaattgattcctcgcgacatcttctcaaccttatcaaggattttcatgttgatgactcgaaactgacagtattaagggtaggatgttgcttctgaatcactgttgagttctgattgtgttgaagaagggttatcctttcattaggcaaagtacaaaattgcctataatacttgcaactaaggacaaattagcatgcaagcttggtcaaactttttccagcaaaatggaagcaaagacaaaagaaacttaccaattgatgttttacgtgcaaacaacctgaatcttttttttatataaatatatatttttcaaatagatttttgattcagctcattatgaaaaacatcccaaactttaaaatgcgaaattattggttggtgtgaagaaagccagacaacttctgtttcttctcttggtgaaataataaaatgcaaatgaatcattgttaaccacagctgtggctcgtttgagggattggggtggacctggggtttattttcagtaacccagctgcaatacctgtctgtaatatgagaaaaaaaaaatgaatctatttaatcatttctacttgcagtactgctatgtgctaagcttaactggaagccttggaatgggcataagttgtatgtcctacatttcatcattgtcccgggcctgcattgcactggaaaaaaaaatcgccacctgttcttacaccagtatttggttcaagacaccaaatgtcttcagcccatggctgaagaacaacagaagagagtcaggataaaaaatacatactgtggtcggcaaggtgagggagatagggatatccaggggaagagggtgttgctgtggcccactctctgtctaatctctttacagcaaattggtaagattttcagttttacttctttctactgtttctgctgtctaccttccttatatttttttcctcaacagttttaaaaagaaaaaaaggtctatttttttttctcctatacttgggctacattttttgattgtaaaaatatttgatggccttttgatgaatgtcttccacagtaaagaaaacttagtggcttaatttaggaaacatgttaacaggacactatgtttttgaaattgtaacaaaatctacataaatgatttacaggttaaaagaataaaaataaaggtaactttacctttcttaaatatttcctgccttaaagagagcatttccatgactttagctggtgaaagggtttaatatctgcagagctttataaaaatatatttcagtgcatactggtataatagatgatcatgcagttgcagttgagttgtatcaccttttttgtttgtcttttataatgtcttcagtctgagtgtgcaaagtcaatttgtaatattttgcaaccctaggatttttttaaatagatgctgcttgctatgttttcaaacctttttgagccataggatccaagccataaaattctttatgcatgttgaattcagtcagaaaagagcaaggctttgctttttgaaattgcaactcaaatgagatgggatgaaatcctatgacagtaagcaaaaacagaaccatgaaaaatgattggacatacaccttttcaattgtggcaataattgaaagaatcgataaaagttcatctttggacagaaagcctttaaaaaaaaaatcactccctcttccccctcctcccttattgcagcagcctactgagaactttgactgttgctggtaaattagaagctacaataataattaagggcagaaattatacttaaaaagtgcagatccttgttctttgacaatttgtgatgtctgaaaaaacagaacccgaaaagctatggtgatatgtacaggcattatttcagactgtaaatggcttgtgatactcttgatacttgttttcaaatatgtttactaactgtagtgttgactgcctgaccaaattccagtgaaacttatacaccaaaatattcttcctaggtcctatttgctagtaacatgagcactgtgattggctggctataaccaccccagttaaaccattttcataattagtagtgccagcaatagtggcaaacactgcaacttttctgcataaaaagcattaattgcacagctaccatccacacaaatacatagtttttctgacttcacatttattaagtgaaatttatttcccatgctgtggaaagtttattgagaacttgtttcataaatggatatccctactatgactgtgaaaacatgtcaagtgtcacattagtgtcacagacagaaagcacacacctatgcaatatggcttatctatatttatttgtaaaaatccaagcatagtttaaaatatgatgtcgatattactagtcttgagtttctaagagggttctttatgttataccaggtaagtgtataaaagagattaagtgcttttttttcatcacttgattattttctttaaaatcagctattacaggatatttttttattttatacatgctgttttttaattaaaatataatcactgaagtttactaatttgattttataaggtttgtagcattacagaataactaaactgggatttataaaccagctgtgattaacaatgtaaagtattaattattgaactttgaaccagatttttaggaaaattatgttctttttccccctttatggtcttaactaatttgaatccttcaagaaggatttttccatactattttttaagatagaagataatttgtgggcaggggtggaggatgcatgtatgatactccataaattcaacattctttactataggtaatgaatgattataaacaagatgcatcttagatagtattaatatactgagccttggattatatatttaatataggacctattttgaatattcagttaatcatatggttcctagcttacaagggctagatctaagattattcccatgagaaatgttgaatttatgaagaatagattttaaggctttgaaaatggttaatttctcaaaaacatcaatgtccaaacatctaccttttttcataggagtagacactagcaagctggacaaactatcacaaaagtatttgtcacacataacctgtggtctgttgctgattaatacagtactttttcttgtgtgattcttaacattatagcacaagtattatctcagtggattatccggaataacatctgaaagatgggttcatctatgtttgtgtttgctctttaaactattgtttctcctatcccaagttcgctttgcatctatcagtaaataaaattcttcagctgccttattaggagtgctatgagggtaacacctgttctgcttttcatcttgtatttagttgactgtattatttgatttcggattgaatgaatgtaaatagaaattaaatgcaaatttgaatgaacataaatagaagtgatttatttttttattatcttaaagataggaaggaattagtatacgtatcaggtgtataaatggtttaaatttattttaacatgtcagatgtgttcaagttgtcatataaataaactatgtatgtaaggaa

SEQ ID NO: 176838 - DNA, 5479 bp, Homo sapiens
  Payload ID: 14707
  Gene Symbol: RPS6KB1
  Gene Name: ribosomal protein S6 kinase, 70kDa, polypeptide 1
  Uniprot ID: P23443
  ENST ID: ENST00000393021
  CDS Start-End: 428-1846
gtttggcttcacggaaccctgtacgcatgctcctacgctgaactttaggagccagtctaaggcctaggcgcagacgcactgagcctaagcagccggtgatggcggcagcggctgtggtggctgcggcgggtccgggcccatgaggcgacgaaggaggcgggacggcttttacccagccccggacttccgagacagggaagctgaggacatggcaggagtgtttgacatagacctggaccagccagaggacgcgggctctgaggatgagctggaggagggggaagcgctcagctgttagaagtgacagctgaaaacttctgtcgggagtagcactgccgctgctgttacagccaccaggagttttatttcgggagcaagggggctctgctgcatcttccaatcttccaggggtcagttaaatgaaagcatggaccatgggggagttggaccatatgaacttggcatggaacattgtgagaaatttgaaatctcagaaactagtgtgaacagagggccagaaaaaatcagaccagaatgttttgagctacttcgggtacttggtaaagggggctatggaaaggtttttcaagtacgaaaagtaacaggagcaaatactgggaaaatatttgccatgaaggtgcttaaaaaggcaatgatagtaagaaatgctaaagatacagctcatacaaaagcagaacggaatattctggaggaagtaaagcatcccttcatcgtggatttaatttatgcctttcagactggtggaaaactctacctcatccttgagtatctcagtggaggagaactatttatgcagttagaaagagagggaatatttatggaagacactgcctgcttttacttggcagaaatctccatggctttggggcatttacatcaaaaggggatcatctacagagacctgaagccggagaatatcatgcttaatcaccaaggtcatgtgaaactaacagactttggactatgcaaagaatctattcatgatggaacagtcacacacacattttgtggaacaatagaatacatggcccctgaaatcttgatgagaagtggccacaatcgtgctgtggattggtggagtttgggagcattaatgtatgacatgctgactggagcacccccattcactggggagaatagaaagaaaacaattgacaaaatcctcaaatgtaaactcaatttgcctccctacctcacacaagaagccagagatctgcttaaaaagctgctgaaaagaaatgctgcttctcgtctgggagctggtcctggggacgctggagaagttcaagctcatccattctttagacacattaactgggaagaacttctggctcgaaaggtggagcccccctttaaacctctgttgcaatctgaagaggatgtaagtcagtttgattccaagtttacacgtcagacacctgtcgacagcccagatgactcaactctcagtgaaagtgccaatcaggtctttctgggttttacatatgtggctccatctgtacttgaaagtgtgaaagaaaagttttcctttgaaccaaaaatccgatcacctcgaagatttattggcagcccacgaacacctgtcagcccagtcaaattttctcctggggatttctggggaagaggtgcttcggccagcacagcaaatcctcagacacctgtggaatacccaatggaaacaagtggcatagagcagatggatgtgacaatgagtggggaagcatcggcaccacttccaatacgacagccgaactctgggccatacaaaaaacaagcttttcccatgatctccaaacggccagagcacctgcgtatgaatctatgacagagcaatgcttttaatgaatttaaggcaaaaaaggtggagagggagatgtgtgagcatcctgcaaggtgaaacgactcaaaatgacagtttcagagagtcaatgtcattacatagaacacttcagacacaggaaaaataaacgtggattttaaaaaatcaatcaatggtgcaaaaaaaaacttaaagcaaaatagtattgctgaactcttaggcacatcaattaattgattcctcgcgacatcttctcaaccttatcaaggattttcatgttgatgactcgaaactgacagtattaagggtaggatgttgcttctgaatcactgttgagttctgattgtgttgaagaagggttatcctttcattaggcaaagtacaaaattgcctataatacttgcaactaaggacaaattagcatgcaagcttggtcaaactttttccagcaaaatggaagcaaagacaaaagaaacttaccaattgatgttttacgtgcaaacaacctgaatcttttttttatataaatatatatttttcaaatagatttttgattcagctcattatgaaaaacatcccaaactttaaaatgcgaaattattggttggtgtgaagaaagccagacaacttctgtttcttctcttggtgaaataataaaatgcaaatgaatcattgttaaccacagctgtggctcgtttgagggattggggtggacctggggtttattttcagtaacccagctgcaatacctgtctgtaatatgagaaaaaaaaaatgaatctatttaatcatttctacttgcagtactgctatgtgctaagcttaactggaagccttggaatgggcataagttgtatgtcctacatttcatcattgtcccgggcctgcattgcactggaaaaaaaaatcgccacctgttcttacaccagtatttggttcaagacaccaaatgtcttcagcccatggctgaagaacaacagaagagagtcaggataaaaaatacatactgtggtcggcaaggtgagggagatagggatatccaggggaagagggtgttgctgtggcccactctctgtctaatctctttacagcaaattggtaagattttcagttttacttctttctactgtttctgctgtctaccttccttatatttttttcctcaacagttttaaaaagaaaaaaaggtctatttttttttctcctatacttgggctacattttttgattgtaaaaatatttgatggccttttgatgaatgtcttccacagtaaagaaaacttagtggcttaatttaggaaacatgttaacaggacactatgtttttgaaattgtaacaaaatctacataaatgatttacaggttaaaagaataaaaataaaggtaactttacctttcttaaatatttcctgccttaaagagagcatttccatgactttagctggtgaaagggtttaatatctgcagagctttataaaaatatatttcagtgcatactggtataatagatgatcatgcagttgcagttgagttgtatcaccttttttgtttgtcttttataatgtcttcagtctgagtgtgcaaagtcaatttgtaatattttgcaaccctaggatttttttaaatagatgctgcttgctatgttttcaaacctttttgagccataggatccaagccataaaattctttatgcatgttgaattcagtcagaaaagagcaaggctttgctttttgaaattgcaactcaaatgagatgggatgaaatcctatgacagtaagcaaaaacagaaccatgaaaaatgattggacatacaccttttcaattgtggcaataattgaaagaatcgataaaagttcatctttggacagaaagcctttaaaaaaaaaatcactccctcttccccctcctcccttattgcagcagcctactgagaactttgactgttgctggtaaattagaagctacaataataattaagggcagaaattatacttaaaaagtgcagatccttgttctttgacaatttgtgatgtctgaaaaaacagaacccgaaaagctatggtgatatgtacaggcattatttcagactgtaaatggcttgtgatactcttgatacttgttttcaaatatgtttactaactgtagtgttgactgcctgaccaaattccagtgaaacttatacaccaaaatattcttcctaggtcctatttgctagtaacatgagcactgtgattggctggctataaccaccccagttaaaccattttcataattagtagtgccagcaatagtggcaaacactgcaacttttctgcataaaaagcattaattgcacagctaccatccacacaaatacatagtttttctgacttcacatttattaagtgaaatttatttcccatgctgtggaaagtttattgagaacttgtttcataaatggatatccctactatgactgtgaaaacatgtcaagtgtcacattagtgtcacagacagaaagcacacacctatgcaatatggcttatctatatttatttgtaaaaatccaagcatagtttaaaatatgatgtcgatattactagtcttgagtttctaagagggttctttatgttataccaggtaagtgtataaaagagattaagtgcttttttttcatcacttgattattttctttaaaatcagctattacaggatatttttttattttatacatgctgttttttaattaaaatataatcactgaagtttactaatttgattttataaggtttgtagcattacagaataactaaactgggatttataaaccagctgtgattaacaatgtaaagtattaattattgaactttgaaccagatttttaggaaaattatgttctttttccccctttatggtcttaactaatttgaatccttcaagaaggatttttccatactattttttaagatagaagataatttgtgggcaggggtggaggatgcatgtatgatactccataaattcaacattctttactataggtaatgaatgattataaacaagatgcatcttagatagtattaatatactgagccttggattatatatttaatataggacctattttgaatattcagttaatcatatggttcctagcttacaagggctagatctaagattattcccatgagaaatgttgaatttatgaagaatagattttaaggctttgaaaatggttaatttctcaaaaacatcaatgtccaaacatctaccttttttcataggagtagacactagcaagctggacaaactatcacaaaagtatttgtcacacataacctgtggtctgttgctgattaatacagtactttttcttgtgtgattcttaacattatagcacaagtattatctcagtggattatccggaataacatctgaaagatgggttcatctatgtttgtgtttgctctttaaactattgtttctcctatcccaagttcgctttgcatctatcagtaaataaaattcttcagctgccttattaggagtgctatgagggtaacacctgttctgcttttcatcttgtatttagttgactgtattatttgatttcggattgaatgaatgtaaatagaaattaaatgcaaatttgaatgaac

SEQ ID NO: 176839 - DNA, 1982 bp, Homo sapiens
  Payload ID: 14707
  Gene Symbol: RPS6KB1
  Gene Name: ribosomal protein S6 kinase, 70kDa, polypeptide 1
  Uniprot ID: P23443
  ENST ID: ENST00000406116
  CDS Start-End: 41-1396
tggcggcagcggctgtggtggctgcggcgggtccgggcccatgaggcgacgaaggaggcgggacggcttttacccagccccggacttccgagacagggaagctgaggacatggcaggagtgtttgacatagacctggaccagccagaggacgcgggctctgaggatgagctggaggaggggggtcagttaaatgaaagcatggaccatgggggagttggaccatatgaacttggcatggaacattgtgagaaatttgaaatctcagaaactagtgtgaacagagggccagaaaaaatcagaccagaatgttttgagctacttcgggtacttggtaaagggggctatggaaaggtttttcaagtacgaaaagtaacaggagcaaatactgggaaaatatttgccatgaaggtgcttaaaaaggcaatgatagtaagaaatgctaaagatacagctcatacaaaagcagaacggaatattctggaggaagtaaagcatcccttcatcgtggatttaatttatgcctttcagactggtggaaaactctacctcatccttgagtatctcagtggaggagaactatttatgcagttagaaagagagggaatatttatggaagacactgcctgcttttacttggcagaaatctccatggctttggggcatttacatcaaaaggggatcatctacagagacctgaagccggagaatatcatgcttaatcaccaaggtcatgtgaaactaacagactttggactatgcaaagaatctattcatgatggaacagtcacacacacattttgtggaacaatagaatacatggcccctgaaatcttgatgagaagtggccacaatcgtgctgtggattggtggagtttgggagcattaatgtatgacatgctgactggagcacccccattcactggggagaatagaaagaaaacaattgacaaaatcctcaaatgtaaactcaatttgcctccctacctcacacaagaagccagagatctgcttaaaaagctgctgaaaagaaatgctgcttctcgtctgggagctggtcctggggacgctggagaagttcaagctcatccattctttagacacattaactgggaagaacttctggctcgaaaggtggagcccccctttaaacctctgttgcaatctgaagaggatgtaagtcagtttgattccaagtttacacgtcagacacctgtcgacagcccagatgactcaactctcagtgaaagtgccaatcaggtctttctgggttttacatatgtggctccatctgtacttgaaagtgtgaaagaaaagttttcctttgaaccaaaaatccgatcacctcgaagatttattggcagcccacgaacacctgtcagtactgctatgtgctaagcttaactggaagccttggaatgggcataagttgtatgtcctacatttcatcattgtcccgggcctgcattgcactggaaaaaaaaatcgccacctgttcttacaccagtatttggttcaagacaccaaatgtcttcagcccatggctgaagaacaacagaagagagtcaggataaaaaatacatactgtggtcggcaaggtgagggagatagggatatccaggggaagagggtgttgctgtggcccactctctgtctaatctctttacagcaaattggtaagattttcagttttacttctttctactgtttctgctgtctaccttccttatatttttttcctcaacagttttaaaaagaaaaaaaggtctatttttttttctcctatacttgggctacattttttgattgtaaaaatatttgatggccttttgatgaatgtcttccacagtaaagaaaacttagtggcttaatttaggaaacatgttaacaggacactatgtttttgaaattgtaacaaaatctacataaatgatttacaggttaaaagaataaaaataaaggtaactttacctttcttaaatat

SEQ ID NO: 176840 - DNA, 1913 bp, Homo sapiens
  Payload ID: 14707
  Gene Symbol: RPS6KB1
  Gene Name: ribosomal protein S6 kinase, 70kDa, polypeptide 1
  Uniprot ID: P23443
  ENST ID: ENST00000443572
  CDS Start-End: 56-1564
ctaagcagccggtgatggcggcagcggctgtggtggctgcggcgggtccgggcccatgaggcgacgaaggaggcgggacggcttttacccagccccggacttccgagacagggaagctgaggacatggcaggagtgtttgacatagacctggaccagccagaggacgcgggctctgaggatgagctggaggaggggggtcagttaaatgaaagcatggaccatgggggagttggaccatatgaacttggcatggaacattgtgagaaatttgaaatctcagaaactagtgtgaacagagggccagaaaaaatcagaccagaatgttttgagctacttcgggtacttggtaaagggggctatggaaaggcaatgatagtaagaaatgctaaagatacagctcatacaaaagcagaacggaatattctggaggaagtaaagcatcccttcatcgtggatttaatttatgcctttcagactggtggaaaactctacctcatccttgagtatctcagtggaggagaactatttatgcagttagaaagagagggaatatttatggaagacactgcctgcttttacttggcagaaatctccatggctttggggcatttacatcaaaaggggatcatctacagagacctgaagccggagaatatcatgcttaatcaccaaggtcatgtgaaactaacagactttggactatgcaaagaatctattcatgatggaacagtcacacacacattttgtggaacaatagaatacatggcccctgaaatcttgatgagaagtggccacaatcgtgctgtggattggtggagtttgggagcattaatgtatgacatgctgactggagcacccccattcactggggagaatagaaagaaaacaattgacaaaatcctcaaatgtaaactcaatttgcctccctacctcacacaagaagccagagatctgcttaaaaagctgctgaaaagaaatgctgcttctcgtctgggagctggtcctggggacgctggagaagttcaagctcatccattctttagacacattaactgggaagaacttctggctcgaaaggtggagcccccctttaaacctctgttgcaatctgaagaggatgtaagtcagtttgattccaagtttacacgtcagacacctgtcgacagcccagatgactcaactctcagtgaaagtgccaatcaggtctttctgggttttacatatgtggctccatctgtacttgaaagtgtgaaagaaaagttttcctttgaaccaaaaatccgatcacctcgaagatttattggcagcccacgaacacctgtcagcccagtcaaattttctcctggggatttctggggaagaggtgcttcggccagcacagcaaatcctcagacacctgtggaatacccaatggaaacaagtggcatagagcagatggatgtgacaatgagtggggaagcatcggcaccacttccaatacgacagccgaactctgggccatacaaaaaacaagcttttcccatgatctccaaacggccagagcacctgcgtatgaatctatgacagagcaatgcttttaatgaatttaaggcaaaaaaggtggagagggagatgtgtgagcatcctgcaaggtgaaacgactcaaaatgacagtttcagagagtcaatgtcattacatagaacacttcagacacaggaaaaataaacgtggattttaaaaaatcaatcaatggtgcaaaaaaaaacttaaagcaaaatagtattgctgaactcttaggcacatcaattaattgattcctcgcgacatcttctcaaccttatcaaggattttcatgttgatgactcgaaactgacagtattaagggtaggatgttgcttctgaatcactgttgagttctgattgtgttgaaga

SEQ ID NO: 176841 - DNA, 622 bp, Homo sapiens
  Payload ID: 14707
  Gene Symbol: RPS6KB1
  Gene Name: ribosomal protein S6 kinase, 70kDa, polypeptide 1
  ENST ID: ENST00000592726
  CDS Start-End: 436-622
cggtcccttgcatttcttcttttttttttttgagacagagtctcactctgttgcccaggctggactgctgcagtggcgcgatcttggctcactgcaagctccgcctcacgggttcacgccattctcctgcctcagcctcccgagcagctgggactacaggcgcccaccaccacacctggctaattttttatatttttagtagaggcggtgtttcaccatgttagccaggatggtcttgatctcctgacctcgtgatctgcctgcctcggcctcccaaagtgctgggattacaggcatgagccaccgtgcctggtggtcccttgcatttctatatgaaatttaggatcagcttgtcaatttctgcaagaaaggaacctggggttttgataggattcagttgaatccgtgaccaatttgggtcagttaaatgaaagcatggaccatgggggagttggaccatatgaacttggcatggaacattgtgagaaatttgaaatctcagaaactagtgtgaacagagggccagaaaaaatcagaccagaatgttttgagctacttcgggtacttggtaaagggggctatggaaaggtttttcaagtacgaaaagtaacaggagcaaata

SEQ ID NO: 176842 - DNA, 909 bp, Homo sapiens
  Payload ID: 14707
  Gene Symbol: RPS6KB1
  Gene Name: ribosomal protein S6 kinase, 70kDa, polypeptide 1
  ENST ID: ENST00000489824
  CDS Start-End: 48-206
ccggtgatggcggcagcggctgtggtggctgcggcgggtccgggcccatgaggcgacgaaggaggcgggacggcttttacccagccccggacttccgagacagggaagctgaggacatggcaggagtgtttgacatagacctggaccagccagaggacgcgggctctgaggatgagctggaggagggggaagcgctcagctgttagaagtgacagctgaaaacttctgtcgggagtagcactgccgctgctgttacagccaccaggagttttatttcgggagcaagggggctctgctgcatcttccaatcttccaggggtcagttaaatgaaagcatggaccatgggggagttggaccatatgaacttggcatggaacattgtgagaaatttgaaatctcagaaactagtgtgaacagagggccagaaaaaatcagaccagaatgttttgagctacttcgggtacttggtaaagggggctatggaaaggtttttcaagtacgaaaagtaacaggagcaaatactgggaaaatatttgccatgaaggtgcttaaaaaggcaatgatagtaagaaatgctaaagatacagctcatacaaaagcagaacggaatattctggaggaagtaaagcatcccttcatcgtggatttaatttatgcctttcagactggtggaaaactctacctcatccttgagtatctcagtggaggagaactatttatgcagttagaaagagagggaatatttatggaagacactgcctggcttgagtggaacgctcttcacaccagttgttcctaacagaaccattctcattgcggctttctttccttgaattgcttttacttggcagaaatctccatggctttggggcatttacatcaaaaggggatcatctacagagacctga

SEQ ID NO: 176843 - DNA, 2808 bp, Homo sapiens
  Payload ID: 14707
  Gene Symbol: RPS6KB1
  Gene Name: ribosomal protein S6 kinase, 70kDa, polypeptide 1
  ENST ID: ENST00000472940
  CDS Start-End: 100-522
aactttaggagccagtctaaggcctaggcgcagacgcactgagcctaagcagccggtgatggcggcagcggctgtggtggctgcggcgggtccgggcccatgaggcgacgaaggaggcgggacggcttttacccagccccggacttccgagacagggaagctgaggacatggcaggagtgtttgacatagacctggaccagccagaggacgcgggctctgaggatgagctggaggaggggggtcagttaaatgaaagcatggaccatgggggagttggaccatatgaacttggcatggaacattgtgagaaatttgaaatctcagaaactagtgtgaacagagggccagaaaaaatcagaccagaatgttttgagctacttcgggtacttggtaaagggggctatggaaaggtttttcaagtacgaaaagtaacaggagcaaatactgggaaaatatttgccatgaaggtgcttaaaaagatgatctcttttcctttaggcaatgatagtaagaaatgctaaagatacagctcatacaaaagcagaacggaatattctggaggaagtaaagcatcccttcatcgtggatttaatttatgcctttcagactggtggaaaactctacctcatccttgagtatctcagtggaggagaactatttatgcagttagaaagagagggaatatttatggaagacactgcctggccttttctaacaaagaagctgcatttaagagccttagggatgaagtgcccttttttggaggaggctcactgagccgtgttggaggctgtgtttgtggtcgtgctggctgtgaaactgcctcagtcctctaggacacaccctctccatcctggagtaatctgcaggattgcaacattgttatgcagccagtattgcagtgccttgtgcttttcgaatccagacagggttgattcagccctttattcttttgagcttttacttggcagaaatctccatggctttggggcatttacatcaaaaggggatcatctacagagacctgaagccggagaatatcatgcttaatcaccaaggtcatgtgaaactaacagactttggactatgcaaagaatctattcatgatggaacagtcacacacacattttgtggaacaatagaatacatggcccctgaaatcttgatgagaagtggccacaatcgtgctgtggattggtggagtttgggagcattaatgtatgacatgctgactggagcacccccattcactggggagaatagaaagaaaacaattgacaaaatcctcaaatgtaaactcaatttgcctccctacctcacacaagaagccagagatctgcttaaaaagctgctgaaaagaaatgctgcttctcgtctgggagctggtcctggggacgctggagaagttcaagtagggattggcatctttggtgttttgtggggaagataatgctagttttatgtatttctgagggttatatgtagttgcttataagtttagcttattttgtgacttgtaacttcaaaaaggtgattaatttatcaatccagcaaagtctagtcccctcaacttttcttcctgctttttttttcctaggctcatccattctttagacacattaactgggaagaacttctggctcgaaaggtggagcccccctttaaacctctgttgcaatctgaagaggatgtaagtcagtttgattccaagtttacacgtcagacacctgtcgacagcccagatgactcaactctcagtgaaagtgccaatcaggtctttctgggttttacatatgtggctccatctgtacttgaaagtgtgaaagaaaagttttcctttgaaccaaaaatccgatcacctcgaagatttattggcagcccacgaacacctgtcagcccagtcaaattttctcctggggatttctggggaagaggtgcttcggccagcacagcaaatcctcagacacctgtggaatacccaatggaaacaagtggcatagagcagatggatgtgacaatgagtggggaagcatcggcaccacttccaatacgacagccgaactctgggccatacaaaaaacaagcttttcccatgatctccaaacggccagagcacctgcgtatgaatctatgacagagcaatgcttttaatgaatttaaggcaaaaaaggtggagagggagatgtgtgagcatcctgcaaggtgaaacgactcaaaatgacagtttcagagagtcaatgtcattacatagaacacttcagacacaggaaaaataaacgtggattttaaaaaatcaatcaatggtgcaaaaaaaaacttaaagcaaaatagtattgctgaactcttaggcacatcaattaattgattcctcgcgacatcttctcaaccttatcaaggattttcatgttgatgactcgaaactgacagtattaagggtaggatgttgcttctgaatcactgttgagttctgattgtgttgaagaagggttatcctttcattaggcaaagtacaaaattgcctataatacttgcaactaaggacaaattagcatgcaagcttggtcaaactttttccagcaaaatggaagcaaagacaaaagaaacttaccaattgatgttttacgtgcaaacaacctgaatcttttttttatataaatatatatttttcaaatagatttttgattcagctcattatgaaaaacatcccaaactttaaaatgcgaaattattggttggtgtgaagaaagccagacaacttctgtttcttctcttggtgaaataataaaatgcaaatgaatcattgttaa

SEQ ID NO: 176844 - DNA, 1733 bp, Homo sapiens
  Payload ID: 14708
  Gene Symbol: RPS6KB2
  Gene Name: ribosomal protein S6 kinase, 70kDa, polypeptide 2
  Uniprot ID: Q9UBS0
  ENST ID: ENST00000312629
  CDS Start-End: 46-1494
gcgcggccaggtacgggccgacgggcccgcggggccggcgccgccatggcggccgtgtttgatttggatttggagacggaggaaggcagcgagggcgagggcgagccagagctcagccccgcggacgcatgtccccttgccgagttgagggcagctggcctagagcctgtgggacactatgaagaggtggagctgactgagaccagcgtgaacgttggcccagagcgcatcgggccccactgctttgagctgctgcgtgtgctgggcaaggggggctatggcaaggtgttccaggtgcgaaaggtgcaaggcaccaacttgggcaaaatatatgccatgaaagtcctaaggaaggccaaaattgtgcgcaatgccaaggacacagcacacacacgggctgagcggaacattctagagtcagtgaagcacccctttattgtggaactggcctatgccttccagactggtggcaaactctacctcatccttgagtgcctcagtggtggcgagctcttcacgcatctggagcgagagggcatcttcctggaagatacggcctgcttctacctggctgagatcacgctggccctgggccatctccactcccagggcatcatctaccgggacctcaagcccgagaacatcatgctcagcagccagggccacatcaaactgaccgactttggactctgcaaggagtctatccatgagggcgccgtcactcacaccttctgcggcaccattgagtacatggcccctgagattctggtgcgcagtggccacaaccgggctgtggactggtggagcctgggggccctgatgtacgacatgctcactggatcgccgcccttcaccgcagagaaccggaagaaaaccatggataagatcatcaggggcaagctggcactgcccccctacctcaccccagatgcccgggaccttgtcaaaaagtttctgaaacggaatcccagccagcggattgggggtggcccaggggatgctgctgatgtgcagagacatccctttttccggcacatgaattgggacgaccttctggcctggcgtgtggacccccctttcaggccctgtctgcagtcagaggaggacgtgagccagtttgatacccgcttcacacggcagacgccggtggacagtcctgatgacacagccctcagcgagagtgccaaccaggccttcctgggcttcacatacgtggcgccgtctgtcctggacagcatcaaggagggcttctccttccagcccaagctgcgctcacccaggcgcctcaacagtagcccccgggcccccgtcagccccctcaagttctccccttttgaggggtttcggcccagccccagcctgccggagcccacggagctacctctacctccactcctgccaccgccgccgccctcgaccaccgcccctctccccatccgtcccccctcagggaccaagaagtccaagaggggccgtgggcgtccagggcgctaggaagccgggtgggggtgagggtagcccttgagccctgtccctgcggctgtgagagcagcaggaccctgggccagttccagagacctgggggtgtgtctgggggtggggtgtgagtgcgtatgaaagtgtgtgtctgctggggcagctgtgcccctgaatcatgggcacggagggccgcccgccacgccccgcgctcaactgctcccgtggaagattaaagggctgaatcatggtgctga

SEQ ID NO: 176845 - DNA, 461 bp, Homo sapiens
  Payload ID: 14708
  Gene Symbol: RPS6KB2
  Gene Name: ribosomal protein S6 kinase, 70kDa, polypeptide 2
  ENST ID: ENST00000420069
  CDS Start-End: 402-461
agtgcgcggccaggtacgggccgacgggcccgcggggccggcgccgccatggcggccgtgtttgatttggatttggagacggaggaaggcagcgagggcgagggcgagccagagctcagccccgcggcctgtgggacactatgaagaggtggagctgactgagaccagcgtgaacgttggcccagagcgcatcgggccccactgctttgagctgctgcgtgtgctgggcaaggggggctatggcaaggtgttccaggtgcgaaaggtgcaaggcaccaacttgggcaaaatatatgccatgaaagtcctaaggaagcttctacctggctgagatcacgctggccctgggccatctccactcccagggcatcatctaccgggacctcaagcccgagaacatcatgctcagcagccagggccacatcaaactgaccgactttggactctgcaaggagtctatc

SEQ ID NO: 176846 - DNA, 1806 bp, Homo sapiens
  Payload ID: 14708
  Gene Symbol: RPS6KB2
  Gene Name: ribosomal protein S6 kinase, 70kDa, polypeptide 2
  Uniprot ID: Q9UBS0
  ENST ID: ENST00000528964
  CDS Start-End: 43-507
cggccaggtacgggccgacgggcccgcggggccggcgccgccatggcggccgtgtttgatttggatttggagacggaggaaggcagcgagggcgagggcgagccagagctcagccccgcggacgcatgtccccttgccgagttgagggcagctggcctagagcctgtgggacactatgaagaggtggagctgactgagaccagcgtgaacgttggcccagagcgcatcgggccccactgctttgagctgctgcgtgtgctgggcaaggggggctatggcaaggtgttccaggtgcgaaaggtgcaaggcaccaacttgggcaaaatatatgccatgaaagtcctaaggaaggccaaaattgtgcgcaatgccaaggacacagcacacacacgggctgagcggaacattctagagtcagtgaagcacccctttattgtggaactggcctatgccttccagactggtggcaaactctacctcatccttgagtgcctcagtgtagactgagcgtcctgagggcagtggctgggtctcttcatcctgtccccagcttcacccagcacagggccaggcaccgagtaggcgtcggtagatgtttgctgaattgaattgaatccccacggcagctctgtgaggcaggtggcgagctcttcacgcatctggagcgagagggcatcttcctggaagatacggcctgcttctacctggctgagatcacgctggccctgggccatctccactcccagggcatcatctaccgggacctcaagcccgagaacatcatgctcagcagccagggccacatcaaactgaccgactttggactctgcaaggagtctatccatgagggcgccgtcactcacaccttctgcggcaccattgagtacatggcccctgagattctggtgcgcagtggccacaaccgggctgtggactggtggagcctgggggccctgatgtacgacatgctcactggatcgccgcccttcaccgcagagaaccggaagaaaaccatggataagatcatcaggggcaagctggcactgcccccctacctcaccccagatgcccgggaccttgtcaaaaagtttctgaaacggaatcccagccagcggattgggggtggcccaggggatgctgctgatgtgcagagacatccctttttccggcacatgaattgggacgaccttctggcctggcgtgtggacccccctttcaggccctgtctgcagtcagaggaggacgtgagccagtttgatacccgcttcacacggcagacgccggtggacagtcctgatgacacagccctcagcgagagtgccaaccaggccttcctgggcttcacatacgtggcgccgtctgtcctggacagcatcaaggagggcttctccttccagcccaagctgcgctcacccaggcgcctcaacagtagcccccgggcccccgtcagccccctcaagttctccccttttgaggggtttcggcccagccccagcctgccggagcccacggagctacctctacctccactcctgccaccgccgccgccctcgaccaccgcccctctccccatccgtcccccctcagggaccaagaagtccaagaggggccgtgggcgtccagggcgctaggaagccgggtgggggtgagggtagcccttgagccctgtccctgcggctgtgagagcagcaggaccctgggccagttccagagacctgggggtgtgtctgggggtggggtgtgagtgcgtatgaaagtgtgtgtctgctggggcagctgtgcccctgaatcatgggcacggagggc

SEQ ID NO: 176847 - DNA, 466 bp, Homo sapiens
  Payload ID: 14708
  Gene Symbol: RPS6KB2
  Gene Name: ribosomal protein S6 kinase, 70kDa, polypeptide 2
  ENST ID: ENST00000524934
  CDS Start-End: 53-466
agtcagtgcgcggccaggtacgggccgacgggcccgcggggccggcgccgccatggcggccgtgtttgatttggatttggagacggaggaaggcagcgagggcgagggcgagccagagctcagccccgcgtccaacctgaacgggagcggggaggtatcctggcaccttccttggctcttacccctcggtttctcacaggacgcatgtccccttgccgagttgagggcagctggcctagagcctgtgggacactatgaagaggtggagctgactgagaccagcgtgaacgttggcccagagcgcatcgggccccactgctttgagctgctgcgtgtgctgggcaaggggggctatggcaaggtgttccaggtgcgaaaggtgcaaggcaccaacttgggcaaaatatatgccatgaaagtcctaaggaaggccaaaattgtgcgcaatgccaaggacacagcacac

SEQ ID NO: 176848 - DNA, 850 bp, Homo sapiens
  Payload ID: 14708
  Gene Symbol: RPS6KB2
  Gene Name: ribosomal protein S6 kinase, 70kDa, polypeptide 2
  ENST ID: ENST00000556575
  CDS Start-End: 64-525
ccgggactgtcagtcagtgcgcggccaggtacgggccgacgggcccgcggggccggcgccgccatggcggccgtgtttgatttggatttggagacggaggaaggcagcgagggcgagggcgagccagagctcagccccgcggacgcatgtccccttgccgagttgagggcagctggcctagagcctgtgggacactatgaagaggtggagctgactgagaccagcgtgaacgttggcccagagcgcatcgggccccactgctttgagctgctgcgtgtgctgggcaaggggggctatggcaaggtgttccaggtgcgaaaggtgcaaggcaccaacttgggcaaaatatatgccatgaaagtcctaaggaaggccaaaattgtgcgcaatgccaaggacacagcacacacacgggctgagcggaacattctagagtcagtgaagcacccctttattgtggaactggcctatgccttccagactggtggcaaactctacctcatccttgagtgcctcagtgactgagcgtcctgagggcagtggctgggtctcttcatcctgtccccagcttcacccagcacagggccaggcaccgagtaggcgtcggtagatgtttgctgaattgaattgaatccccacggcagctctgtgaggcaggtggcgagctcttcacgcatctggagcgagagggcatcttcctggaagatacggcctgcttctacctggctgagatcacgctggccctgggccatctccactcccagggcatcatctaccgggacctcaagcccgagaacatcatgctcagcagccagggccacatcaaactgaccgactttggactctgcaa

SEQ ID NO: 176849 - DNA, 957 bp, Homo sapiens
  Payload ID: 14708
  Gene Symbol: RPS6KB2
  Gene Name: ribosomal protein S6 kinase, 70kDa, polypeptide 2
  ENST ID: ENST00000525996
  CDS Start-End: 1-324
gtgttccaggtgcgaaaggtgcaaggcaccaacttgggcaaaatatatgccatgaaagtcctaaggaaggccaaaattgtgcgcaatgccaaggacacagcacacacacgggctgagcggaacattctagagtcagtgaagcacccctttattgtggaactggcctatgccttccagactggtggcaaactctacctcatccttgagtgcctcagtggtggcgagctcttcacgcatctggagcgagagggcatcttcctggaagatacggcctggccacatcaaactgaccgactttggactctgcaaggagtctatccatgagggcgccgtcactcacaccttctgcggcaccattgagtacatggcccctgagattctggtgcgcagtggccacaaccgggctgtggactggtggagcctgggggccctgatgtacgacatgctcactggatcgccgcccttcaccgcagagaaccggaagaaaaccatggataagatcatcaggggcaagctggcactgcccccctacctcaccccagatgcccgggaccttgtcaaaaagtttctgaaacggaatcccagccagcggattgggggtggcccaggggatgctgctgatgtgcagagacatccctttttccggcacatgaattgggacgaccttctggcctggcgtgtggacccccctttcaggccctgtctgcagtcagaggaggacgtgagccagtttgatacccgcttcacacggcagacgccggtggacagtcctgatgacacagccctcagcgagagtgccaaccaggccttcctgggcttcacatacgtggcgccgtctgtcctggacagcatcaaggagggcttctccttccagcccaagctgcgctcacccaggcgcctcaacagtagcccccgggcccccgtcagccccctcaagttctccccttttgaggggtt

SEQ ID NO: 176850 - DNA, 592 bp, Homo sapiens
  Payload ID: 14709
  Gene Symbol: RPS6KA1
  Gene Name: ribosomal protein S6 kinase, 90kDa, polypeptide 1
  ENST ID: ENST00000366866
  CDS Start-End: 33-368
ggggccctctggtcaccggcttgagccccaccatgcagaccccagcagatttccccagggttgagagagacttggttccctgtcccagaaaggtacagcagcaagaacccacagctctgcccttaaccccttcctggggatccctgccctgctgcctgcccgtgtgtctgccaggtgtcagacctatctgccctaggatgagggcgtcctcaaggagatctccatcacgcaccacgtcaaggctggctctgagaaggctgatccatcccatttcgagctcctcaaggttctgggccagggatcctttggcaaagtcttcctggtgcggaaagtcacccggcctgacagtgggcacctgtatgctatgaaggtgctgaagaaggcaacgctgaaagtacgtgaccgcgtccggaccaagatggagagagacatcctggctgatgtaaatcacccattcgtggtgaagctgcactatgccttccagaccgagggcaagctctatctcattctggacttcctgcgtggtggggacctcttcacccggctctcaaaagaggtgatgttcacggaggaggatgtgaagttttacctg

SEQ ID NO: 176851 - DNA, 3202 bp, Homo sapiens
  Payload ID: 14709
  Gene Symbol: RPS6KA1
  Gene Name: ribosomal protein S6 kinase, 90kDa, polypeptide 1
  ENST ID: ENST00000374163
  CDS Start-End: 60-674
actgcggcagccccggactctgcctgctcctgccatggtgccgtggccctgctgggcggatggagcaggatcccaagccgccccgtctgcggctctgggccctgatcccctggcttcccaggaagcagcggcccaggatcagccagacctctctgcctgtccctggccctggctctggcccccagcgggactcggatgagggcgtcctcaaggagatctccatcacgcaccacgtcaaggctggctctgagaaggctgatccatcccatttcgagctcctcaaggttctgggccagggatcctttggcaaagtcttcctggtgcggaaagtcacccggcctgacagtgggcacctgtatgctatgaaggtgctgaagaaggcaacgctgaaagtacgtgaccgcgtccggaccaagatggagagagacatcctggctgatgtaaatcacccattcgtggtgaagctgcactatgccttccagaccgagggcaagctctatctcattctggacttcctgcgtggtggggacctcttcacccggctctcaaaagaggtaatatacatgattcaaaagaaaaatattcatgaagaagtcttcctcccaccccagccccctctattcccatctataggtgatgttcacggaggaggatgtgaagttttacctggctgagctggctctgggcctggatcacctgcacagcctgggtatcatttacagagacctcaagcctgagaacatccttctggatgaggagggccacatcaaactcactgactttggcctgagcaaagaggccattgaccacgagaagaaggcctattctttctgcgggacagtggagtacatggcccctgaggtcgtcaaccgccagggccactcccatagtgcggactggtggtcctatggggtgttgatgtttgagatgctgacgggctccctgcccttccaggggaaggaccggaaggagaccatgacactgattctgaaggcgaagctaggcatgccccagtttctgagcactgaagcccagagcctcttgcgggccctgttcaagcggaatcctgccaaccggctcggctccggccctgatggggcagaggaaatcaagcggcatgtcttctactccaccattgactggaataagctataccgtcgtgagatcaagccacccttcaagccagcagtggctcagcctgatgacaccttctactttgacaccgagttcacgtcccgcacacccaaggattccccaggcatcccccccagcgctggggcccatcagctgttccggggcttcagcttcgtggccaccggcctgatggaagacgacggcaagcctcgtgccccgcaggcacccctgcactcggtggtacagcaactccatgggaagaacctggtttttagtgacggctacgtggtaaaggagacaattggtgtgggctcctactctgagtgcaagcgctgtgtccacaaggccaccaacatggagtatgctgtcaaggtcattgataagagcaagcgggatccttcagaagagattgagattcttctgcggtatggccagcaccccaacatcatcactctgaaagatgtgtatgatgatggcaaacacgtgtacctggtgacagagctgatgcggggtggggagctgctggacaagatcctgcggcagaagttcttctcagagcgggaggccagctttgtcctgcacaccattggcaaaactgtggagtatctgcactcacagggggttgtgcacagggacctgaagcccagcaacatcctgtatgtggacgagtccgggaatcccgagtgcctgcgcatctgtgactttggttttgccaaacagctgcgggctgagaatgggctcctcatgacaccttgctacacagccaactttgtggcgcctgaggtgctgaagcgccagggctacgatgaaggctgcgacatctggagcctgggcattctgctgtacaccatgctggcaggatatactccatttgccaacggtcccagtgacacaccagaggaaatcctaacccggatcggcagtgggaagtttaccctcagtgggggaaattggaacacagtttcagagacagccaaggacctggtgtccaagatgctacacgtggatccccaccagcgcctcacagctaagcaggttctgcagcatccatgggtcacccagaaagacaagcttccccaaagccagctgtcccaccaggacctacagcttgtgaagggagccatggctgccacgtactccgcactcaacagctccaagcccaccccccagctgaagcccatcgagtcatccatcctggcccagcggcgagtgaggaagttgccatccaccaccctgtgaggcaccagggcattcgggccacagggcggtgctagcttgacacagtcagcatgcttcccagagggagcaggccggaaccacagggccagagggagctggaacccgaggggccggggaagctgccagcccagaacacccctaatgagggtgtgagaagtgccttctccttccccaggatggactcttctcggctcaggctctgctggtggaaagcgattcactgtataaacttttttttatgaaaaaaatggcatcaaccaccatggatttttacaagatccatttgcctttctgggagcagaaacagccattgcggccccaggaggggaactgagtcacgctggggctctctgagactctttagagcagctttgggatcccaccctggggacccccacgattggccacctgtagccatctgcacacacctccgagacagtccagtgtcacctctctcagagcatctggctgtttagcagaactcattctatccccaatcagctccttttccgttctgttctgctgggagttctagaaccacttcctgctacaggaggggtctcatgtcctgctggcttccagcttcaggcaccagcatccaccttggctctgccagtggatcccctgcggtcaggctgggcagccccagagagaggatgtggaaagcactttttggctgacttcatctggggttggcaacaggacagagttcacaggaggccagtgggcgggccatgagggacagggtcttttttcatttcttcctcagctggttactcagggttcatctgtccatggcctttctaataaactgttgagttgaagcacg

SEQ ID NO: 176852 - DNA, 3131 bp, Homo sapiens
  Payload ID: 14709
  Gene Symbol: RPS6KA1
  Gene Name: ribosomal protein S6 kinase, 90kDa, polypeptide 1
  ENST ID: ENST00000374166
  CDS Start-End: 144-2318
gcggcggcggcggacggcccagccggagcgcgaggggctcgggggggcgcggcggttcgggtcgcagagccagggaccccaggacccgggaggcggcgcagccggggccgccggaggagcgcgggtgacctggcggcggcgagatgccgctcgcccagctcaaggagccctggccgctcatggagctagtgcctctggacccggagaatggacagacctcaggggaagaagctggacttcagccgtccaaggatgagggcgtcctcaaggagatctccatcacgcaccacgtcaaggctggctctgagaaggctgatccatcccatttcgagctcctcaaggttctgggccagggatcctttggcaaagtcttcctggtgcggaaagtcacccggcctgacagtgggcacctgtatgctatgaaggtgctgaagaaggcaacgctgaaagtacgtgaccgcgtccggaccaagatggagagagacatcctggctgatgtaaatcacccattcgtggtgaagctgcactatgccttccagaccgagggcaagctctatctcattctggacttcctgcgtggtggggacctcttcacccggctctcaaaagaggtgatgttcacggaggaggatgtgaagttttacctggctgagctggctctgggcctggatcacctgcacagcctgggtatcatttacagagacctcaagcctgagaacatccttctggatgaggagggccacatcaaactcactgactttggcctgagcaaagaggccattgaccacgagaagaaggcctattctttctgcgggacagtggagtacatggcccctgaggtcgtcaaccgccagggccactcccatagtgcggactggtggtcctatggggtgttgatggggaaggaccggaaggagaccatgacactgattctgaaggcgaagctaggcatgccccagtttctgagcactgaagcccagagcctcttgcgggccctgttcaagcggaatcctgccaaccggctcggctccggccctgatggggcagaggaaatcaagcggcatgtcttctactccaccattgactggaataagctataccgtcgtgagatcaagccacccttcaagccagcagtggctcagcctgatgacaccttctactttgacaccgagttcacgtcccgcacacccaaggattccccaggcatcccccccagcgctggggcccatcagctgttccggggcttcagcttcgtggccaccggcctgatggaagacgacggcaagcctcgtgccccgcaggcacccctgcactcggtggtacagcaactccatgggaagaacctggtttttagtgacggctacgtggtaaaggagacaattggtgtgggctcctactctgagtgcaagcgctgtgtccacaaggccaccaacatggagtatgctgtcaaggtcattgataagagcaagcgggatccttcagaagagattgagattcttctgcggtatggccagcaccccaacatcatcactctgaaagatgtgtatgatgatggcaaacacgtgtacctggtgacagagctgatgcggggtggggagctgctggacaagatcctgcggcagaagttcttctcagagcgggaggccagctttgtcctgcacaccattggcaaaactgtggagtatctgcactcacagggggttgtgcacagggacctgaagcccagcaacatcctgtatgtggacgagtccgggaatcccgagtgcctgcgcatctgtgactttggttttgccaaacagctgcgggctgagaatgggctcctcatgacaccttgctacacagccaactttgtggcgcctgaggtgctgaagcgccagggctacgatgaaggctgcgacatctggagcctgggcattctgctgtacaccatgctggcaggatatactccatttgccaacggtcccagtgacacaccagaggaaatcctaacccggatcggcagtgggaagtttaccctcagtgggggaaattggaacacagtttcagagacagccaaggacctggtgtccaagatgctacacgtggatccccaccagcgcctcacagctaagcaggttctgcagcatccatgggtcacccagaaagacaagcttccccaaagccagctgtcccaccaggacctacagcttgtgaagggagccatggctgccacgtactccgcactcaacagctccaagcccaccccccagctgaagcccatcgagtcatccatcctggcccagcggcgagtgaggaagttgccatccaccaccctgtgaggcaccagggcattcgggccacagggcggtgctagcttgacacagtcagcatgcttcccagagggagcaggccggaaccacagggccagagggagctggaacccgaggggccggggaagctgccagcccagaacacccctaatgagggtgtgagaagtgccttctccttccccaggatggactcttctcggctcaggctctgctggtggaaagcgattcactgtataaacttttttttatgaaaaaaatggcatcaaccaccatggatttttacaagatccatttgcctttctgggagcagaaacagccattgcggccccaggaggggaactgagtcacgctggggctctctgagactctttagagcagctttgggatcccaccctggggacccccacgattggccacctgtagccatctgcacacacctccgagacagtccagtgtcacctctctcagagcatctggctgtttagcagaactcattctatccccaatcagctccttttccgttctgttctgctgggagttctagaaccacttcctgctacaggaggggtctcatgtcctgctggcttccagcttcaggcaccagcatccaccttggctctgccagtggatcccctgcggtcaggctgggcagccccagagagaggatgtggaaagcactttttggctgacttcatctggggttggcaacaggacagagttcacaggaggccagtgggcgggccatgagggacagggtcttttttcatttcttcctcagctggttactcagggttcatctgtccatggcctttctaataaact

SEQ ID NO: 176853 - DNA, 3186 bp, Homo sapiens
  Payload ID: 14709
  Gene Symbol: RPS6KA1
  Gene Name: ribosomal protein S6 kinase, 90kDa, polypeptide 1
  Uniprot ID: Q15418
  ENST ID: ENST00000374168
  CDS Start-End: 155-2362
ctagtgccgcggcggcggcggcggacggcccagccggagcgcgaggggctcgggggggcgcggcggttcgggtcgcagagccagggaccccaggacccgggaggcggcgcagccggggccgccggaggagcgcgggtgacctggcggcggcgagatgccgctcgcccagctcaaggagccctggccgctcatggagctagtgcctctggacccggagaatggacagacctcaggggaagaagctggacttcagccgtccaaggatgagggcgtcctcaaggagatctccatcacgcaccacgtcaaggctggctctgagaaggctgatccatcccatttcgagctcctcaaggttctgggccagggatcctttggcaaagtcttcctggtgcggaaagtcacccggcctgacagtgggcacctgtatgctatgaaggtgctgaagaaggcaacgctgaaagtacgtgaccgcgtccggaccaagatggagagagacatcctggctgatgtaaatcacccattcgtggtgaagctgcactatgccttccagaccgagggcaagctctatctcattctggacttcctgcgtggtggggacctcttcacccggctctcaaaagaggtgatgttcacggaggaggatgtgaagttttacctggctgagctggctctgggcctggatcacctgcacagcctgggtatcatttacagagacctcaagcctgagaacatccttctggatgaggagggccacatcaaactcactgactttggcctgagcaaagaggccattgaccacgagaagaaggcctattctttctgcgggacagtggagtacatggcccctgaggtcgtcaaccgccagggccactcccatagtgcggactggtggtcctatggggtgttgatgtttgagatgctgacgggctccctgcccttccaggggaaggaccggaaggagaccatgacactgattctgaaggcgaagctaggcatgccccagtttctgagcactgaagcccagagcctcttgcgggccctgttcaagcggaatcctgccaaccggctcggctccggccctgatggggcagaggaaatcaagcggcatgtcttctactccaccattgactggaataagctataccgtcgtgagatcaagccacccttcaagccagcagtggctcagcctgatgacaccttctactttgacaccgagttcacgtcccgcacacccaaggattccccaggcatcccccccagcgctggggcccatcagctgttccggggcttcagcttcgtggccaccggcctgatggaagacgacggcaagcctcgtgccccgcaggcacccctgcactcggtggtacagcaactccatgggaagaacctggtttttagtgacggctacgtggtaaaggagacaattggtgtgggctcctactctgagtgcaagcgctgtgtccacaaggccaccaacatggagtatgctgtcaaggtcattgataagagcaagcgggatccttcagaagagattgagattcttctgcggtatggccagcaccccaacatcatcactctgaaagatgtgtatgatgatggcaaacacgtgtacctggtgacagagctgatgcggggtggggagctgctggacaagatcctgcggcagaagttcttctcagagcgggaggccagctttgtcctgcacaccattggcaaaactgtggagtatctgcactcacagggggttgtgcacagggacctgaagcccagcaacatcctgtatgtggacgagtccgggaatcccgagtgcctgcgcatctgtgactttggttttgccaaacagctgcgggctgagaatgggctcctcatgacaccttgctacacagccaactttgtggcgcctgaggtgctgaagcgccagggctacgatgaaggctgcgacatctggagcctgggcattctgctgtacaccatgctggcaggatatactccatttgccaacggtcccagtgacacaccagaggaaatcctaacccggatcggcagtgggaagtttaccctcagtgggggaaattggaacacagtttcagagacagccaaggacctggtgtccaagatgctacacgtggatccccaccagcgcctcacagctaagcaggttctgcagcatccatgggtcacccagaaagacaagcttccccaaagccagctgtcccaccaggacctacagcttgtgaagggagccatggctgccacgtactccgcactcaacagctccaagcccaccccccagctgaagcccatcgagtcatccatcctggcccagcggcgagtgaggaagttgccatccaccaccctgtgaggcaccagggcattcgggccacagggcggtgctagcttgacacagtcagcatgcttcccagagggagcaggccggaaccacagggccagagggagctggaacccgaggggccggggaagctgccagcccagaacacccctaatgagggtgtgagaagtgccttctccttccccaggatggactcttctcggctcaggctctgctggtggaaagcgattcactgtataaacttttttttatgaaaaaaatggcatcaaccaccatggatttttacaagatccatttgcctttctgggagcagaaacagccattgcggccccaggaggggaactgagtcacgctggggctctctgagactctttagagcagctttgggatcccaccctggggacccccacgattggccacctgtagccatctgcacacacctccgagacagtccagtgtcacctctctcagagcatctggctgtttagcagaactcattctatccccaatcagctccttttccgttctgttctgctgggagttctagaaccacttcctgctacaggaggggtctcatgtcctgctggcttccagcttcaggcaccagcatccaccttggctctgccagtggatcccctgcggtcaggctgggcagccccagagagaggatgtggaaagcactttttggctgacttcatctggggttggcaacaggacagagttcacaggaggccagtgggcgggccatgagggacagggtcttttttcatttcttcctcagctggttactcagggttcatctgtccatggcctttctaataaactgttgagttgaa

SEQ ID NO: 176854 - DNA, 498 bp, Homo sapiens
  Payload ID: 14709
  Gene Symbol: RPS6KA1
  Gene Name: ribosomal protein S6 kinase, 90kDa, polypeptide 1
  ENST ID: ENST00000403732
  CDS Start-End: 1-498
gctcagcctgatgacaccttctactttgacaccgagttcacgtcccgcacacccaaggattccccaggcatcccccccagcgctggggcccatcagctgttccggggcttcagcttcgtggccaccggcctgatggaagacgacggcaagcctcgtgccccgcaggcacccctgcactcggtggtacaggtcattgataagagcaagcgggatccttcagaagagattgagattcttctgcggtatggccagcaccccaacatcatcactctgaaagatgtgtatgatgatggcaaacacgtgtacctggtgacagagctgatgcggggtggggagctgctggacaagatcctgcggcagaagttcttctcagagcgggaggccagctttgtcctgcacaccattggcaaaactgtggagtatctgcactcacagggggttgtgcacagggacctgaagcccagcaacatcctgtatgtggacgagtccgggaatccc

SEQ ID NO: 176855 - DNA, 639 bp, Homo sapiens
  Payload ID: 14709
  Gene Symbol: RPS6KA1
  Gene Name: ribosomal protein S6 kinase, 90kDa, polypeptide 1
  ENST ID: ENST00000438977
  CDS Start-End: 1-348
aacacagtttcagagacagccaaggacctggtgtccaagatgctacacgtggatccccaccagcgcctcacagctaagcaggttctgcagcatccatgggtcacccagaaagacaagcttccccaaagccagctgtcccaccaggacctacagcttgtgaagggagccatggctgccacgtactccgcactcaacagctccaagcccaccccccagctgaagcccatcgagtcatccatcctggcccagcggcgagtgaggaagttgccatccaccaccctgatggactcttctcggctcaggctctgctggtggaaagcgattcactgtataaacttttttttatgaaaaaaatggcatcaaccaccatggatttttacaagatccatttgcctttctgggagcagaaacagccattgcggccccaggaggggaactgagtcacgctggggctctctgagactctttagagcagctttgggatcccaccctggggacccccacgattggccacctgtagccatctgcacacacctccgagacagtccagtgtcacctctctcagagcatctggctgtttagcagaactcattctatccccaatcagctccttttccgttctgttctgctgggagttct

SEQ ID NO: 176856 - DNA, 2596 bp, Homo sapiens
  Payload ID: 14709
  Gene Symbol: RPS6KA1
  Gene Name: ribosomal protein S6 kinase, 90kDa, polypeptide 1
  Uniprot ID: Q15418
  ENST ID: ENST00000526792
  CDS Start-End: 435-2366
aaattgctctgggattcctgccatggggattttacaggcactgctaggctgctcagaggttctctcgctgactcaccctctgaggtgaggaacactgccctctgcagcccctgtactgccaccccgctactaggaccggggcgcaaggtcctgggggtggtgctcagaggtggattcctttgcccaggcacgcccctgggaccaggcctccaaaggagaagaatggacagacctcaggggaagaagctggacttcagccgtccaaggatgagggcgtcctcaaggagatctccatcacgcaccacgtcaaggctggctctgagaaggctgatccatcccatttcgagctcctcaaggttctgggccagggatcctttggcaaagtcttcctggtgcggaaagtcacccggcctgacagtgggcacctgtatgctatgaaggtgctgaagaaggcaacgctgaaagtacgtgaccgcgtccggaccaagatggagagagacatcctggctgatgtaaatcacccattcgtggtgaagctgcactatgccttccagaccgagggcaagctctatctcattctggacttcctgcgtggtggggacctcttcacccggctctcaaaagaggtgatgttcacggaggaggatgtgaagttttacctggctgagctggctctgggcctggatcacctgcacagcctgggtatcatttacagagacctcaagcctgagaacatccttctggatgaggagggccacatcaaactcactgactttggcctgagcaaagaggccattgaccacgagaagaaggcctattctttctgcgggacagtggagtacatggcccctgaggtcgtcaaccgccagggccactcccatagtgcggactggtggtcctatggggtgttgatgtttgagatgctgacgggctccctgcccttccaggggaaggaccggaaggagaccatgacactgattctgaaggcgaagctaggcatgccccagtttctgagcactgaagcccagagcctcttgcgggccctgttcaagcggaatcctgccaaccggctcggctccggccctgatggggcagaggaaatcaagcggcatgtcttctactccaccattgactggaataagctataccgtcgtgagatcaagccacccttcaagccagcagtggctcagcctgatgacaccttctactttgacaccgagttcacgtcccgcacacccaaggattccccaggcatcccccccagcgctggggcccatcagctgttccggggcttcagcttcgtggccaccggcctgatggaagacgacggcaagcctcgtgccccgcaggcacccctgcactcggtggtacagcaactccatgggaagaacctggtttttagtgacggctacgtggtaaaggagacaattggtgtgggctcctactctgagtgcaagcgctgtgtccacaaggccaccaacatggagtatgctgtcaaggtcattgataagagcaagcgggatccttcagaagagattgagattcttctgcggtatggccagcaccccaacatcatcactctgaaagatgtgtatgatgatggcaaacacgtgtacctggtgacagagctgatgcggggtggggagctgctggacaagatcctgcggcagaagttcttctcagagcgggaggccagctttgtcctgcacaccattggcaaaactgtggagtatctgcactcacagggggttgtgcacagggacctgaagcccagcaacatcctgtatgtggacgagtccgggaatcccgagtgcctgcgcatctgtgactttggttttgccaaacagctgcgggctgagaatgggctcctcatgacaccttgctacacagccaactttgtggcgcctgaggtgctgaagcgccagggctacgatgaaggctgcgacatctggagcctgggcattctgctgtacaccatgctggcaggatatactccatttgccaacggtcccagtgacacaccagaggaaatcctaacccggatcggcagtgggaagtttaccctcagtgggggaaattggaacacagtttcagagacagccaaggacctggtgtccaagatgctacacgtggatccccaccagcgcctcacagctaagcaggttctgcagcatccatgggtcacccagaaagacaagcttccccaaagccagctgtcccaccaggacctacagcttgtgaagggagccatggctgccacgtactccgcactcaacagctccaagcccaccccccagctgaagcccatcgagtcatccatcctggcccagcggcgagtgaggaagttgccatccaccaccctgtgaggcaccagggcattcgggccacagggcggtgctagcttgacacagtcagcatgcttcccagagggagcaggccggaaccacagggccagagggagctggaacccgaggggccggggaagctgccagcccagaacacccctaatgagggtgtgagaagtgccttctccttccccaggatggactcttctcggctcaggctctgctggtggaaagcgattcactgtataaac

SEQ ID NO: 176857 - DNA, 3023 bp, Homo sapiens
  Payload ID: 14709
  Gene Symbol: RPS6KA1
  Gene Name: ribosomal protein S6 kinase, 90kDa, polypeptide 1
  Uniprot ID: Q15418
  ENST ID: ENST00000530003
  CDS Start-End: 51-2210
agaagtaggaagagtaacggggccctctggtcaccggcttgagccccaccatgcagaccccagcagatttccccagggttgagagagacttggttccctgtcccagaaaggatgagggcgtcctcaaggagatctccatcacgcaccacgtcaaggctggctctgagaaggctgatccatcccatttcgagctcctcaaggttctgggccagggatcctttggcaaagtcttcctggtgcggaaagtcacccggcctgacagtgggcacctgtatgctatgaaggtgctgaagaaggcaacgctgaaagtacgtgaccgcgtccggaccaagatggagagagacatcctggctgatgtaaatcacccattcgtggtgaagctgcactatgccttccagaccgagggcaagctctatctcattctggacttcctgcgtggtggggacctcttcacccggctctcaaaagaggtgatgttcacggaggaggatgtgaagttttacctggctgagctggctctgggcctggatcacctgcacagcctgggtatcatttacagagacctcaagcctgagaacatccttctggatgaggagggccacatcaaactcactgactttggcctgagcaaagaggccattgaccacgagaagaaggcctattctttctgcgggacagtggagtacatggcccctgaggtcgtcaaccgccagggccactcccatagtgcggactggtggtcctatggggtgttgatgtttgagatgctgacgggctccctgcccttccaggggaaggaccggaaggagaccatgacactgattctgaaggcgaagctaggcatgccccagtttctgagcactgaagcccagagcctcttgcgggccctgttcaagcggaatcctgccaaccggctcggctccggccctgatggggcagaggaaatcaagcggcatgtcttctactccaccattgactggaataagctataccgtcgtgagatcaagccacccttcaagccagcagtggctcagcctgatgacaccttctactttgacaccgagttcacgtcccgcacacccaaggattccccaggcatcccccccagcgctggggcccatcagctgttccggggcttcagcttcgtggccaccggcctgatggaagacgacggcaagcctcgtgccccgcaggcacccctgcactcggtggtacagcaactccatgggaagaacctggtttttagtgacggctacgtggtaaaggagacaattggtgtgggctcctactctgagtgcaagcgctgtgtccacaaggccaccaacatggagtatgctgtcaaggtcattgataagagcaagcgggatccttcagaagagattgagattcttctgcggtatggccagcaccccaacatcatcactctgaaagatgtgtatgatgatggcaaacacgtgtacctggtgacagagctgatgcggggtggggagctgctggacaagatcctgcggcagaagttcttctcagagcgggaggccagctttgtcctgcacaccattggcaaaactgtggagtatctgcactcacagggggttgtgcacagggacctgaagcccagcaacatcctgtatgtggacgagtccgggaatcccgagtgcctgcgcatctgtgactttggttttgccaaacagctgcgggctgagaatgggctcctcatgacaccttgctacacagccaactttgtggcgcctgaggtgctgaagcgccagggctacgatgaaggctgcgacatctggagcctgggcattctgctgtacaccatgctggcaggatatactccatttgccaacggtcccagtgacacaccagaggaaatcctaacccggatcggcagtgggaagtttaccctcagtgggggaaattggaacacagtttcagagacagccaaggacctggtgtccaagatgctacacgtggatccccaccagcgcctcacagctaagcaggttctgcagcatccatgggtcacccagaaagacaagcttccccaaagccagctgtcccaccaggacctacagcttgtgaagggagccatggctgccacgtactccgcactcaacagctccaagcccaccccccagctgaagcccatcgagtcatccatcctggcccagcggcgagtgaggaagttgccatccaccaccctgtgaggcaccagggcattcgggccacagggcggtgctagcttgacacagtcagcatgcttcccagagggagcaggccggaaccacagggccagagggagctggaacccgaggggccggggaagctgccagcccagaacacccctaatgagggtgtgagaagtgccttctccttccccaggatggactcttctcggctcaggctctgctggtggaaagcgattcactgtataaacttttttttatgaaaaaaatggcatcaaccaccatggatttttacaagatccatttgcctttctgggagcagaaacagccattgcggccccaggaggggaactgagtcacgctggggctctctgagactctttagagcagctttgggatcccaccctggggacccccacgattggccacctgtagccatctgcacacacctccgagacagtccagtgtcacctctctcagagcatctggctgtttagcagaactcattctatccccaatcagctccttttccgttctgttctgctgggagttctagaaccacttcctgctacaggaggggtctcatgtcctgctggcttccagcttcaggcaccagcatccaccttggctctgccagtggatcccctgcggtcaggctgggcagccccagagagaggatgtggaaagcactttttggctgacttcatctggggttggcaacaggacagagttcacaggaggccagtgggcgggccatgagggacagggtcttttttcatttcttcctcagctggttactcagggttcatctgtccatggcctttctaataaact

SEQ ID NO: 176858 - DNA, 544 bp, Homo sapiens
  Payload ID: 14709
  Gene Symbol: RPS6KA1
  Gene Name: ribosomal protein S6 kinase, 90kDa, polypeptide 1
  ENST ID: ENST00000529454
  CDS Start-End: 208-544
ctgtactgccaccccgctactaggaccggggcgcaaggtcctgggggtggtgctcagaggtggattcctttgcccaggcacgcccctgggaccaggcctccaaaggagaagaatggacagacctcaggggaagaagctggacttcagccgtccaaggtcttcctggtgcggaaagtcacccggcctgacagtgggcacctgtatgctatgaaggtgctgaagaaggcaacgctgaaagtacgtgaccgcgtccggaccaagatggagagagacatcctggctgatgtaaatcacccattcgtggtgaagctgcactatgccttccagaccgagggcaagctctatctcattctggacttcctgcgtggtggggacctcttcacccggctctcaaaagaggtgatgttcacggaggaggatgtgaagttttacctggctgagctggctctgggcctggatcacctgcacagcctgggtatcatttacagagacctcaagcctgagaacatccttctggatgaggagggccacatcaaactcactg

SEQ ID NO: 176859 - DNA, 543 bp, Homo sapiens
  Payload ID: 14709
  Gene Symbol: RPS6KA1
  Gene Name: ribosomal protein S6 kinase, 90kDa, polypeptide 1
  ENST ID: ENST00000525525
  CDS Start-End: 161-331
gaagtgctagtgccgcggcggcggcggcggacggcccagccggagcgcgaggggctcgggggggcgcggcggttcgggtcgcagagccagggaccccaggacccgggaggcggcgcagccggggccgccggaggagcgcgggtgacctggcggcggcgagatgccgctcgcccagctcaaggagccctggccgctcatggagctagtgcctctggacccggagaagcagctcctgacctcccttgagggctctgtggctccagtccctaagcgtgcagaaggccacctcttcctgtgccttttgaccccagggtcaaggtcaagcccctgaatgagctggtggaaaacttcctccttaacctcttgctgggaaggaagcagaatggacagacctcaggggaagaagctggacttcagccgtccaaggatgagggcgtcctcaaggagatctccatcacgcaccacgtcaaggctggctctgagaaggctgatccatcccatttcgagctcctcaaggttctgggccagggatcctttggcaaa

SEQ ID NO: 176860 - DNA, 2359 bp, Homo sapiens
  Payload ID: 14709
  Gene Symbol: RPS6KA1
  Gene Name: ribosomal protein S6 kinase, 90kDa, polypeptide 1
  Uniprot ID: Q15418
  ENST ID: ENST00000531382
  CDS Start-End: 50-2284
ccccggactctgcctgctcctgccatggtgccgtggccctgctgggcggatggagcaggatcccaagccgccccgtctgcggctctgggccctgatcccctggcttcccaggaagcagcggcccaggatcagccagacctctctgcctgtccctggccctggctctggcccccagcgggactcggatgagggcgtcctcaaggagatctccatcacgcaccacgtcaaggctggctctgagaaggctgatccatcccatttcgagctcctcaaggttctgggccagggatcctttggcaaagtcttcctggtgcggaaagtcacccggcctgacagtgggcacctgtatgctatgaaggtgctgaagaaggcaacgctgaaagtacgtgaccgcgtccggaccaagatggagagagacatcctggctgatgtaaatcacccattcgtggtgaagctgcactatgccttccagaccgagggcaagctctatctcattctggacttcctgcgtggtggggacctcttcacccggctctcaaaagaggtgatgttcacggaggaggatgtgaagttttacctggctgagctggctctgggcctggatcacctgcacagcctgggtatcatttacagagacctcaagcctgagaacatccttctggatgaggagggccacatcaaactcactgactttggcctgagcaaagaggccattgaccacgagaagaaggcctattctttctgcgggacagtggagtacatggcccctgaggtcgtcaaccgccagggccactcccatagtgcggactggtggtcctatggggtgttgatgtttgagatgctgacgggctccctgcccttccaggggaaggaccggaaggagaccatgacactgattctgaaggcgaagctaggcatgccccagtttctgagcactgaagcccagagcctcttgcgggccctgttcaagcggaatcctgccaaccggctcggctccggccctgatggggcagaggaaatcaagcggcatgtcttctactccaccattgactggaataagctataccgtcgtgagatcaagccacccttcaagccagcagtggctcagcctgatgacaccttctactttgacaccgagttcacgtcccgcacacccaaggattccccaggcatcccccccagcgctggggcccatcagctgttccggggcttcagcttcgtggccaccggcctgatggaagacgacggcaagcctcgtgccccgcaggcacccctgcactcggtggtacagcaactccatgggaagaacctggtttttagtgacggctacgtggtaaaggagacaattggtgtgggctcctactctgagtgcaagcgctgtgtccacaaggccaccaacatggagtatgctgtcaaggtcattgataagagcaagcgggatccttcagaagagattgagattcttctgcggtatggccagcaccccaacatcatcactctgaaagatgtgtatgatgatggcaaacacgtgtacctggtgacagagctgatgcggggtggggagctgctggacaagatcctgcggcagaagttcttctcagagcgggaggccagctttgtcctgcacaccattggcaaaactgtggagtatctgcactcacagggggttgtgcacagggacctgaagcccagcaacatcctgtatgtggacgagtccgggaatcccgagtgcctgcgcatctgtgactttggttttgccaaacagctgcgggctgagaatgggctcctcatgacaccttgctacacagccaactttgtggcgcctgaggtgctgaagcgccagggctacgatgaaggctgcgacatctggagcctgggcattctgctgtacaccatgctggcaggatatactccatttgccaacggtcccagtgacacaccagaggaaatcctaacccggatcggcagtgggaagtttaccctcagtgggggaaattggaacacagtttcagagacagccaaggacctggtgtccaagatgctacacgtggatccccaccagcgcctcacagctaagcaggttctgcagcatccatgggtcacccagaaagacaagcttccccaaagccagctgtcccaccaggacctacagcttgtgaagggagccatggctgccacgtactccgcactcaacagctccaagcccaccccccagctgaagcccatcgagtcatccatcctggcccagcggcgagtgaggaagttgccatccaccaccctgtgaggcaccagggcattcgggccacagggcggtgctagcttgacacagtcagcatgcttcccagagggagcaggccgg

SEQ ID NO: 176861 - DNA, 500 bp, Homo sapiens
  Payload ID: 14709
  Gene Symbol: RPS6KA1
  Gene Name: ribosomal protein S6 kinase, 90kDa, polypeptide 1
  ENST ID: ENST00000526040
  CDS Start-End: 161-319
gaagtgctagtgccgcggcggcggcggcggacggcccagccggagcgcgaggggctcgggggggcgcggcggttcgggtcgcagagccagggaccccaggacccgggaggcggcgcagccggggccgccggaggagcgcgggtgacctggcggcggcgagatgccgctcgcccagctcaaggagccctggccgctcatggagctagtgcctctggacccggagaatggacagacctcaggggaagaagctggacttcagccgtccaagtacgtgaccgcgtccggaccaagatggagagagacatcctggctgatgtaaatcacccattcgtggtgaagctgcactatgccttccagaccgagggcaagctctatctcattctggacttcctgcgtggtggggacctcttcacccggctctcaaaagaggtgatgttcacggaggaggatgtgaagttttacctggctgagctggctctgggcctggatcacctgcacag

SEQ ID NO: 176862 - DNA, 543 bp, Homo sapiens; identical to SEQ ID NO: 176859
  Payload ID: 14709
  Gene Symbol: RPS6KA1
  Gene Name: ribosomal protein S6 kinase, 90kDa, polypeptide 1
  ENST ID: ENST00000628001
  CDS Start-End: 161-331

SEQ ID NO: 176863 - DNA, 3131 bp, Homo sapiens; identical to SEQ ID NO: 176852
  Payload ID: 14709
  Gene Symbol: RPS6KA1
  Gene Name: ribosomal protein S6 kinase, 90kDa, polypeptide 1
  ENST ID: ENST00000630838
  CDS Start-End: 144-2318

SEQ ID NO: 176864 - DNA, 500 bp, Homo sapiens; identical to SEQ ID NO: 176861
  Payload ID: 14709
  Gene Symbol: RPS6KA1
  Gene Name: ribosomal protein S6 kinase, 90kDa, polypeptide 1
  ENST ID: ENST00000627677
  CDS Start-End: 161-319

SEQ ID NO: 176865 - DNA, 498 bp, Homo sapiens; identical to SEQ ID NO: 176854
  Payload ID: 14709
  Gene Symbol: RPS6KA1
  Gene Name: ribosomal protein S6 kinase, 90kDa, polypeptide 1
  ENST ID: ENST00000625863
  CDS Start-End: 1-498

SEQ ID NO: 176866 - DNA, 3202 bp, Homo sapiens; identical to SEQ ID NO: 176851
  Payload ID: 14709
  Gene Symbol: RPS6KA1
  Gene Name: ribosomal protein S6 kinase, 90kDa, polypeptide 1
  ENST ID: ENST00000626401
  CDS Start-End: 60-674

SEQ ID NO: 176867 - DNA, 3186 bp, Homo sapiens; identical to SEQ ID NO: 176853
  Payload ID: 14709
  Gene Symbol: RPS6KA1
  Gene Name: ribosomal protein S6 kinase, 90kDa, polypeptide 1
  Uniprot ID: Q15418
  ENST ID: ENST00000629832
  CDS Start-End: 155-2362

SEQ ID NO: 176868 - DNA, 592 bp, Homo sapiens; identical to SEQ ID NO: 176850
  Payload ID: 14709
  Gene Symbol: RPS6KA1
  Gene Name: ribosomal protein S6 kinase, 90kDa, polypeptide 1
  ENST ID: ENST00000625391
  CDS Start-End: 33-368

SEQ ID NO: 176869 - DNA, 2596 bp, Homo sapiens; identical to SEQ ID NO: 176856
  Payload ID: 14709
  Gene Symbol: RPS6KA1
  Gene Name: ribosomal protein S6 kinase, 90kDa, polypeptide 1
  Uniprot ID: Q15418
  ENST ID: ENST00000631108
  CDS Start-End: 435-2366

SEQ ID NO: 176870 - DNA, 639 bp, Homo sapiens; identical to SEQ ID NO: 176855
  Payload ID: 14709
  Gene Symbol: RPS6KA1
  Gene Name: ribosomal protein S6 kinase, 90kDa, polypeptide 1
  ENST ID: ENST00000629099
  CDS Start-End: 1-348

SEQ ID NO: 176871 - DNA, 544 bp, Homo sapiens; identical to SEQ ID NO: 176858
  Payload ID: 14709
  Gene Symbol: RPS6KA1
  Gene Name: ribosomal protein S6 kinase, 90kDa, polypeptide 1
  ENST ID: ENST00000629025
  CDS Start-End: 208-544

SEQ ID NO: 176872 - DNA, 2359 bp, Homo sapiens; identical to SEQ ID NO: 176860
  Payload ID: 14709
  Gene Symbol: RPS6KA1
  Gene Name: ribosomal protein S6 kinase, 90kDa, polypeptide 1
  Uniprot ID: Q15418
  ENST ID: ENST00000628256
  CDS Start-End: 50-2284

SEQ ID NO: 176873 - DNA, 3023 bp, Homo sapiens; identical to SEQ ID NO: 176857
  Payload ID: 14709
  Gene Symbol: RPS6KA1
  Gene Name: ribosomal protein S6 kinase, 90kDa, polypeptide 1
  Uniprot ID: Q15418
  ENST ID: ENST00000628081
  CDS Start-End: 51-2210

SEQ ID NO: 176874 - DNA, 5824 bp, Homo sapiens
  Payload ID: 14710
  Gene Symbol: RPS6KA2
  Gene Name: ribosomal protein S6 kinase, 90kDa, polypeptide 2
  Uniprot ID: Q15349
  ENST ID: ENST00000265678
  CDS Start-End: 225-2426
gggaggcggagaaggaggcggagggagcgattgtggccccggccgcggtggccggcgcggcctgccctttgtgaccgcagctcgcgccccacgccccgcgcccatggccgccgtgccgggctccctggccacgcgtgcccgcccgcggacctgagccccgcgcctgggatgccggggatgcgcgtcccccggccctgcggctgctccgggctgggcgcggggcgatggacctgagcatgaagaagttcgccgtgcgcaggttcttctctgtgtacctgcgcaggaagtcgcgctccaagagctccagcctgagccggctcgaggaagaaggcgtcgtgaaggagatagacatcagccatcatgtgaaggagggctttgagaaggcagatccttcccagtttgagctgctgaaggttttaggacaaggatcctatggaaaggtgttcctggtgaggaaggtgaaggggtccgacgctgggcagctctacgccatgaaggtccttaagaaagccaccctaaaagttcgggaccgagtgagatcgaagatggagagagacatcttggcagaagtgaatcaccccttcattgtgaagcttcattatgcctttcagacggaaggaaagctctacctgatcctggacttcctgcggggaggggacctcttcacccggctctccaaagaggtcatgttcacggaggaggatgtcaagttctacctggctgagctggccttggctttagaccatctccacagcctggggatcatctacagagatctgaagcctgagaacatcctcctggatgaagaggggcacattaagatcacagatttcggcctgagtaaggaggccattgaccacgacaagagagcgtactccttctgcgggacgatcgagtacatggcgcccgaggtggtgaaccggcgaggacacacgcagagtgccgactggtggtccttcggcgtgctcatgtttgagatgctcacggggtccctgccgttccaggggaaggacaggaaggagaccatggctctcatcctcaaagccaagctggggatgccgcagttcctcagtggggaggcacagagtttgctgcgagctctcttcaaacggaacccctgcaaccggctgggtgctggcattgacggagtggaggaaattaagcgccatcccttctttgtgaccatagactggaacacgctgtaccggaaggagatcaagccaccgttcaaaccagcagtgggcaggcctgaggacaccttccactttgaccccgagttcacagcgcggacgcccacagactctcctggcgtccccccgagtgcaaacgctcatcacctgtttagaggattcagctttgtggcctcaagcctgatccaggagccctcacagcaagatctgcacaaagtcccagttcacccaatcgtgcagcagttacacgggaacaacatccacttcaccgatggctacgagatcaaggaggacatcggggtgggctcctactcagtgtgcaagcgatgtgtgcataaagccacagacaccgagtatgccgtgaagatcattgataagagcaagagagacccctcggaagagattgagatcctcctgcggtacggccagcacccgaacatcatcaccctcaaggatgtctatgatgatggcaagtttgtgtacctggtaatggagctgatgcgtggtggggagctcctggaccgcatcctccggcagagatacttctcggagcgcgaagccagtgacgtcctgtgcaccatcaccaagaccatggactacctccattcccagggggttgttcatcgagacctgaagccgagtaacatcctgtacagggatgagtcggggagcccagaatccatccgagtctgcgacttcggctttgccaagcagctgcgcgcggggaacgggctgctcatgacaccctgctacacggccaatttcgtggccccggaggtcctgaagcgtcaaggctatgatgcggcgtgtgacatctggagtttggggatcctgttgtacaccatgctggcaggatttaccccttttgcaaatgggccagacgatacccctgaggagattctggcgcggatcggcagtgggaagtatgccctttctgggggaaactgggactcgatatctgacgcagctaaagacgtcgtgtccaagatgctccacgtggaccctcatcagcgcctgacggcgatgcaagtgctcaaacacccgtgggtggtcaacagagagtacctgtccccaaaccagctcagccgacaggacgtgcacctggtgaagggcgcgatggccgccacctactttgctctaaacagaacacctcaggccccgcggctggagcccgtgctgtcatccaacctggctcagcgcagaggcatgaagagactcacgtccacgcggctgtagcgggtgggaccctggccccagcgtcccctgccagcatcctcgtgggctcacagaccccggcctcggagcccgtctggcacccagagtgaccacaagtccagcagggaggcggcgcccgccctcgccgtgtccgtgttttctttttcagccccggagagggtcctgacctgggggcttctccaagcctcactgcgccagcctccccgcccgctctcttttctcccaagcgaaaccaaatgcgccccttcacctcgcgtgcccgtgcgaggccgggggcttctttcagagcccgcgggtcctctcatacatggcttctgtttctgccgagagatctgttttccaattatgaagccggtcggtttggtcagactcccgacacccacgtcccaggtacccggtgggaaagtggcagtgcgagggcgcagccattggtggttgcagggccccagagggctggggtgacctggcatcccggggctccccacgggctggatgacggggttggcactgtggcgtccaggaggagatgcctggttctgcccaaaataatccaaagagccgtttcctcctcgcccttcagtttttgcctgaggtgctgggtagcccatcctttcctctgtcccagattcaaatgaggagtaagagcccagacgagaggaaggcaggctggatctttgccttgagagctccgtgtcaccaggatggaagggggtgcctctcggaggagcctgtgtccacctccagtctcggctttccccggggggccaagcgcactgggctgccgtctgtccccagctcccgtggccacacagctatctggaggctttgcagggagtcgtgggttctcgcacctgctcagccctgtgtcggcttcctgtgtgctcacctaaagctgtggttttgctgtgttcacttcgatttttctggtctgtggagaaactgtgaattggagaaatggagctctgtggcttcccacccaaaccttctcagtccagctggaggctggagggagacacaggccccacccagcagactgaggggcagaggcacaggtgggagggcagcggagatcagcgtggacaggagcgatgcactttgtagatgctgtggctttgtgttgcgttttgtgtctctgttgcacagatctgttttttcacactgatccgtattcccctgggtgtgcacacagggcgggtgtggggcatttaggccatgctgtgctctacttcattgagtaaaatcgagtgagaggttccgggcagcaggatcgacgcccagtccagccggcagagggaacacacgggtccttcattgtcctgtaagggtgttgaagatgctccctggcggcccccaagcagactagatgggaggaggcgccgctcagcccctcaccctgcatcactgaagagcggcgcctctgcagcaagcagggcttcaggaggtgcccgctggccacagccaggttttccctaagaagatgttattttgttgggttttgttccccctccatctcgattctcgtacccaactaaaaaaaaaaaaataaagaaaaaatgtgctgcgttctgaaaaataactccttagcttggtctgattgttttcagaccttaaaatataaacttgtttcacaagctttaatccatgtggattttttttttcttagagaaccacaaaacataaaaggagcaagtcggactgaatacctgtttccatagtgcccacagggtattcctcacattttctccatagaagatgctttttcccaaggctagaacgacttccaccatgatgaatttgctttttaggtcttaattatttcacttctttttagaaacttaggaagaagtggataatcctgaggtcacacaatctgtcctcccagaaatgaacaaaagtcatcaccttttctgcttgctacacaggcaacgattcccccatcagctgcccggaccctttggcctggcttggtgtgcaggcctgtctgtttgcttaaagtcagtgggttctggtgcagggagtgagaagtgggggaagtgaaagggaaagcatccgtgagaaagcggccacggttttccctccttgtgtgcccatggggcaccagctcatggtctttttcagtcatcccagtttgtacagacttagcttctgaactctaagaatgccaaagggaccgacgagactccccatcacagcgagctctgtccttacatgtatttgatgtgcatcagcggaggagaacactggcttggccctgctccgctgagtgtctgtgaaatacctctactttccctcccatatccagaacaaaatgatacttgacatccttccacaaaagtcagcctaaagaagttatggtatcatatgttaaactaagctttcaaaaaccttagtgaaatagcaagtgactgctttcaagcagcagtcgacatgtaaatgaaggtgttcttagaattcgcattttgccagctcagcgcacctccacaacgaatgaaatgctccgtatgatttgcacaaatgacatagacctccccaaaagttaactggctctccttcctcacacagttcatcataacccaaccccccacccccgggtcatgaaaatcacagaacttataaacacattgaaccctagatctcaggcttcctgacctaccgccagtggccccttgctggccaccctatagggtcctccttccctggcagccccccatgtgggagaaatacctgattctcccaatctgcagtgggagagctttgctgaattccatcccaaagtcaaacatgggcaagaggtgaggatttcacttttaccctcaagtccgatttgtctgtgattttaaactaactgtgtatgtattgatgtttggaagattgtttgaattttaaagtgataatagtacttaatgttatccagtattgttcattaaatggtgttatcctaaagctgcacttgggatttttacctaacgctttactgattctctcaagcacatggcaaagtttgatttgcactccgttcatttctgacacgttttgctgcctcctacctttctaagcgtcatgcaaattcgagaatggagaaggacgctgccggtccctgagcggtgtggagagggcggaaggtggactccagcgcagcttgaggggctgaggacggaggctgcagcatctgtgtcgttctactgagcacgcttctctgcctcgctcctgactcagcactttgttcactggctcagcagttatgtttacacatcatttttatgttcctgctttgtaattcatgtttgagatgggtggccactgtacagatatttattacgctttccagactttctgaatagatttttttgaataaacatggttttatgaagtgtaatctttttctagcctaacaataa

SEQ ID NO: 176875 - DNA, 2282 bp, Homo sapiens
  Payload ID: 14710
  Gene Symbol: RPS6KA2
  Gene Name: ribosomal protein S6 kinase, 90kDa, polypeptide 2
  ENST ID: ENST00000405189
  CDS Start-End: 334-2268
actgtttacagtagctgtgctggaaaccacatgctcctgccatggatgcagccgattcaggaacagacttgatcttcctaaggcattgcatgcaaatcctcatcaagctctagataaaattacctgcttcataaaacagaaaaggcacatatttcaaaatgaaatgaagaaggcgtcgtgaaggagatagacatcagccatcatgtgaaggagggctttgagaaggcagatccttcccagtttgagctgctgaaggttttaggacaaggatcctatggaaaggtgttcctggtgaggaaggtgaaggggtccgacgctgggcagctctacgccatgaaggtccttaagaaagccaccctaaaagttcgggaccgagtgagatcgaagatggagagagacatcttggcagaagtgaatcaccccttcattgtgaagcttcattatgcctttcagacggaaggaaagctctacctgatcctggacttcctgcggggaggggacctcttcacccggctctccaaagaggtcatgttcacggaggaggatgtcaagttctacctggctgagctggccttggctttagaccatctccacagcctggggatcatctacagagatctgaagcctgagaacatcctcctggatgaagaggggcacattaagatcacagatttcggcctgagtaaggaggccattgaccacgacaagagagcgtactccttctgcgggacgatcgagtacatggcgcccgaggtggtgaaccggcgaggacacacgcagagtgccgactggtggtccttcggcgtgctcatgtttgagatgctcacggggtccctgccgttccaggggaaggacaggaaggagaccatggctctcatcctcaaagccaagctggggatgccgcagttcctcagtggggaggcacagagtttgctgcgagctctcttcaaacggaacccctgcaaccggctgggtgctggcattgacggagtggaggaaattaagcgccatcccttctttgtgaccatagactggaacacgctgtaccggaaggagatcaagccaccgttcaaaccagcagtgggcaggcctgaggacaccttccactttgaccccgagttcacagcgcggacgcccacagactctcctggcgtccccccgagtgcaaacgctcatcacctgtttagaggattcagctttgtggcctcaagcctgatccaggagccctcacagcaagatctgcacaaagtcccagttcacccaatcgtgcagcagttacacgggaacaacatccacttcaccgatggctacgagatcaaggaggacatcggggtgggctcctactcagtgtgcaagcgatgtgtgcataaagccacagacaccgagtatgccgtgaagatcattgataagagcaagagagacccctcggaagagattgagatcctcctgcggtacggccagcacccgaacatcatcaccctcaaggatgtctatgatgatggcaagtttgtgtacctggtaatggagctgatgcgtggtggggagctcctggaccgcatcctccggcagagatacttctcggagcgcgaagccagtgacgtcctgtgcaccatcaccaagaccatggactacctccattcccagggggttgttcatcgagacctgaagccgagtaacatcctgtacagggatgagtcggggagcccagaatccatccgagtctgcgacttcggctttgccaagcagctgcgcgcggggaacgggctgctcatgacaccctgctacacggccaatttcgtggccccggaggtcctgaagcgtcaaggctatgatgcggcgtgtgacatctggagtttggggatcctgttgtacaccatgctggcaggatttaccccttttgcaaatgggccagacgatacccctgaggagattctggcgcggatcggcagtgggaagtatgccctttctgggggaaactgggactcgatatctgacgcagctaaagacgtcgtgtccaagatgctccacgtggaccctcatcagcgcctgacggcgatgcaagtgctcaaacacccgtgggtggtcaacagagagtacctgtccccaaaccagctcagccgacaggacgtgcacctggtgaagggcgcgatggccgccacctactttgctctaaacagaacacctcaggccccgcggctggagcccgtgctgtcatccaacctggctcagcgcagaggcatgaagagactcacgtccacgcggctgtagcgggtgggaccctg

SEQ ID NO: 176876 - DNA, 596 bp, Homo sapiens
  Payload ID: 14710
  Gene Symbol: RPS6KA2
  Gene Name: ribosomal protein S6 kinase, 90kDa, polypeptide 2
  ENST ID: ENST00000507350
  CDS Start-End: 220-596
gaggaggagggatgggcacctggaaccacagggcggcgctgatgattggaggaagaaggcgtcgtgaaggagatagacatcagccatcatgtgaaggagggctttgagaaggcagatccttcccagtttgagctgctgaaggttttaggacaaggatcctatggaaaggtgttcctggtgaggaaggtgaaggggtccgacgctgggcagctctacgccatgaaggtccttaagaaagccaccctaaaagttcgggaccgagtgagatcgaagatggagagagacatcttggcagaagtgaatcaccccttcattgtgaagcttcattatgcctttcagacggaaggaaagctctacctgatcctggacttcctgcggggaggggacctcttcacccggctctccaaagaggtcatgttcacggaggaggatgtcaagttctacctggctgagctggccttggctttagaccatctccacagcctggggatcatctacagagatctgaagcctgagaacatcctcctggatgaagaggggcacattaagatcacagatttcggcctgagtaaggaggccattgaccacgacaagag

SEQ ID NO: 176877 - DNA, 5992 bp, Homo sapiens
  Payload ID: 14710
  Gene Symbol: RPS6KA2
  Gene Name: ribosomal protein S6 kinase, 90kDa, polypeptide 2
  ENST ID: ENST00000510118
  CDS Start-End: 342-2618
gcagtacagattccgaagccgcagcgccgtcccctcctttcctcgccccagcccgagcgggaagcggcagcagctccccagagccctggcttggcagggaggggacggcgcccgagcagccatattgcagccccccgggtccctcctccggccggcgcaggccccgcgctcacgacctcctctgggagccggatctgtcctctccatcgccgccacccgccggcctctgcgtcccttggcttccgacatcccgtctggccgtccccctgtgccggtccgagcctctgtttatttcctttcctactatcaatactcgaccagcagaaaaggaaagtttaaaaatgccaatcgcacagttgctggaactatggaaaaagatcgaggtggagcctatggaaatagagaccacagaggaggatctcaacctggatgtggagcccaccacagaagacactgcagaagaaggcaaaagtgactcagctgcctgcaagacaaaggtagctggatccgtagaggaagaaggcgtcgtgaaggagatagacatcagccatcatgtgaaggagggctttgagaaggcagatccttcccagtttgagctgctgaaggttttaggacaaggatcctatggaaaggtgttcctggtgaggaaggtgaaggggtccgacgctgggcagctctacgccatgaaggtccttaagaaagccaccctaaaagttcgggaccgagtgagatcgaagatggagagagacatcttggcagaagtgaatcaccccttcattgtgaagcttcattatgcctttcagacggaaggaaagctctacctgatcctggacttcctgcggggaggggacctcttcacccggctctccaaagaggtcatgttcacggaggaggatgtcaagttctacctggctgagctggccttggctttagaccatctccacagcctggggatcatctacagagatctgaagcctgagaacatcctcctggatgaagaggggcacattaagatcacagatttcggcctgagtaaggaggccattgaccacgacaagagagcgtactccttctgcgggacgatcgagtacatggcgcccgaggtggtgaaccggcgaggacacacgcagagtgccgactggtggtccttcggcgtgctcatgtttgagatgctcacggggtccctgccgttccaggggaaggacaggaaggagaccatggctctcatcctcaaagccaagctggggatgccgcagttcctcagtggggaggcacagagtttgctgcgagctctcttcaaacggaacccctgcaaccggctgggtgctggcattgacggagtggaggaaattaagcgccatcccttctttgtgaccatagactggaacacgctgtaccggaaggagatcaagccaccgttcaaaccagcagtgggcaggcctgaggacaccttccactttgaccccgagttcacagcgcggacgcccacagactctcctggcgtccccccgagtgcaaacgctcatcacctgtttagaggattcagctttgtggcctcaagcctgatccaggagccctcacagcaagatctgcacaaagtcccagttcacccaatcgtgcagcagttacacgggaacaacatccacttcaccgatggctacgagatcaaggaggacatcggggtgggctcctactcagtgtgcaagcgatgtgtgcataaagccacagacaccgagtatgccgtgaagatcattgataagagcaagagagacccctcggaagagattgagatcctcctgcggtacggccagcacccgaacatcatcaccctcaaggatgtctatgatgatggcaagtttgtgtacctggtaatggagctgatgcgtggtggggagctcctggaccgcatcctccggcagagatacttctcggagcgcgaagccagtgacgtcctgtgcaccatcaccaagaccatggactacctccattcccagggggttgttcatcgagacctgaagccgagtaacatcctgtacagggatgagtcggggagcccagaatccatccgagtctgcgacttcggctttgccaagcagctgcgcgcggggaacgggctgctcatgacaccctgctacacggccaatttcgtggccccggaggtcctgaagcgtcaaggctatgatgcggcgtgtgacatctggagtttggggatcctgttgtacaccatgctggcaggatttaccccttttgcaaatgggccagacgatacccctgaggagattctggcgcggatcggcagtgggaagtatgccctttctgggggaaactgggactcgatatctgacgcagctaaagacgtcgtgtccaagatgctccacgtggaccctcatcagcgcctgacggcgatgcaagtgctcaaacacccgtgggtggtcaacagagagtacctgtccccaaaccagctcagccgacaggacgtgcacctggtgaagggcgcgatggccgccacctactttgctctaaacagaacacctcaggccccgcggctggagcccgtgctgtcatccaacctggctcagcgcagaggcatgaagagactcacgtccacgcggctgtagcgggtgggaccctggccccagcgtcccctgccagcatcctcgtgggctcacagaccccggcctcggagcccgtctggcacccagagtgaccacaagtccagcagggaggcggcgcccgccctcgccgtgtccgtgttttctttttcagccccggagagggtcctgacctgggggcttctccaagcctcactgcgccagcctccccgcccgctctcttttctcccaagcgaaaccaaatgcgccccttcacctcgcgtgcccgtgcgaggccgggggcttctttcagagcccgcgggtcctctcatacatggcttctgtttctgccgagagatctgttttccaattatgaagccggtcggtttggtcagactcccgacacccacgtcccaggtacccggtgggaaagtggcagtgcgagggcgcagccattggtggttgcagggccccagagggctggggtgacctggcatcccggggctccccacgggctggatgacggggttggcactgtggcgtccaggaggagatgcctggttctgcccaaaataatccaaagagccgtttcctcctcgcccttcagtttttgcctgaggtgctgggtagcccatcctttcctctgtcccagattcaaatgaggagtaagagcccagacgagaggaaggcaggctggatctttgccttgagagctccgtgtcaccaggatggaagggggtgcctctcggaggagcctgtgtccacctccagtctcggctttccccggggggccaagcgcactgggctgccgtctgtccccagctcccgtggccacacagctatctggaggctttgcagggagtcgtgggttctcgcacctgctcagccctgtgtcggcttcctgtgtgctcacctaaagctgtggttttgctgtgttcacttcgatttttctggtctgtggagaaactgtgaattggagaaatggagctctgtggcttcccacccaaaccttctcagtccagctggaggctggagggagacacaggccccacccagcagactgaggggcagaggcacaggtgggagggcagcggagatcagcgtggacaggagcgatgcactttgtagatgctgtggctttgtgttgcgttttgtgtctctgttgcacagatctgttttttcacactgatccgtattcccctgggtgtgcacacagggcgggtgtggggcatttaggccatgctgtgctctacttcattgagtaaaatcgagtgagaggttccgggcagcaggatcgacgcccagtccagccggcagagggaacacacgggtccttcattgtcctgtaagggtgttgaagatgctccctggcggcccccaagcagactagatgggaggaggcgccgctcagcccctcaccctgcatcactgaagagcggcgcctctgcagcaagcagggcttcaggaggtgcccgctggccacagccaggttttccctaagaagatgttattttgttgggttttgttccccctccatctcgattctcgtacccaactaaaaaaaaaaaaataaagaaaaaatgtgctgcgttctgaaaaataactccttagcttggtctgattgttttcagaccttaaaatataaacttgtttcacaagctttaatccatgtggattttttttttcttagagaaccacaaaacataaaaggagcaagtcggactgaatacctgtttccatagtgcccacagggtattcctcacattttctccatagaagatgctttttcccaaggctagaacgacttccaccatgatgaatttgctttttaggtcttaattatttcacttctttttagaaacttaggaagaagtggataatcctgaggtcacacaatctgtcctcccagaaatgaacaaaagtcatcaccttttctgcttgctacacaggcaacgattcccccatcagctgcccggaccctttggcctggcttggtgtgcaggcctgtctgtttgcttaaagtcagtgggttctggtgcagggagtgagaagtgggggaagtgaaagggaaagcatccgtgagaaagcggccacggttttccctccttgtgtgcccatggggcaccagctcatggtctttttcagtcatcccagtttgtacagacttagcttctgaactctaagaatgccaaagggaccgacgagactccccatcacagcgagctctgtccttacatgtatttgatgtgcatcagcggaggagaacactggcttggccctgctccgctgagtgtctgtgaaatacctctactttccctcccatatccagaacaaaatgatacttgacatccttccacaaaagtcagcctaaagaagttatggtatcatatgttaaactaagctttcaaaaaccttagtgaaatagcaagtgactgctttcaagcagcagtcgacatgtaaatgaaggtgttcttagaattcgcattttgccagctcagcgcacctccacaacgaatgaaatgctccgtatgatttgcacaaatgacatagacctccccaaaagttaactggctctccttcctcacacagttcatcataacccaaccccccacccccgggtcatgaaaatcacagaacttataaacacattgaaccctagatctcaggcttcctgacctaccgccagtggccccttgctggccaccctatagggtcctccttccctggcagccccccatgtgggagaaatacctgattctcccaatctgcagtgggagagctttgctgaattccatcccaaagtcaaacatgggcaagaggtgaggatttcacttttaccctcaagtccgatttgtctgtgattttaaactaactgtgtatgtattgatgtttggaagattgtttgaattttaaagtgataatagtacttaatgttatccagtattgttcattaaatggtgttatcctaaagctgcacttgggatttttacctaacgctttactgattctctcaagcacatggcaaagtttgatttgcactccgttcatttctgacacgttttgctgcctcctacctttctaagcgtcatgcaaattcgagaatggagaaggacgctgccggtccctgagcggtgtggagagggcggaaggtggactccagcgcagcttgaggggctgaggacggaggctgcagcatctgtgtcgttctactgagcacgcttctctgcctcgctcctgactcagcactttgttcactggctcagcagttatgtttacacatcatttttatgttcctgctttgtaattcatgtttgagatgggtggccactgtacagatatttattacgctttccagactttctgaatagatttttttgaataaacatggttttatgaagtgt

SEQ ID NO: 176878 - DNA, 2297 bp, Homo sapiens
  Payload ID: 14710
  Gene Symbol: RPS6KA2
  Gene Name: ribosomal protein S6 kinase, 90kDa, polypeptide 2
  ENST ID: ENST00000481261
  CDS Start-End: 260-2194
aaacgtcctaggccctggttggaatggaagcagctttgccaggagcatgggtcctgggcctcagatgatctgaattctcgtcccttgaatagaagaaggcgtcgtgaaggagatagacatcagccatcatgtgaaggagggctttgagaaggcagatccttcccagtttgagctgctgaaggttttaggacaaggatcctatggaaaggtgttcctggtgaggaaggtgaaggggtccgacgctgggcagctctacgccatgaaggtccttaagaaagccaccctaaaagttcgggaccgagtgagatcgaagatggagagagacatcttggcagaagtgaatcaccccttcattgtgaagcttcattatgcctttcagacggaaggaaagctctacctgatcctggacttcctgcggggaggggacctcttcacccggctctccaaagaggtcatgttcacggaggaggatgtcaagttctacctggctgagctggccttggctttagaccatctccacagcctggggatcatctacagagatctgaagcctgagaacatcctcctggatgaagaggggcacattaagatcacagatttcggcctgagtaaggaggccattgaccacgacaagagagcgtactccttctgcgggacgatcgagtacatggcgcccgaggtggtgaaccggcgaggacacacgcagagtgccgactggtggtccttcggcgtgctcatgtttgagatgctcacggggtccctgccgttccaggggaaggacaggaaggagaccatggctctcatcctcaaagccaagctggggatgccgcagttcctcagtggggaggcacagagtttgctgcgagctctcttcaaacggaacccctgcaaccggctgggtgctggcattgacggagtggaggaaattaagcgccatcccttctttgtgaccatagactggaacacgctgtaccggaaggagatcaagccaccgttcaaaccagcagtgggcaggcctgaggacaccttccactttgaccccgagttcacagcgcggacgcccacagactctcctggcgtccccccgagtgcaaacgctcatcacctgtttagaggattcagctttgtggcctcaagcctgatccaggagccctcacagcaagatctgcacaaagtcccagttcacccaatcgtgcagcagttacacgggaacaacatccacttcaccgatggctacgagatcaaggaggacatcggggtgggctcctactcagtgtgcaagcgatgtgtgcataaagccacagacaccgagtatgccgtgaagatcattgataagagcaagagagacccctcggaagagattgagatcctcctgcggtacggccagcacccgaacatcatcaccctcaaggatgtctatgatgatggcaagtttgtgtacctggtaatggagctgatgcgtggtggggagctcctggaccgcatcctccggcagagatacttctcggagcgcgaagccagtgacgtcctgtgcaccatcaccaagaccatggactacctccattcccagggggttgttcatcgagacctgaagccgagtaacatcctgtacagggatgagtcggggagcccagaatccatccgagtctgcgacttcggctttgccaagcagctgcgcgcggggaacgggctgctcatgacaccctgctacacggccaatttcgtggccccggaggtcctgaagcgtcaaggctatgatgcggcgtgtgacatctggagtttggggatcctgttgtacaccatgctggcaggatttaccccttttgcaaatgggccagacgatacccctgaggagattctggcgcggatcggcagtgggaagtatgccctttctgggggaaactgggactcgatatctgacgcagctaaagacgtcgtgtccaagatgctccacgtggaccctcatcagcgcctgacggcgatgcaagtgctcaaacacccgtgggtggtcaacagagagtacctgtccccaaaccagctcagccgacaggacgtgcacctggtgaagggcgcgatggccgccacctactttgctctaaacagaacacctcaggccccgcggctggagcccgtgctgtcatccaacctggctcagcgcagaggcatgaagagactcacgtccacgcggctgtagcgggtgggaccctggccccagcgtcccctgccagcatcctcgtgggctcacagaccccggcctcggagcccgtctggcacccagagtgaccacaagtccagca

SEQ ID NO: 176879 - DNA, 759 bp, Homo sapiens
  Payload ID: 14710
  Gene Symbol: RPS6KA2
  Gene Name: ribosomal protein S6 kinase, 90kDa, polypeptide 2
  ENST ID: ENST00000507371
  CDS Start-End: 335-759
acttcgcattctcatcagaggagaaggccagcctcggggctgaggttttctcagcttctctcctttgcttctgagtttgcaaagcgggggttttgtctgcagccagagttttttcaactcacagctggtgcctgtgaggggcaggactcccggcttgggaatctgtggctgcctggagaggggtgaggggagggaagaggaggtgtgcggggtggctgcctggtgacgaggacgggcgcagcagcccacaaggtgataaaaggagtggcggctgccctggcagaatggctggacggcaaggggagcccggcccccgggacctggggagtgcatcatgatgatcaggctgccacacaagaagctgcagagactgttcctcagaaaggaagaaggcgtcgtgaaggagatagacatcagccatcatgtgaaggagggctttgagaaggcagatccttcccagtttgagctgctgaaggttttaggacaaggatcctatggaaaggtgttcctggtgaggaaggtgaaggggtccgacgctgggcagctctacgccatgaaggtccttaagaaagccaccctaaaagttcgggaccgagtgagatcgaagatggagagagacatcttggcagaagtgaatcaccccttcattgtgaagcttcattatgcctttcagacggaaggaaagctctacctgatcctggacttcctgcggggaggggacctcttcacccggctctccaaagaggtcatgttcacgga

SEQ ID NO: 176880 - DNA, 587 bp, Homo sapiens
  Payload ID: 14710
  Gene Symbol: RPS6KA2
  Gene Name: ribosomal protein S6 kinase, 90kDa, polypeptide 2
  ENST ID: ENST00000506565
  CDS Start-End: 74-587
atggcagcggcatcctcagactcaactttcaccctcgtttagagccaattaagcagaaaaggaaagtttaaaaatgccaatcgcacagttgctggaactatggaaaaagatcgaggtggagcctatggaaatagagaccacagaggaggatctcaacctggatgtggagcccaccacagaagacactgcagaagaaggcaaaagtgactcagctgcctgcaagacaaaggtagctggatccgtagaggaagaaggcgtcgtgaaggagatagacatcagccatcatgtgaaggagggctttgagaaggcagatccttcccagtttgagctgctgaaggttttaggacaaggatcctatggaaaggtgttcctggtgaggaaggtgaaggggtccgacgctgggcagctctacgccatgaaggtccttaagaaagccaccctaaaagttcgggaccgagtgagatcgaagatggagagagacatcttggcagaagtgaatcaccccttcattgtgaagcttcattatgcctttcagacggaaggaaagctctacctgatcctggacttcctgcggggaggggacctct

SEQ ID NO: 176881 - DNA, 614 bp, Homo sapiens
  Payload ID: 14710
  Gene Symbol: RPS6KA2
  Gene Name: ribosomal protein S6 kinase, 90kDa, polypeptide 2
  ENST ID: ENST00000511034
  CDS Start-End: 506-614
gtccgctccggcggagggaaggcgccggttccgcggagggcggctcctggccgagctgcagggcccgctggcaggcggcggtccctcgctcgctgtgccgctgaggttttggctgcgtttgctgatcaacaattaaagtttggttcggcagagaaaaacatgatgacaaagtgtgcatagggatgttttaaggaaggaaaacataatgacggccccaagctggaagaaagagcagccgggccgaagttgcgtgacaggaacgcccgcgactgcgcggctccggagcagctgcacaactcgcccgggccgggagctgtcccgggccgaggctcattaggaagaaggcgtcgtgaaggagatagacatcagccatcatgtgaaggagggctttgagaaggcagatccttcccagtttgagctgctgaaggttttaggacaaggatcctatggaaaggtgttcctggtgaggaaggtgaaggggtccgacgctgggcagctctacgccatgaaggtccttaagaaagccaccctaaaagttcgggaccgagtgagatcgaagatggagagagacatcttggcagaagtgaatcaccccttcattgtgaagcttcatt

SEQ ID NO: 176882 - DNA, 4137 bp, Homo sapiens
  Payload ID: 14710
  Gene Symbol: RPS6KA2
  Gene Name: ribosomal protein S6 kinase, 90kDa, polypeptide 2
  Uniprot ID: Q15349
  ENST ID: ENST00000503859
  CDS Start-End: 382-2607
aattcgaagctgcaagtgcagcgtttactctgccaaagtcgcagtacagattccgaagccgcagcgccgtcccctcctttcctcgccccagcccgagcgggaagcggcagcagctccccagagccctggcttggcagggaggggacggcgcccgagcagccatattgcagccccccgggtccctcctccggccggcgcaggccccgcgctcacgacctcctctgggagccggatctgtcctctccatcgccgccacccgccggcctctgcgtcccttggcttccgacatcccgtctggccgtccccctgtgccggtccgagcctctgtttatttcctttcctactatcaatactcgaccagcagaaaaggaaagtttaaaaatgccaatcgcacagttgctggaactatggaaaaagatcgaggtggagcctatggaaatagagaccacagaggaggatctcaacctggatgtggagcccaccacagaagacactgcagaagaagaagaaggcgtcgtgaaggagatagacatcagccatcatgtgaaggagggctttgagaaggcagatccttcccagtttgagctgctgaaggttttaggacaaggatcctatggaaaggtgttcctggtgaggaaggtgaaggggtccgacgctgggcagctctacgccatgaaggtccttaagaaagccaccctaaaagttcgggaccgagtgagatcgaagatggagagagacatcttggcagaagtgaatcaccccttcattgtgaagcttcattatgcctttcagacggaaggaaagctctacctgatcctggacttcctgcggggaggggacctcttcacccggctctccaaagaggtcatgttcacggaggaggatgtcaagttctacctggctgagctggccttggctttagaccatctccacagcctggggatcatctacagagatctgaagcctgagaacatcctcctggatgaagaggggcacattaagatcacagatttcggcctgagtaaggaggccattgaccacgacaagagagcgtactccttctgcgggacgatcgagtacatggcgcccgaggtggtgaaccggcgaggacacacgcagagtgccgactggtggtccttcggcgtgctcatgtttgagatgctcacggggtccctgccgttccaggggaaggacaggaaggagaccatggctctcatcctcaaagccaagctggggatgccgcagttcctcagtggggaggcacagagtttgctgcgagctctcttcaaacggaacccctgcaaccggctgggtgctggcattgacggagtggaggaaattaagcgccatcccttctttgtgaccatagactggaacacgctgtaccggaaggagatcaagccaccgttcaaaccagcagtgggcaggcctgaggacaccttccactttgaccccgagttcacagcgcggacgcccacagactctcctggcgtccccccgagtgcaaacgctcatcacctgtttagaggattcagctttgtggcctcaagcctgatccaggagccctcacagcaagatctgcacaaagtcccagttcacccaatcgtgcagcagttacacgggaacaacatccacttcaccgatggctacgagatcaaggaggacatcggggtgggctcctactcagtgtgcaagcgatgtgtgcataaagccacagacaccgagtatgccgtgaagatcattgataagagcaagagagacccctcggaagagattgagatcctcctgcggtacggccagcacccgaacatcatcaccctcaaggatgtctatgatgatggcaagtttgtgtacctggtaatggagctgatgcgtggtggggagctcctggaccgcatcctccggcagagatacttctcggagcgcgaagccagtgacgtcctgtgcaccatcaccaagaccatggactacctccattcccagggggttgttcatcgagacctgaagccgagtaacatcctgtacagggatgagtcggggagcccagaatccatccgagtctgcgacttcggctttgccaagcagctgcgcgcggggaacgggctgctcatgacaccctgctacacggccaatttcgtggccccggaggtcctgaagcgtcaaggctatgatgcggcgtgtgacatctggagtttggggatcctgttgtacaccatgctggcaggatttaccccttttgcaaatgggccagacgatacccctgaggagattctggcgcggatcggcagtgggaagtatgccctttctgggggaaactgggactcgatatctgacgcagctaaagacgtcgtgtccaagatgctccacgtggaccctcatcagcgcctgacggcgatgcaagtgctcaaacacccgtgggtggtcaacagagagtacctgtccccaaaccagctcagccgacaggacgtgcacctggtgaagggcgcgatggccgccacctactttgctctaaacagaacacctcaggccccgcggctggagcccgtgctgtcatccaacctggctcagcgcagaggcatgaagagactcacgtccacgcggctgtagcgggtgggaccctggccccagcgtcccctgccagcatcctcgtgggctcacagaccccggcctcggagcccgtctggcacccagagtgaccacaagtccagcagggaggcggcgcccgccctcgccgtgtccgtgttttctttttcagccccggagagggtcctgacctgggggcttctccaagcctcactgcgccagcctccccgcccgctctcttttctcccaagcgaaaccaaatgcgccccttcacctcgcgtgcccgtgcgaggccgggggcttctttcagagcccgcgggtcctctcatacatggcttctgtttctgccgagagatctgttttccaattatgaagccggtcggtttggtcagactcccgacacccacgtcccaggtacccggtgggaaagtggcagtgcgagggcgcagccattggtggttgcagggccccagagggctggggtgacctggcatcccggggctccccacgggctggatgacggggttggcactgtggcgtccaggaggagatgcctggttctgcccaaaataatccaaagagccgtttcctcctcgcccttcagtttttgcctgaggtgctgggtagcccatcctttcctctgtcccagattcaaatgaggagtaagagcccagacgagaggaaggcaggctggatctttgccttgagagctccgtgtcaccaggatggaagggggtgcctctcggaggagcctgtgtccacctccagtctcggctttccccggggggccaagcgcactgggctgccgtctgtccccagctcccgtggccacacagctatctggaggctttgcagggagtcgtgggttctcgcacctgctcagccctgtgtcggcttcctgtgtgctcacctaaagctgtggttttgctgtgttcacttcgatttttctggtctgtggagaaactgtgaattggagaaatggagctctgtggcttcccacccaaaccttctcagtccagctggaggctggagggagacacaggccccacccagcagactgaggggcagaggcacaggtgggagggcagcggagatcagcgtggacaggagcgatgcactttgtagatgctgtggctttgtgttgcgttttgtgtctctgttgcacagatctgttttttcacactgatccgtattcccctgggtgtgcacacagggcgggtgtggggcatttaggccatgctgtgctctacttcattgagtaaaatcgagtgagaggttccgggcagcaggatcgacgcccagtccagccggcagagggaacacacgggtccttcattgtcctgtaagggtgttgaagatgctccctggcggcccccaagcagactagatgggaggaggcgccgctcagcccctcaccctgcatcactgaagagcggcgcctctgcagcaagcagggcttcaggaggtgcccgctggccacagccaggttttccctaagaagatgttattttgttgggttttgttccccctccatctcgattctcgtacccaact

SEQ ID NO: 176883 - DNA, 552 bp, Homo sapiens
  Payload ID: 14710
  Gene Symbol: RPS6KA2
  Gene Name: ribosomal protein S6 kinase, 90kDa, polypeptide 2
  ENST ID: ENST00000512860
  CDS Start-End: 263-552
agagaccctgggagtcctagctggttcctggatggaaattctttgaccagcgtcctatatggcctaaagggaaaagtacaggagctctggaggggaagaaggcgtcgtgaaggagatagacatcagccatcatgtgaaggagggctttgagaaggcagatccttcccagtttgagctgctgaaggttttaggacaaggatcctatggaaaggtgttcctggtgaggaaggtgaaggggtccgacgctgggcagctctacgccatgaaggtccttaagaaagccaccctaaaagttcgggaccgagtgagatcgaagatggagagagacatcttggcagaagtgaatcaccccttcattgtgaagcttcattatgcctttcagacggaaggaaagctctacctgatcctggacttcctgcggggaggggacctcttcacccggctctccaaagaggtcatgttcacggaggaggatgtcaagttctacctggctgagctggccttggctttagaccatctccacagcctggggatcatctacagagatctgaa

SEQ ID NO: 176884 - DNA, 7918 bp, Homo sapiens
  Payload ID: 14711
  Gene Symbol: RPS6KA3
  Gene Name: ribosomal protein S6 kinase, 90kDa, polypeptide 3
  Uniprot ID: P51812
  ENST ID: ENST00000379565
  CDS Start-End: 209-2431
aggcgcgcggctttcgggcggtcggcgtcggcgtcgagccctctctggggccgccgccgctgctgctgctgctgccgctgccgctgccgctgccgccgccgccgccgccgccgccgctgccgtggggctcgggcggcgacggagcggggccggccgtggggcgggcggggagggaggaggcggtgaaggcggcgggccgggggggaagatgccgctggcgcagctggcggacccgtggcagaagatggctgtggagagcccgtccgacagcgctgagaatggacagcaaattatggatgaacctatgggagaggaggagattaacccacaaactgaagaagtcagtatcaaagaaattgcaatcacacatcatgtaaaggaaggacatgaaaaggcagatccttcccagtttgaacttttaaaagtattagggcagggatcatttggaaaggttttcttagttaaaaaaatctcaggctctgatgctaggcagctttatgccatgaaggtattgaagaaggccacactgaaagttcgagaccgagttcggacaaaaatggaacgtgatatcttggtagaggttaatcatccttttattgtcaagttgcattatgcttttcaaactgaagggaagttgtatcttattttggattttctcaggggaggagatttgtttacacgcttatccaaagaggtgatgttcacagaagaagatgtcaaattctacttggctgaacttgcacttgctttagaccatctacatagcctgggaataatttatagagacttaaaaccagaaaatatacttcttgatgaagaaggtcacatcaagttaacagatttcggcctaagtaaagagtctattgaccatgaaaagaaggcatattctttttgtggaactgtggagtatatggctccagaagtagttaatcgtcgaggtcatactcagagtgctgactggtggtcttttggtgtgttaatgtttgaaatgcttactggtacactccctttccaaggaaaagatcgaaaagaaacaatgactatgattcttaaagccaaacttggaatgccacagtttttgagtcctgaagcgcagagtcttttacgaatgcttttcaagcgaaatcctgcaaacagattaggtgcaggaccagatggagttgaagaaattaaaagacattcatttttctcaacgatagactggaataaactgtatagaagagaaattcatccgccatttaaacctgcaacgggcaggcctgaagatacattctattttgatcctgagtttactgcaaaaactcccaaagattcacctggcattccacctagtgctaatgcacatcagctttttcgggggtttagttttgttgctattacctcagatgatgaaagccaagctatgcagacagttggtgtacattcaattgttcagcagttacacaggaacagtattcagtttactgatggatatgaagtaaaagaagatattggagttggctcctactctgtttgcaagagatgtatacataaagctacaaacatggagtttgcagtgaagattattgataaaagcaagagagacccaacagaagaaattgaaattcttcttcgttatggacagcatccaaacattatcactctaaaggatgtatatgatgatggaaagtatgtgtatgtagtaacagaacttatgaaaggaggtgaattgctggataaaattcttagacaaaaatttttctctgaacgagaggccagtgctgtcctgttcactataactaaaaccgttgaatatcttcacgcacaaggggtggttcatagagacttgaaacctagcaacattctttatgtggatgaatctggtaatccggaatctattcgaatttgtgattttggctttgcaaaacagctgagagcggaaaatggtcttctcatgactccttgttacactgcaaattttgttgcaccagaggttttaaaaagacaaggctatgatgctgcttgtgatatatggagtcttggtgtcctactctatacaatgcttaccggttacactccatttgcaaatggtcctgatgatacaccagaggaaatattggcacgaataggtagcggaaaattctcactcagtggtggttactggaattctgtttcagacacagcaaaggacctggtgtcaaagatgcttcatgtagaccctcatcagagactgactgctgctcttgtgctcagacatccttggatcgtccactgggaccaactgccacaataccaactaaacagacaggatgcaccacatctagtaaagggtgccatggcagctacatattctgctttgaaccgtaatcagtcaccagttttggaaccagtaggccgctctactcttgctcagcggagaggtattaaaaaaatcacctcaacagccctgtgaagtgacctcagtgagatatttggtaccatggtgtaagctgatagcacaagttctggcgacaggtagcacgtatctgagagacacctgcaagcacacactgtcccagctggtacccataatgctgctgttcctgctgctgctcctgctttcctctcttctcgctttaaatgattgttagcaagttagattttcctggagcttcggaagaaatgaaaatggaaacatgatgaagatatagtcactgaatcaatgagaaaaataatgaacatatgaataccacctaaaaatacactgaataaagtacaccatatagcattatttttataggaaatatttcatgtcccttaaatattctttgttagttatagggatggacagtttatgttaagcacttagcttaaacaatccgtttatattagcactgtatcccttgtgccatccaacattttgtatgtttttgtaaacagttcatatacagtacatttctgtactgctttctttaatgtatacatgccttgtttaacttggaatctattattattaatcaattgactattaaatctggttaaatagttcacctggattaacagtattgttggacagtcctaaaaatggccagattgtggaacagctgttgaatgtaatacttccaaaatgtacatatctttccccacgtctgtttcactggttcgttcatttgtttgtttcttaaagtcaggtgctctgtcagactaacctagagagctgttatggtagagaaagttatcatatgtgtgtggcatgaaatcaagaatacacctatgaagttagtccatatactttgcaactccttagagtacttttttccttaattaaggaagtagtccttgcacttctaatcttacatagcatccatacttagaatttggcatatcatctgggattttgccaatatacgtcaaagccctttaagagtcatggtaaggagatgggtgaaggaaaatttagcaacaggtaattgaagtcctattggatatttcatgtttaaatagatattctatattaaacactaatttaaatgtaataaaggccaaaggcctctgtatgaaattggatttaaactttcttattttagggaataaaacattattgatcaaacagtatctgttctaacctaaaattataggtagggcaggctaagtgaacagcattgagtattttctgaatccctcatgataatttatagccacatactgcttcctttgacttcaggaatgatcagttttcataatggccactgggcctgcttagattgcagtattcattatctgcatctaatttggtagtttccacaatcgtatttgatgaaagaaacttcagtccccattattacctgtgtctttgccaagctgcctagcatacatcagtatgtaatgtaaaagacatatgagcaagaaaaaagtgatttaacttacctcatcaagaatgtgcccctacaggccgggcgcagtggctcacgcctgtaatcccagcattttgggaggccgaggcaggtggatcacctgaggtcaggagtttgagaccagcctggccaacatggtgaaaccccgtctctactaaaaaatacaaaaattagctgggcatggtggcgtgcacctgtaatcctagctactcaggaggctgaggcaggagaatcgcttgaacctgggaggtggtggttgcagtgagccaagatcacaccattgcactccagcctgggtgacagagtgagactctgtctcaagaaggaaaaaaaaaaaaaagaatgtactcatacagatttttgttagtcatcatgtaataagccatttatatcagaaaccttttttcctgccacagaagctttaaattttcccctaagagtacaaagccaagagagtgtggtttatctaaatgtcctgaaatccacttgtcattccttaatttctcctctatgcaattaaagagaaaggggaaatctataacatttcttttgcccaagtgacacaaaaatgattactgcatagaaatcaaatgtaagtttagcttctaaatgaaataatatataggagggatatcagaatgtctagatagagaaagtattttcaaattcttgaatatatggatgctattaaaagctgctttccattgcctggaaagagagcttttttccctcctctattcagtgtttcaaactttggtcatctcaaattattgtcacttttaaaatgttaatgtcattctgagcagaaatagatatattttcagatttttttacactgatgctactccgtaattgcttaggagtattgtccatcatagtattttagaactagaagtaaacacataaatccttataaattacccaatccaactttctcatattgcatgtagagaacctgagacacatatcaaagtctagaatccttaacttctccccattttgtttttttccgcctcatcacaccatgctgcctttccctcatatgatcaccaaccagtagctgagttcaaaaactacatatttcttgggcagtcctctactggtatgtgatgccaacttttatttctttcgaagataattgccttctttgcctagccaagcagccaattttattggagaaaagcaagttatatgttcacaaaatggaaggctttctacctaaatttatttcatctgtggtcctcttattctcttccattgcttttgacatacagtggaaaaacttggccaacgatgtgctctaaatatagtgcttgtgttgggttaacttttccattaatttctcaacatcaattattcaggcccctacagttgtggtattgaggcccctaaaggcttctgcctttcaccaattagtgctgccagttactgaggcttctcccaaaaggtatcagtccagtcttaaagatatttcattgtgaaagaagaaactaaactatcaggcctcttttacaaaatgagagattgaatttaagcttgtcaagcacgtactggaaggtatgaattacactaccatgtgttttgtatcttccctttcaagtgatgatgttaaatgaaggtaagtttttcatccttttttaatttttgttttttataaatcatttcagctttttctggtttatagaggtgtcttatttctaatgcaacagacccccaactttaacagatttgatatggatgcatttattcacaagcaaccccaaaagtccaaaaatgtaataattttgacaaggcccaaagttgagatgctatgaagcttgtgtgtgtgaaaagtcagttatgattgtctggagagaagctgtggtgtgtatgctgtagagtttccacatttcacatgcagtgtactccaaaaagcgggtttgggtcaaccatttcccatctctttttaagaagtgactgctgttggggccaggggacatcatgggaggtggggctgtccagttagctgtgccctgcaccttcagcccaggaaagatttgaacagagcaaaggcttcaagagagggcagaatgtattcggcagaaaagggactcaggtaagcccagcctgggatgagagcagaaaagcattcaagatttgcaggccttgctatggatgcgcttaatcaccatggaggccagcaatacccatctcagcatggctttgatattctctacttcctggcctttaaaaatgacctataatttttcagtttgctttactatattttataaagaaaattctatcttatggttgattgagcattgagacttatgaaggcattaggatagatagctcaggaatgtaaaggttcagaaaaggtctgttttctcagattaacaaatatgatggattccatggctgaccttggtgcttaaaccaggaggtttcaatctagtcctagagttgtgtccctctgaaaggcccaatgccatgtaactaactttaaactggatatatactttgagccttacttaattcacagataagttgacttaactcagtatttttatttcaattaatgaaaacagtcctcttttcaaccccaggttgcttacattttgctggtctccccaagtgaccattggtggagaccaattaatgaaggaatgaaattcactttattgggactgtggtattcaacagagccacacttaaccactttttccaatgaagaatctccagaatgataatgcccaaatatggatggccaagaagaatttgtatctacggtgtgctttatgtgtttttgacactgctgtattctgtgtgatcaagtgatttgcagctggttccaatgtgactgagtgttctcaaagatttctagtaactaagtcaacttaattttcttaagcctggtattactatcagcctcacatttaccactttgattctagttttttaactgttcataacagggcataccgagggttgggatgagagcctacttcctacctcttaaggcactttcctcattattttgccatataatcttgaactgcatgataagctgtttaaatgtccatgacttctcccagagcaactagcaaagtatatgacattttgaatagagattagtggaaaggaaaatgtagagatttaagttcagaggtacaaacctcaataaaacctccttagagcacataccatgagtagagtatatgtaaacgtatatgagaagagagtcgctataatagtcctctctaagtagattagttcattgtctaatggaagtgaacatctttactcctgttatcaccatagtactgaatgaactgtataatgagtttttcaaacaagtatttaaaatagaactttcacgtacaaagcaagggcataaagattttggtttgtgtttctgtaagtgtagtttaccatctaaagctttggtttttaattttaaaaaaagcttcaaggtattgccattccttagcatccttattgattatgggtgatgagtttttaactcttaaaatcatatacgtgtattagtttatcttaactgttgccctaagcaaaagggaaggtatacacctaagggatgtacttattttgcatttttggtcatgggtgggaatggggtgggtgcctacttaaatagtttttaaaaaagaaaaaaatcacaaatatttttctactgttatatatgatcttcctttatactagtttctctctagtaaggcatgccagaagcccaagataccatatcatgaattcttacatattgtaccttttgttggtggttaaatcgcatcagatgcttggcattgctgccataattataaaatgcttgtaaaggatcaaatatcactaaatactttaaattgttttacttaagagtctaatctgggaagttttcaaatcatactattaatgtgtaatctaagctcttcagatgtatccatgaataatcctggaacaatattgcttgtattcctgtcatagaacaggttttgtaatctttaaaagaaatgaaaatttatataataaagtttcaaatcaatgca

SEQ ID NO: 176885 - DNA, 530 bp, Homo sapiens
  Payload ID: 14711
  Gene Symbol: RPS6KA3
  Gene Name: ribosomal protein S6 kinase, 90kDa, polypeptide 3
  ENST ID: ENST00000438357
  CDS Start-End: 132-530
gggggggaagatgccgctggcgcagctggcggacccgtggcagaagatggctgtggagagcccgtccgacagcgctgaggataaatgaggagctgattcttaatcctgtcacattgaatggacagcaaattatggatgaacctatgggagaggaggagattaacccacaaactgaagaagtcagtatcaaagaaattgcaatcacacatcatgtaaaggaaggacatgaaaaggcagatccttcccagtttgaacttttaaaagtattagggcagggatcatttggaaaggttttcttagttaaaaaaatctcaggctctgatgctaggcagctttatgccatgaaggtattgaagaaggccacactgaaagttcgagaccgagttcggacaaaaatggaacgtgatatcttggtagaggttaatcatccttttattgtcaagttgcattatgcttttcaaactgaagggaagttgtatcttattttggattttctcaggggaggagatttgtttacacgcttatccaaa

SEQ ID NO: 176886 - DNA, 804 bp, Homo sapiens
  Payload ID: 14711
  Gene Symbol: RPS6KA3
  Gene Name: ribosomal protein S6 kinase, 90kDa, polypeptide 3
  ENST ID: ENST00000457145
  CDS Start-End: 122-804
aggaaattttctaattgccggaacagctggtaggagaaaactttgcaggggcttggccttccctttctaacttaagttttaccgtcagaaattcttttatcaccatcatggtttcgtagccatgtttaaatttttgtcttttcgtgttcgctctatacaggaagaagtcagtatcaaagaaattgcaatcacacatcatgtaaaggaaggacatgaaaaggcagatccttcccagtttgaacttttaaaagtattagggcagggatcatttggaaaggttttcttagttaaaaaaatctcaggctctgatgctaggcagctttatgccatgaaggtattgaagaaggccacactgaaagttcgagaccgagttcggacaaaaatggaacgtgatatcttggtagaggttaatcatccttttattgtcaagttgcattatgcttttcaaactgaagggaagttgtatcttattttggattttctcaggggaggagatttgtttacacgcttatccaaagaggtgatgttcacagaagaagatgtcaaattctacttggctgaacttgcacttgctttagaccatctacatagcctgggaataatttatagagacttaaaaccagaaaatatacttcttgatgaagaaggtcacatcaagttaacagatttcggcctaagtaaagagtctattgaccatgaaaagaaggcatattctttttgtggaactgtggagtatatggctccagaagtagttaatcgtcgaggtcatactcagagtgctgactggtggtcttttggtgtgtt

SEQ ID NO: 176887 - DNA, 3119 bp, Homo sapiens
  Payload ID: 14712
  Gene Symbol: RPS6KA4
  Gene Name: ribosomal protein S6 kinase, 90kDa, polypeptide 4
  Uniprot ID: O75676
  ENST ID: ENST00000334205
  CDS Start-End: 66-2384
ggagccgccatgtaaccggcgccgcccggagcccgagccgcgcgggccccagcgacccgcccgccatgggggacgaggacgacgatgagagctgcgccgtggagctgcggatcacagaagccaacctgaccgggcacgaggagaaggtgagcgtggagaacttcgagctgctcaaggtgctgggcacgggagcctacggcaaggtgttcctggtgcggaaggcgggcgggcacgacgcggggaagctgtacgccatgaaggtgctgcgcaaggcggcgctggtgcagcgcgccaagacgcaagagcacacgcgcaccgagcgctcggtgctggagctggtgcgccaggcgcccttcctggtcacgctgcactacgctttccagacggatgccaagctgcacctcatcctggactatgtgagcggcggggagatgttcacccacctctaccagcgccagtacttcaaggaggctgaggtgcgcgtgtatgggggtgagatcgtgctggccctggaacacctgcacaagctcggcatcatttaccgagacctgaaactggagaatgtgctgctggactccgagggccacattgtcctcacggacttcgggctgagcaaggagttcctgacggaggagaaagagcggaccttctccttctgtggcaccatcgagtacatggcccccgaaatcatccgtagcaagacggggcatggcaaggctgtggactggtggagcctgggcatcttgctcttcgagctgctgacgggggcctcgcccttcaccctggagggcgagaggaacacgcaggctgaggtgtctcgacggatcctgaagtgctcccctcccttcccccctcggatcgggcccgtggcgcaggacctgctgcagcggctgctttgtaaggatcctaagaagcgattgggcgcggggccccagggggcacaagaagtccggaaccatcccttcttccagggcctcgattgggtggctctggctgccaggaagattccagccccattccggccccaaatccgctcagagctggatgtgggcaactttgcggaggaattcactcggctggagcctgtctactcaccccctggcagccccccacctggggacccccgaatctttcagggatactcctttgtggcaccctccattctctttgaccacaacaacgcggtgatgaccgatgggctggaagcgcctggtgctggagaccggccaggtcgggcagcggtggccaggagcgctatgatgcaggactcgcccttcttccagcagtacgagctggacctgcgggagcctgcgctgggccagggcagcttttctgtgtgtcgccgctgccgccagcgccagagcggccaggagttcgcagtcaagatcctcagtcgcaggctggaggcgaacacgcagcgcgaagtggctgccctgcgcctgtgccagtcacaccccaacgtggtgaatctgcacgaggtgcatcacgaccagctgcacacgtacctggtcctggagctgctgcggggcggggagctgctggagcacatccgcaagaagcggcacttcagcgagtcggaagcaagccagatcctgcgcagcctcgtgtcggccgtgagcttcatgcacgaggaggcgggcgtggtgcaccgcgacctcaagccggagaacatcctgtacgccgacgacacgcccggggccccggtgaaaatcatcgacttcgggttcgcgcggttgcggccgcagagtcccggggtgcccatgcagacgccctgcttcacgctgcagtacgctgcccccgagctgctggcgcagcagggctacgacgagtcctgcgacctctggagcctgggcgtcattctgtacatgatgctgtcggggcaggtccccttccagggggcctctggccagggcgggcagagccaggcggccgagatcatgtgcaaaatccgcgaggggcgcttctcccttgacggggaggcctggcagggtgtatccgaggaagccaaggagctggtccgagggctcctgaccgtggaccccgccaagcggctgaagctcgagggactgcggggcagctcgtggctgcaggacggcagcgcgcgctcctcgcccccgctccggacgcccgacgtgctcgagtcctctgggcccgcagtgcgctcgggtctcaacgccaccttcatggcattcaaccggggcaagcgggagggcttcttcctgaagagcgtggagaatgcacccctggccaagcggcggaagcagaagctgcggagcgccaccgcctcccgccggggctcccctgcaccagccaacccgggccgagcccccgtcgcctccaaaggggccccccgccgagccaacggccccctgcccccctcctaatccccaccactgtgacccccttccctcataggggctgtgacctgggagcccggctcactcccggaggcctctgcctgcggctgacctgatccccaagggactgtcctttcctctcctaccccaccccactcccagacagagcagaagtatttttataagcagagaattttttatgtcttaccagatagagttgcagggaagggggggcctgctggggagtggggtttggggggccctctcccaggacactgcctcttctgggcagaaggcccctccagggggactgctccaacaggaaagagcccctcccccacttctaagcactgagttaggagtgctaactcctaaactgggaccccctaccctgttctcccctgaggccccgttcctgggaggggcacccctcaactgtcactttatggactgtctgtgcaattacgtccaccaaagacccgtgttgggggtactgaaggagaggccctgggggaccctctgaagcatttctgcctcactttatgtcatctgcttctcccctgttggggctaaggaaggagataggtggctcctaaaagaggaggccatcttctcacccaccccttcctctttggcacagctactcctggctgggggtggggccttgggggtctgggctgggcatccatggtcactgcctcagcccagccaggctgtgcctttgactttaaaataaaagtccacccagtgctgtgtgtggca

SEQ ID NO: 176888 - DNA, 2114 bp, Homo sapiens
  Payload ID: 14712
  Gene Symbol: RPS6KA4
  Gene Name: ribosomal protein S6 kinase, 90kDa, polypeptide 4
  ENST ID: ENST00000530504
  CDS Start-End: 1-2114
acagaagccaacctgaccgggcacgaggagaaggtgagcgtggagaacttcgagctgctcaaggtgctgggcacgggagcctacggcaaggtgttcctggtgcggaaggcgggcgggcacgacgcggggaagctgtacgccatgaaggtgctgcgcaaggcggcgctggtgcagcgcgccaagacgcaagagcacacgcgcaccgagcgctcggtgctggagctggtgcgccaggcgcccttcctggtcacgctgcactacgctttccagacggatgccaagctgcacctcatcctggactatgtgagcggcggggagatgttcacccacctctaccagcgccagtacttcaaggaggctgaggtgcgcgtgtatgggggtgagatcgtgctggccctggaacacctgcacaagctcggcatcatttaccgagacctgaaactggagaatgtgctgctggactccgagggccacattgtcctcacggacttcgggctgagcaaggagttcctgacggaggagaaagagcggaccttctccttctgtggcaccatcgagtacatggcccccgaaatcatccgtagcaagacggggcatggcaaggctgtggactggtggagcctgggcatcttgctcttcgagctgctgacgggggcctcgcccttcaccctggagggcgagaggaacacgcaggctgaggtgtctcgacggatcctgaagtgctcccctcccttcccccctcggatcgggcccgtggcgcaggacctgctgcagcggctgctttgtaaggatcctaagaagcgattgggcgcggggccccagggggcacaagaagtccggaaccatcccttcttccagggcctcgattgggtggctctggctgccaggaagattccagccccattccggccccaaatccgctcagagctggatgtgggcaactttgcggaggaattcactcggctggagcctgtctactcaccccctggcagccccccacctggggacccccgaatctttcagggatactcctttgtggcaccctccattctctttgaccacaacaacgcggtgatgaccgatgggctggaagcgcctggtgctggagaccggccaggtcgggcagcggtggccaggagcgctatgatgcagcagtacgagctggacctgcgggagcctgcgctgggccagggcagcttttctgtgtgtcgccgctgccgccagcgccagagcggccaggagttcgcagtcaagatcctcagtcgcaggctggaggcgaacacgcagcgcgaagtggctgccctgcgcctgtgccagtcacaccccaacgtggtgaatctgcacgaggtgcatcacgaccagctgcacacgtacctggtcctggagctgctgcggggcggggagctgctggagcacatccgcaagaagcggcacttcagcgagtcggaagcaagccagatcctgcgcagcctcgtgtcggccgtgagcttcatgcacgaggaggcgggcgtggtgcaccgcgacctcaagccggagaacatcctgtacgccgacgacacgcccggggccccggtgaaaatcatcgacttcgggttcgcgcggttgcggccgcagagtcccggggtgcccatgcagacgccctgcttcacgctgcagtacgctgcccccgagctgctggcgcagcagggctacgacgagtcctgcgacctctggagcctgggcgtcattctgtacatgatgctgtcggggcaggtccccttccagggggcctctggccagggcgggcagagccaggcggccgagatcatgtgcaaaatccgcgaggggcgcttctcccttgacggggaggcctggcagggtgtatccgaggaagccaaggagctggtccgagggctcctgaccgtggaccccgccaagcggctgaagctcgagggactgcggggcagctcgtggctgcaggacggcagcgcgcgctcctcgcccccgctccggacgcccgacgtgctcgagtcctctgggcccgcagtgcgctcgggtctcaacgccaccttcatggcattcaaccggggcaagcgggagggcttcttcctgaagagcgtggagaatgcacccct

SEQ ID NO: 176889 - DNA, 2532 bp, Homo sapiens
  Payload ID: 14712
  Gene Symbol: RPS6KA4
  Gene Name: ribosomal protein S6 kinase, 90kDa, polypeptide 4
  ENST ID: ENST00000528355
  CDS Start-End: 55-201
gtaaccggcgccgcccggagcccgagccgcgcgggccccagcgacccgcccgccatgggggacgaggacgacgatgagagctgcgccgtggagctgcggatcacagaagccaacctgaccgggcacgaggagaagcctacggcaaggtgttcctggtgcggaaggcgggcgggcacgacgcggggaagctgtacgccatgaaggtgctgcgcaaggcggcgctggtgcagcgcgccaagacgcaagagcacacgcgcaccgagcgctcggtgctggagctggtgcgccaggcgcccttcctggtcacgctgcactacgctttccagacggatgccaagctgcacctcatcctggactatgtgagcggcggggagatgttcacccacctctaccagcgccagtacttcaaggaggctgaggtgcgcgtgtatgggggtgagatcgtgctggccctggaacacctgcacaagctcggcatcatttaccgagacctgaaactggagaatgtgctgctggactccgagggccacattgtcctcacggacttcgggctgagcaaggagttcctgacggaggagaaagagcggaccttctccttctgtggcaccatcgagtacatggcccccgaaatcatccgtagcaagacggggcatggcaaggctgtggactggtggagcctgggcatcttgctcttcgagctgctgacgggggcctcgcccttcaccctggagggcgagaggaacacgcaggctgaggtgtctcgacggatcctgaagtgctcccctcccttcccccctcggatcgggcccgtggcgcaggacctgctgcagcggctgctttgtaaggatcctaagaagcgattgggcgcggggccccagggggcacaagaagtccggaaccatcccttcttccagggcctcgattgggtggctctggctgccaggaagattccagccccattccggccccaaatccgctcagagctggatgtgggcaactttgcggaggaattcactcggctggagcctgtctactcaccccctggcagccccccacctggggacccccgaatctttcagggatactcctttgtggcaccctccattctctttgaccacaacaacgcggtgatgaccgatgggctggaagcgcctggtgctggagaccggccaggtcgggcagcggtggccaggagcgctatgatgcaggactcgcccttcttccagcagtacgagctggacctgcgggagcctgcgctgggccagggcagcttttctgtgtgtcgccgctgccgccagcgccagagcggccaggagttcgcagtcaagatcctcagtcgcaggctggaggcgaacacgcagcgcgaagtggctgccctgcgcctgtgccagtcacaccccaacgtggtgaatctgcacgaggtgcatcacgaccagctgcacacgtacctggtcctggagctgctgcggggcggggagctgctggagcacatccgcaagaagcggcacttcagcgagtcggaagcaagccagatcctgcgcagcctcgtgtcggccgtgagcttcatgcacgaggaggcgggcgtggtgcaccgcgacctcaagccggagaacatcctgtacgccgacgacacgcccggggccccggtgaaaatcatcgacttcgggttcgcgcggttgcggccgcagagtcccggggtgcccatgcagacgccctgcttcacgctgcagtacgctgcccccgagctgctggcgcagcagggctacgacgagtcctgcgacctctggagcctgggcgtcattctgtacatgatgctgtcggggcaggtccccttccagggggcctctggccagggcgggcagagccaggcggccgagatcatgtgcaaaatccgcgaggggcgcttctcccttgacggggaggcctggcagggtgtatccgaggaagccaaggagctggtccgagggctcctgaccgtggaccccgccaagcggctgaagctcgagggactgcggggcagctcgtggctgcaggacggcagcgcgcgctcctcgcccccgctccggacgcccgacgtgctcgagtcctctgggcccgcagtgcgctcgggtctcaacgccaccttcatggcattcaaccggggcaagcgggagggcttcttcctgaagagcgtggagaatgcacccctggccaagcggcggaagcagaagctgcggagcgccaccgcctcccgccggggctcccctgcaccagccaacccgggccgagcccccgtcgcctccaaaggggccccccgccgagccaacggccccctgcccccctcctaatccccaccactgtgacccccttccctcataggggctgtgacctgggagcccggctcactcccggaggcctctgcctgcggctgacctgatccccaagggactgtcctttcctctcctaccccaccccactcccagacagagcagaagtatttttataagcagagaattttttatgtcttaccagatagagttgcagggaaggggg

SEQ ID NO: 176890 - DNA, 3121 bp, Homo sapiens
  Payload ID: 14712
  Gene Symbol: RPS6KA4
  Gene Name: ribosomal protein S6 kinase, 90kDa, polypeptide 4
  ENST ID: ENST00000528057
  CDS Start-End: 89-2386
accaggaagcgcccgccccggccggagccgccatgtaaccggcgccgcccggagcccgagccgcgcgggccccagcgacccgcccgccatgggggacgaggacgacgatgagagctgcgccgtggagctgcggatcacagaagccaacctgaccgggcacgaggagaaggtgagcgtggagaacttcgagctgctcaaggtgctgggcacgggagcctacggcaaggtgttcctggtgcggaaggcgggcgggcacgacgcggggaagctgtacgccatgaaggtgctgcgcaaggcggcgctggtgcagcgcgccaagacgcaagagcacacgcgcaccgagcgctcggtgctggagctggtgcgccaggcgcccttcctggtcacgctgcactacgctttccagacggatgccaagctgcacctcatcctggactatgtgagcggcggggagatgttcacccacctctaccagcgccagtacttcaaggaggctgaggtgcgcgtgtatgggggtgagatcgtgctggccctggaacacctgcacaagctcggcatcatttaccgagacctgaaactggagaatgtgctgctggactccgagggccacattgtcctcacggacttcgggctgagcaaggagttcctgacggaggagaaagagcggaccttctccttctgtggcaccatcgagtacatggcccccgaaatcatccgtagcaagacggggcatggcaaggctgtggactggtggagcctgggcatcttgctcttcgagctgctgacgggggcctcgcccttcaccctggagggcgagaggaacacgcaggctgaggtgtctcgacggatcctgaagtgctcccctcccttcccccctcggatcgggcccgtggcgcaggacctgctgcagcggctgctttgtaaggatcctaagaagcgattgggcgcggggccccagggggcacaagaagtccggaaccatcccttcttccagggcctcgattgggtggctctggctgccaggaagattccagccccattccggccccaaatccgctcagagctggatgtgggcaactttgcggaggaattcactcggctggagcctgtctactcaccccctggcagccccccacctggggacccccgaatctttcagggatactcctttgtggcaccctccattctctttgaccacaacaacgcggtgatgaccgatgggctggaagcgcctggtgctggagaccggccaggtcgggcagcggtggccaggagcgctatgatgcagtacgagctggacctgcgggagcctgcgctgggccagggcagcttttctgtgtgtcgccgctgccgccagcgccagagcggccaggagttcgcagtcaagatcctcagtcgcaggctggaggcgaacacgcagcgcgaagtggctgccctgcgcctgtgccagtcacaccccaacgtggtgaatctgcacgaggtgcatcacgaccagctgcacacgtacctggtcctggagctgctgcggggcggggagctgctggagcacatccgcaagaagcggcacttcagcgagtcggaagcaagccagatcctgcgcagcctcgtgtcggccgtgagcttcatgcacgaggaggcgggcgtggtgcaccgcgacctcaagccggagaacatcctgtacgccgacgacacgcccggggccccggtgaaaatcatcgacttcgggttcgcgcggttgcggccgcagagtcccggggtgcccatgcagacgccctgcttcacgctgcagtacgctgcccccgagctgctggcgcagcagggctacgacgagtcctgcgacctctggagcctgggcgtcattctgtacatgatgctgtcggggcaggtccccttccagggggcctctggccagggcgggcagagccaggcggccgagatcatgtgcaaaatccgcgaggggcgcttctcccttgacggggaggcctggcagggtgtatccgaggaagccaaggagctggtccgagggctcctgaccgtggaccccgccaagcggctgaagctcgagggactgcggggcagctcgtggctgcaggacggcagcgcgcgctcctcgcccccgctccggacgcccgacgtgctcgagtcctctgggcccgcagtgcgctcgggtctcaacgccaccttcatggcattcaaccggggcaagcgggagggcttcttcctgaagagcgtggagaatgcacccctggccaagcggcggaagcagaagctgcggagcgccaccgcctcccgccggggctcccctgcaccagccaacccgggccgagcccccgtcgcctccaaaggggccccccgccgagccaacggccccctgcccccctcctaatccccaccactgtgacccccttccctcataggggctgtgacctgggagcccggctcactcccggaggcctctgcctgcggctgacctgatccccaagggactgtcctttcctctcctaccccaccccactcccagacagagcagaagtatttttataagcagagaattttttatgtcttaccagatagagttgcagggaagggggggcctgctggggagtggggtttggggggccctctcccaggacactgcctcttctgggcagaaggcccctccagggggactgctccaacaggaaagagcccctcccccacttctaagcactgagttaggagtgctaactcctaaactgggaccccctaccctgttctcccctgaggccccgttcctgggaggggcacccctcaactgtcactttatggactgtctgtgcaattacgtccaccaaagacccgtgttgggggtactgaaggagaggccctgggggaccctctgaagcatttctgcctcactttatgtcatctgcttctcccctgttggggctaaggaaggagataggtggctcctaaaagaggaggccatcttctcacccaccccttcctctttggcacagctactcctggctgggggtggggccttgggggtctgggctgggcatccatggtcactgcctcagcccagccaggctgtgcctttgactttaaaataaaagtccacccagtgctgtgtgtggca

SEQ ID NO: 176891 - DNA, 3807 bp, Homo sapiens
  Payload ID: 14713
  Gene Symbol: RPS6KA5
  Gene Name: ribosomal protein S6 kinase, 90kDa, polypeptide 5
  ENST ID: ENST00000261991
  CDS Start-End: 161-2584
cgtgcggccagagcgggaaagagactcgtctttgcgtccgagttctggagccgccgcaccccgactcctggggccgcggcagcggctgcgaggggacgggcgtccgctgtctcctgggttcccctcgtagcgacccgcgggatcggaaaaaaaggagaagatggaggaggagggtggcagcagcggcggcgccgcggggaccagcgcggacggcggcgacggaggagagcagctcctcactgtcaagcacgagctgcggactgctaatttgacaggacatgctgagaaggtgggaatagaaaattttgagctcctgaaggtcctaggaactggagcttatggaaaagtatttctagttcgtaaaataagtggccatgatactggaaagctgtatgccatgaaagttttgaaaaaggcaacaatcgttcaaaaggccaaaaccacagagcatacaaggacagaacgacaagtcctggaacacattaggcagtcgccatttttggtaacattacattatgctttccagacagaaaccaaacttcatctcattttagattatataaatggtggtgaactttttactcatctttctcaaagagagcgtttcacagagcatgaggtgcagatttatgttggagagattgtgcttgccctcgaacatctccacaagttggggattatatatcgtgatattaagcttgagaatattctacttgattctaatggccatgtggtgctgacagattttggtctgagtaaggagtttgtggctgatgaaactgaaagagcatattccttttgtggaactattgaatacatggcaccagatattgtcagagggggagattcaggacatgacaaggcagttgactggtggagtttgggtgttctaatgtatgaattactaactggagcatctcctttcactgttgatggagaaaaaaattcccaagctgagatatctaggagaatattaaaaagtgagcctccatatccccaagaaatgagtgctttagcgaaagacctaattcagcgtcttttgatgaaagatcccaagaagagattgggatgtggtccacgtgatgcagatgaaatcaaagaacatctcttctttcagaaaataaattgggatgatttagccgccaaaaaagtgcctgcaccatttaagccagtcattcgagatgaattagatgtgagtaactttgcagaagagttcacagaaatggatcccacttattctcccgcagccctgccccagagttctgagaagctgtttcagggctattcctttgttgctccttccatcctattcaagcgtaatgcagctgtcatagaccctcttcagtttcacatgggagttgaacgtcctggagtgacaaatgttgccaggagtgcaatgatgaaggactctccattctatcaacactatgacctagatttgaaggacaaacccctgggagaaggtagtttttcaatttgtcgaaagtgtgtgcataaaaaaagtaaccaagcttttgcagtcaaaataatcagcaaaaggatggaagccaatactcaaaaggaaataacagctctgaaactctgtgaaggacaccccaatattgtgaagttgcatgaagtttttcatgatcagcttcacacgtttctagtgatggaacttctgaatggaggagaactgtttgaggcattaagaaaaaagcacttcagtgagacggaagccagctacatcatgaggaagcttgtttcagctgtaagccacatgcatgatgttggagtggtgcacagggatctgaaacctgagaatttattgttcaccgatgaaaatgacaatttggaaattaaaataattgattttggatttgcacggctaaagccaccggataatcagcccctgaagactccatgcttcacccttcattatgccgccccagagctcttgaatcagaacggctacgatgagtcctgtgacctgtggagcttgggcgtcattttgtacacaatgttgtcaggacaggttcccttccaatctcatgaccgaagtttgacgtgtaccagcgcggtggaaatcatgaagaaaattaaaaagggagatttctcctttgaaggagaagcctggaagaatgtatcccaagaggctaaagatttgatccaaggacttctcacagtagatccaaacaaaaggcttaaaatgtctggcttgaggtacaatgaatggctacaagatggaagtcagctgtcctccaatcctctgatgactccggatattctaggatcttccggagctgccgtgcatacctgtgtgaaagcaaccttccacgcctttaacaaatacaagagagaggggttttgccttcagaatgttgataaggcccctttggctaagagaagaaaaatgaaaaagactagcaccagtaccgagacgcgcagcagttccagtgagagttcccattcttcttcctctcattctcacggtaaaactacacccaccaagacactgcagcccagcaatcctgccgacagcaataacccggagaccctcttccagttctcggactcacttaggcatggtaggagttatcagtgatccattgcacctttattccctcagcatatgcctgaggcgatcttttatgcttttaaaaatgtttcccgttggtctcattggaatctgcctcctaatgatttttttcaggaaaacctgtttggttatcctcattcaaaagcactggacagagaatgttactgtgaatagagcacatattactctttttagcaacctagcatgatgccaacaagactattcttgaaagagcaaaggttcctgtaaatttaattagggctagatttgagctgcttgtaagtcacaggttttccagatgtctgccaacaagaaatgactcatactgtgatgataccttttgctttgccttgtggacaatgtgggtttttgaaatttgcacccttcaaacaatgatttatcagagaaaggggtctgttttcaaaaaagattctgtaatgaattttatgtgtggcatatacttatttcttgagagaagattttaacttattgtttttattttatggttacatatgatgataacctgctattattaaactttttctaaaaagtgaaaaaaaaaaaaaaagatataagaactcaaggtcccatactctgtattcgggatccatctgagatgcatgctaagctatgtgtatgtttttaattttgcactgctctttcctggcaatttgttttaatggttattgcagaatattaaggtacatgtctctctgttttaagtaatattgcactttataaaaaagtatgaataaagcaaactattttataaagtgcactgtttaaagcatttgcactgtatttttgccatttattttcattttctactttaaatttgtcctcacattcctcttctactttgtatgcaacaagtagaatggggcatgttgtgtcatgtagtcagccacttatgcaccaatgtgaggaaaacctaaagggaaattaaactaaacactgtgcttcatatttgtacactgtgttgtactacagtgaggaatttcctcctgtagtcatatattatgtacataatattttagaatcatacctatgacttgtttggaaatttttctgttaaattttaaatccagaaagcatattttataaacttatgcagagcacttttattgctcaaaagttctgaattcatacagaaaacaagtactatgtgatgaaaacatttcattaaaagattgctgcatttaaaaatacaattaattcgttccctatgc

SEQ ID NO: 176892 - DNA, 2249 bp, Homo sapiens
  Payload ID: 14713
  Gene Symbol: RPS6KA5
  Gene Name: ribosomal protein S6 kinase, 90kDa, polypeptide 5
  Uniprot ID: O75582
  ENST ID: ENST00000418736
  CDS Start-End: 167-1816
gcgagccgtgcggccagagcgggaaagagactcgtctttgcgtccgagttctggagccgccgcaccccgactcctggggccgcggcagcggctgcgaggggacgggcgtccgctgtctcctgggttcccctcgtagcgacccgcgggatcggaaaaaaaggagaagatggaggaggagggtggcagcagcggcggcgccgcggggaccagcgcggacggcggcgacggaggagagcagctcctcactgtcaagcacgagctgcggactgctaatttgacaggacatgctgagaaggtgggaatagaaaattttgagctcctgaaggtcctaggaactggagcttatggaaaagtatttctagttcgtaaaataagtggccatgatactggaaagctgtatgccatgaaagttttgaaaaaggcaacaatcgttcaaaaggccaaaaccacagagcatacaaggacagaacgacaagtcctggaacacattaggcagtcgccatttttggtaacattacattatgctttccagacagaaaccaaacttcatctcattttagattatataaatggtggtgaactttttactcatctttctcaaagagagcgtttcacagagcatgaggtgcagatttatgttggagagattgtgcttgccctcgaacatctccacaagttggggattatatatcgtgatattaagcttgagaatattctacttgattctaatggccatgtggtgctgacagattttggtctgagtaaggagtttgtggctgatgaaactgaaagagcatattccttttgtggaactattgaatacatggcaccagatattgtcagagggggagattcaggacatgacaaggcagttgactggtggagtttgggtgttctaatgtatgaattactaactggagcatctcctttcactgttgatggagaaaaaaattcccaagctgagatatctaggagaatattaaaaagtgagcctccatatccccaagaaatgagtgctttagcgaaagacctaattcagcgtcttttgatgaaagatcccaagaagagattgggatgtggtccacgtgatgcagatgaaatcaaagaacatctcttctttcagaaaataaattgggatgatttagccgccaaaaaagtgcctgcaccatttaagccagtcattcgagatgaattagatgtgagtaactttgcagaagagttcacagaaatggatcccacttattctcccgcagccctgccccagagttctgagaagctgtttcagggctattcctttgttgctccttccatcctattcaagcgtaatgcagctgtcatagaccctcttcagtttcacatgggagttgaacgtcctggagtgacaaatgttgccaggagtgcaatgatgaaggactctccattctatcaacactatgacctagatttgaaggacaaacccctgggagaaggtagtttttcaatttgtcgaaagtgtgtgcataaaaaaagtaaccaagcttttgcagtcaaaataatcagcaaaaggatggaagccaatactcaaaaggaaataacagctctgaaactctgtgaaggacaccccaatattgtgaagttgcatgaagtttttcatgatcagcttcacacgtttctagtgatggaacttctgaatggaggagaactgtttgagcgcattaagaaaaagaagcacttcagtgagacggaagccagctacatcatgaggaagcttgtttcagctgtaagccacatgcatgatgttggagtggtgcacagggatctgaaacctgaggtataaaatcactggatctcttacgtaattcagtctagcaccattattaaagatctcccaaacatgggggaagtttctggggaggtttccttatttttttacttttcaaggctgttaaatagataattgaaaatacgtttctttgatgttttttcttttatatttcagtctaaaataaatttgtctttgtttattttttgccagctgatcatcttgaggttatatttgtaagtgtgagaaccttttatggaaaaaatactttatgcaacagttgtggactaaaaatagcaatggaaatttttatagcagaaaataatatctcttacatataattttagagggttttttttccaaatgatgtattttgaaaacttattttttacatttgtaatcaaattggttagctcatgaataaaaatgtatataattctattctaaa

SEQ ID NO: 176893 - DNA, 2993 bp, Homo sapiens
  Payload ID: 14713
  Gene Symbol: RPS6KA5
  Gene Name: ribosomal protein S6 kinase, 90kDa, polypeptide 5
  Uniprot ID: O75582
  ENST ID: ENST00000536315
  CDS Start-End: 252-2423
agttttccccagcccgggaatgagcggcgggcaccaggcatcggggccagcgcagccgccgaccgctgcccgtggcacgcacctccgaggatgtcgctgctcccccttcccgcacagctaatttgacaggacatgctgagaaggtgggaatagaaaattttgagctcctgaaggtcctaggaactggagcttatggaaaagtatttctagttcgtaaaataagtggccatgatactggaaagctgtatgccatgaaagttttgaaaaaggcaacaatcgttcaaaaggccaaaaccacagagcatacaaggacagaacgacaagtcctggaacacattaggcagtcgccatttttggtaacattacattatgctttccagacagaaaccaaacttcatctcattttagattatataaatggtggtgaactttttactcatctttctcaaagagagcgtttcacagagcatgaggtgcagatttatgttggagagattgtgcttgccctcgaacatctccacaagttggggattatatatcgtgatattaagcttgagaatattctacttgattctaatggccatgtggtgctgacagattttggtctgagtaaggagtttgtggctgatgaaactgaaagagcatattccttttgtggaactattgaatacatggcaccagatattgtcagagggggagattcaggacatgacaaggcagttgactggtggagtttgggtgttctaatgtatgaattactaactggagcatctcctttcactgttgatggagaaaaaaattcccaagctgagatatctaggagaatattaaaaagtgagcctccatatccccaagaaatgagtgctttagcgaaagacctaattcagcgtcttttgatgaaagatcccaagaagagattgggatgtggtccacgtgatgcagatgaaatcaaagaacatctcttctttcagaaaataaattgggatgatttagccgccaaaaaagtgcctgcaccatttaagccagtcattcgagatgaattagatgtgagtaactttgcagaagagttcacagaaatggatcccacttattctcccgcagccctgccccagagttctgagaagctgtttcagggctattcctttgttgctccttccatcctattcaagcgtaatgcagctgtcatagaccctcttcagtttcacatgggagttgaacgtcctggagtgacaaatgttgccaggagtgcaatgatgaaggactctccattctatcaacactatgacctagatttgaaggacaaacccctgggagaaggtagtttttcaatttgtcgaaagtgtgtgcataaaaaaagtaaccaagcttttgcagtcaaaataatcagcaaaaggatggaagccaatactcaaaaggaaataacagctctgaaactctgtgaaggacaccccaatattgtgaagttgcatgaagtttttcatgatcagcttcacacgtttctagtgatggaacttctgaatggaggagaactgtttgagcgcattaagaaaaagaagcacttcagtgagacggaagccagctacatcatgaggaagcttgtttcagctgtaagccacatgcatgatgttggagtggtgcacagggatctgaaacctgagaatttattgttcaccgatgaaaatgacaatttggaaattaaaataattgattttggatttgcacggctaaagccaccggataatcagcccctgaagactccatgcttcacccttcattatgccgccccagagctcttgaatcagaacggctacgatgagtcctgtgacctgtggagcttgggcgtcattttgtacacaatgttgtcaggacaggttcccttccaatctcatgaccgaagtttgacgtgtaccagcgcggtggaaatcatgaagaaaattaaaaagggagatttctcctttgaaggagaagcctggaagaatgtatcccaagaggctaaagatttgatccaaggacttctcacagtagatccaaacaaaaggcttaaaatgtctggcttgaggtacaatgaatggctacaagatggaagtcagctgtcctccaatcctctgatgactccggatattctaggatcttccggagctgccgtgcatacctgtgtgaaagcaaccttccacgcctttaacaaatacaagagagaggggttttgccttcagaatgttgataaggcccctttggctaagagaagaaaaatgaaaaagactagcaccagtaccgagacgcgcagcagttccagtgagagttcccattcttcttcctctcattctcacggtaaaactacacccaccaagacactgcagcccagcaatcctgccgacagcaataacccggagaccctcttccagttctcggactcagtagcttaggcatggtaggagtgtatcagtgatccattgcacctttattccctcagcatatgcctgaggcgatcttttatgcttttaaaaatgtttcccgttggtctcattggaatctgcctcctaatgatttttttcaggaaaacctgtttggttatcctcattcaaaagcactggacagagaatgttactgtgaatagagcacatattactctttttagcaacctagcatgatgccaacaagactattcttgaaagagcaaaggttcctgtaaatttaattagggctagatttgagctgcttgtaagtcacaggttttccagatgtctgccaacaagaaatgactcatactgtgatgataccttttgctttgccttgtggacaatgtgggtttttgaaatttgcacccttcaaacaatgatttatcagagaaaggggtctgttttcaaaaaagattctgtaatgaattttatgtgtggcatatacttatttcttgagagaagattttaacttattgtttttattttatggttacatatgatgataacctgctattattaaactttttctaaaaagtg

SEQ ID NO: 176894 - DNA, 1420 bp, Homo sapiens
  Payload ID: 14713
  Gene Symbol: RPS6KA5
  Gene Name: ribosomal protein S6 kinase, 90kDa, polypeptide 5
  ENST ID: ENST00000554206
  CDS Start-End: 203-862
actagcggtgcccgccgaagggggaggaggcgaggagcgagccgtgcggccagagcgggaaagagactcgtctttgcgtccgagttctggagccgccgcaccccgactcctggggccgcggcagcggctgcgaggggacgggcgtccgctgtctcctgggttcccctcgtagcgacccgcgggatcggaaaaaaaggagaagatggaggaggagggtggcagcagcggcggcgccgcggggaccagcgcggacggcggcgacggaggagagcagctcctcactgtcaagcacgagctgcggactgctaatttgacaggacatgctgagaaggtgggaatagaaaattttgagctcctgaaggtcctaggaactggagcttatggaaaagtatttctagttcgtaaaataagtggccatgatactggaaagctgtatgccatgaaagttttgaaaaaggcaacaatcgttcaaaaggccaaaaccacagagcatacaaggacagaacgacaagtcctggaacacattaggcagtcgccatttttggtaacattacattatgctttccagacagaaaccaaacttcatctcattttagattatataaatggtggtgaactttttactcatctttctcaaagagagcgtttcacagagcatgaggtgcagatttatgttggagagattgtgcttgccctcgaacatctccacaagttggggattatatatcgtgatattaagcttgagaatattctacttgattctaatggccatgtggtgctgacagattttggtctgagtaaggagtttgtggctgatgaacttgaaatcaaatcccttttttgtttgtttgttcaagactgaaagagcatattccttttgtggaactattgaatacatggcaccagatattgtcagagggggagattcaggacatgacaaggcagttgactggtggagtttgggtgttctaatgtatgaattactaactggagcatctcctttcactgttgatggagaaaaaaattcccaagctgagatatctaggagaatattaaaaagtgagcctccatatccccaagaaatgagtgctttagcgaaagacctaattcagcgtcttttgatgaaagatcccaagaagagattgggatgtggtccacgtgatgcagatgaaatcaaagaacatctcttctttcagaaaataaattgggatgatttagccgccaaaaaagtgcctgcaccatttaagccagtcattcgagatgaattagatgtgagtaactttgcagaagagttcacagaaatggatcccacttattctcccgcagccctgccccagagttctgagaagctgtttcagggctattcctttgttgctccttccatcctattcaagcgtaatgcagctgtcatagaccctct

SEQ ID NO: 176895 - DNA, 2118 bp, Homo sapiens
  Payload ID: 14713
  Gene Symbol: RPS6KA5
  Gene Name: ribosomal protein S6 kinase, 90kDa, polypeptide 5
  ENST ID: ENST00000556178
  CDS Start-End: 1-239
cttatggaaaagtatttctagttcgtaaaataagtggccatgatactggaaagctgtatgccatgaaagttttgaaaaaggcaacaatcgttcaaaaggccaaaaccacagagcatacaaggacagaacgacaagtcctggaacacattaggcagtcgccatttttggtaacattacattatgctttccagacagaaaccaaacttcatctcattttagttggggattatatatcgtgatattaagcttgagaatattctacttgattctaatggccatgtggtgctgacagattttggtctgagtaaggagtttgtggctgatgaaactgaaagagcatattccttttgtggaactattgaatacatggcaccagatattgtcagagggggagattcaggacatgacaaggcagttgactggtggagtttgggtgttctaatgtatgaattactaactggagcatctcctttcactgttgatggagaaaaaaattcccaagctgagatatctaggagaatattaaaaagtgagcctccatatccccaagaaatgagtgctttagcgaaagacctaattcagcgtcttttgatgaaagatcccaagaagagattgggatgtggtccacgtgatgcagatgaaatcaaagaacatctcttctttcagaaaataaattgggatgatttagccgccaaaaaagtgcctgcaccatttaagccagtcattcgagatgaattagatgtgagtaactttgcagaagagttcacagaaatggatcccacttattctcccgcagccctgccccagagttctgagaagctgtttcagggctattcctttgttgctccttccatcctattcaagcgtaatgcagctgtcatagaccctcttcagtttcacatgggagttgaacgtcctggagtgacaaatgttgccaggagtgcaatgatgaaggactctccattctatcaacactatgacctagatttgaaggacaaacccctgggagaaggtagtttttcaatttgtcgaaagtgtgtgcataaaaaaagtaaccaagcttttgcagtcaaaataatcagcaaaaggatggaagccaatactcaaaaggaaataacagctctgaaactctgtgaaggacaccccaatattgtgaagttgcatgaagtttttcatgatcagcttcacacgtttctagtgatggaacttctgaatggaggagaactgtttgagcgcattaagaaaaagaagcacttcagtgagacggaagccagctacatcatgaggaagcttgtttcagctgtaagccacatgcatgatgttggagtggtgcacagggatctgaaacctgagaatttattgttcaccgatgaaaatgacaatttggaaattaaaataattgattttggatttgcacggctaaagccaccggataatcagcccctgaagactccatgcttcacccttcattatgccgccccagagctcttgaatcagaacggctacgatgagtcctgtgacctgtggagcttgggcgtcattttgtacacaatgttgtcaggacaggttcccttccaatctcatgaccgaagtttgacgtgtaccagcgcggtggaaatcatgaagaaaattaaaaagggagatttctcctttgaaggagaagcctggaagaatgtatcccaagaggctaaagatttgatccaaggacttctcacagtagatccaaacaaaaggcttaaaatgtctggcttgaggtacaatgaatggctacaagatggaagtcagctgtcctccaatcctctgatgactccggatattctaggatcttccggagctgccgtgcatacctgtgtgaaagcaaccttccacgcctttaacaaatacaagagagaggggttttgccttcagaatgttgataaggcccctttggctaagagaagaaaaatgaaaaagactagcaccagtaccgagacgcgcagcagttccagtgagagttcccattcttcttcctctcattctcacggtaaaactacacccaccaagacactgcagcccagcaatcctgccgacagcaataacccggagaccctcttccagttctcggactcagtagcttag

SEQ ID NO: 176896 - DNA, 596 bp, Homo sapiens
  Payload ID: 14713
  Gene Symbol: RPS6KA5
  Gene Name: ribosomal protein S6 kinase, 90kDa, polypeptide 5
  ENST ID: ENST00000556594
  CDS Start-End: 152-403
agagcgggaaagagactcgtctttgcgtccgagttctggagccgccgcaccccgactcctggggccgcggcagcggctgcgaggggacgggcgtccgctgtctcctgggttcccctcgtagcgacccgcgggatcggaaaaaaaggagaagatggaggaggagggtggcagcagcggcggcgccgcggggaccagcgcggacggcggcgacggaggagagcagctcctcactgtcaagcacgagctgcggactgagacgagtctactctgttgcccaggctggagtgtggtgctgatctcggctcactataacctccgcctcctgggttcaagtgattctcctgcctcagcctcccaagtggctgggattacaggcacccactaccatacccagctaatttgacaggacatgctgagaaggtgggaatagaaaattttgagctcctgaaggtcctaggaactggagcttatggaaaagtatttctagttcgtaaaataagtggccatgatactggaaagctgtatgccatgaaagttttgaaaaaggcaacaatcgttcaaaaggccaaaaccacagagcatacaaggacagaacg

SEQ ID NO: 176897 - DNA, 26795 bp, Homo sapiens
  Payload ID: 14713
  Gene Symbol: RPS6KA5
  Gene Name: ribosomal protein S6 kinase, 90kDa, polypeptide 5
  Uniprot ID: O75582
  ENST ID: ENST00000614987
  CDS Start-End: 175-2583
ggcgaggagcgagccgtgcggccagagcgggaaagagactcgtctttgcgtccgagttctggagccgccgcaccccgactcctggggccgcggcagcggctgcgaggggacgggcgtccgctgtctcctgggttcccctcgtagcgacccgcgggatcggaaaaaaaggagaagatggaggaggagggtggcagcagcggcggcgccgcggggaccagcgcggacggcggcgacggaggagagcagctcctcactgtcaagcacgagctgcggactgctaatttgacaggacatgctgagaaggtgggaatagaaaattttgagctcctgaaggtcctaggaactggagcttatggaaaagtatttctagttcgtaaaataagtggccatgatactggaaagctgtatgccatgaaagttttgaaaaaggcaacaatcgttcaaaaggccaaaaccacagagcatacaaggacagaacgacaagtcctggaacacattaggcagtcgccatttttggtaacattacattatgctttccagacagaaaccaaacttcatctcattttagattatataaatggtggtgaactttttactcatctttctcaaagagagcgtttcacagagcatgaggtgcagatttatgttggagagattgtgcttgccctcgaacatctccacaagttggggattatatatcgtgatattaagcttgagaatattctacttgattctaatggccatgtggtgctgacagattttggtctgagtaaggagtttgtggctgatgaaactgaaagagcatattccttttgtggaactattgaatacatggcaccagatattgtcagagggggagattcaggacatgacaaggcagttgactggtggagtttgggtgttctaatgtatgaattactaactggagcatctcctttcactgttgatggagaaaaaaattcccaagctgagatatctaggagaatattaaaaagtgagcctccatatccccaagaaatgagtgctttagcgaaagacctaattcagcgtcttttgatgaaagatcccaagaagagattgggatgtggtccacgtgatgcagatgaaatcaaagaacatctcttctttcagaaaataaattgggatgatttagccgccaaaaaagtgcctgcaccatttaagccagtcattcgagatgaattagatgtgagtaactttgcagaagagttcacagaaatggatcccacttattctcccgcagccctgccccagagttctgagaagctgtttcagggctattcctttgttgctccttccatcctattcaagcgtaatgcagctgtcatagaccctcttcagtttcacatgggagttgaacgtcctggagtgacaaatgttgccaggagtgcaatgatgaaggactctccattctatcaacactatgacctagatttgaaggacaaacccctgggagaaggtagtttttcaatttgtcgaaagtgtgtgcataaaaaaagtaaccaagcttttgcagtcaaaataatcagcaaaaggatggaagccaatactcaaaaggaaataacagctctgaaactctgtgaaggacaccccaatattgtgaagttgcatgaagtttttcatgatcagcttcacacgtttctagtgatggaacttctgaatggaggagaactgtttgagcgcattaagaaaaagaagcacttcagtgagacggaagccagctacatcatgaggaagcttgtttcagctgtaagccacatgcatgatgttggagtggtgcacagggatctgaaacctgagaatttattgttcaccgatgaaaatgacaatttggaaattaaaataattgattttggatttgcacggctaaagccaccggataatcagcccctgaagactccatgcttcacccttcattatgccgccccagagctcttgaatcagaacggctacgatgagtcctgtgacctgtggagcttgggcgtcattttgtacacaatgttgtcaggacaggttcccttccaatctcatgaccgaagtttgacgtgtaccagcgcggtggaaatcatgaagaaaattaaaaagggagatttctcctttgaaggagaagcctggaagaatgtatcccaagaggctaaagatttgatccaaggacttctcacagtagatccaaacaaaaggcttaaaatgtctggcttgaggtacaatgaatggctacaagatggaagtcagctgtcctccaatcctctgatgactccggatattctaggatcttccggagctgccgtgcatacctgtgtgaaagcaaccttccacgcctttaacaaatacaagagagaggggttttgccttcagaatgttgataaggcccctttggctaagagaagaaaaatgaaaaagactagcaccagtaccgagacgcgcagcagttccagtgagagttcccattcttcttcctctcattctcacggtaaaactacacccaccaagacactgcagcccagcaatcctgccgacagcaataacccggagaccctcttccagttctcggactcagtagcttaggcatggtaggagtgtatcagtgatccattgcacctttattccctcagcatatgcctgaggcgatcttttatgcttttaaaaatgtttcccgttggtctcattggaatctgcctcctaatgatttttttcaggaaaacctgtttggttatcctcattcaaaagcactggacagagaatgttactgtgaatagagcacatattactctttttagcaacctagcatgatgccaacaagactattcttgaaagagcaaaggttcctgtaaatttaattagggctagatttgagctgcttgtaagtcacaggttttccagatgtctgccaacaagaaatgactcatactgtgatgataccttttgctttgccttgtggacaatgtgggtttttgaaatttgcacccttcaaacaatgatttatcagagaaaggggtctgttttcaaaaaagattctgtaatgaattttatgtgtggcatatacttatttcttgagagaagattttaacttattgtttttattttatggttacatatgatgataacctgctattattaaactttttctaaaaagtgaaaaaaaaaaaaaaagatataagaactcaaggtcccatactctgtattcgggatccatctgagatgcatgctaagctatgtgtatgtttttaattttgcactgctctttcctggcaatttgttttaatggttattgcagaatattaaggtacatgtctctctgttttaagtaatattgcactttataaaaaagtatgaataaagcaaactattttataaagtgcactgtttaaagcatttgcactgtatttttgccatttattttcattttctactttaaatttgtcctcacattcctcttctactttgtatgcaacaagtagaatggggcatgttgtgtcatgtagtcagccacttatgcaccaatgtgaggaaaacctaaagggaaattaaactaaacactgtgcttcatatttgtacactgtgttgtactacagtgaggaatttcctcctgtagtcatatattatgtacataatattttagaatcatacctatgacttgtttggaaatttttctgttaaattttaaatccagaaagcatattttataaacttatgcagagcacttttattgctcaaaagttctgaattcatacagaaaacaagtactatgtgatgaaaacatttcattaaaagattgctgcatttaaaaatacaattaattcgttccctatgcaaaaaaaaaaaaaaaaaaaaaagaagtgatagggtttgtgtgttatattttcttttaaagccatcatgtgaaatgtcaggactgagaaaagtgatttttttgctttgtttacaggaatcatgcttaaagagataatgcccaacatgtttattttatagtttttgttaatgataaccttttgagcattagtttggaatttggacatgatatttatttattcctttcttgaggttatagcagcattaatttcaaccagttatgaatactaaaaatattgcactctatgtaatagtagtatatttattactaaatcaatgtatatattaatagcacaggcaaaaaatggcaaatattaaaatattttcaaaatattatattatcctgttcacattttgtccacagtggttattgggaataatattttacactttttgctggcccaaatggctacataatattgagttaatgaaagttttctactcccagctttcagttattcctagtaattatgggaaattttgtgtgaattattaccaaactattgctaattcacaaaatgtgattccatcaggcacagatctctagtaatcaagaaaatgaccatatttataattatattggacatattgggaacatatttggctcttcaagccattttttaaactgtgcatcctggtagaaaatactagttataaagtacaaactaaagggactatgttgctaatagaaaatgatccagaaaaatggtcagacagtatacagattgatgatgtgattgatttcattgtgaatattggaaattaatgggtttcattttcatttatttcccttgcctcttcttgaggaggattcgacaggcgatgaaatgggtaaaaaggcagtcagactaacaggaagaaggaaagataggctagctgtcaactgatgagcctgcctgaataatctcaaatgggcttttgaaaagaccttaacaaacactgttgcactcttgtcaaatatctttatctacaccctacttataagtaccaaaaagacagcatttgatgccaagtttgaagcagttaggtcctatgcaggctgtgtattaacatacagtgaattgcactttaaaattcagaaagctttcatttggtcacatcaaaaataaacactacaaaatatataaaaagttaaatgataggactctttttttggtattaagagtaaaatagaagaagatctaagaaatacaaatacttacattatttctccttatgacattaactttgggactagagccacaccaccccctcccttcttcacttactgattgtattgcatataattttcatgccaacataaatcctgattcatatattttgtaactgtatatgacaaattgagaggcaagaataagaaaaggaagataatagaggaaagatgttaagaaagaccagtttcttctaattactctgccagatcgtgtgtctgaaagaggttaattagcattttgaaattgattggctgagtgtggtggctcaggcctgtaatccttgtgctttgggagtataagactggagaatcacttgaaaccaggagttagagaccaacctgggcaacatagtgagacactgtctctccaaaaataaaaataaaaattagctgagcatggtggctcatgggaggccaacatgtggaggatcgcttgagcccaggagttcgaggctgcagtgagctgtgatcacaccactgcactccagcctgggcaacagagcgagaccctgtcttaagaaaaaaagaaattcattaattcttccaaacctttataaagtaagaaaccactgaattactagaatagaaagtcagtctcctgagttaatttccacattgttgtctgtcttggagtcacaggttcattacccaagaaaactgccttttaatttttttagattactgttgatttcttaagtatgtaaatgactaacttttaaatataaggtaagttattttaaagaaatctactaagatagaagtcactttttttaaagtaaggaaattccttttgtatctcagtttatgttctcaaatacactactttataaaagtatacaattgactggatacttattcaccttgcccccatttcaagcgcctgttattgtcatatttattaaaaacagggtacctcataatggtgaaaatttctaaattattgggtctatatgtgccttagactgcctgattactttggctgttctcccagtgactgataataatagcatgatttgagtgttcatgtgagaatacatctaatattccttaagatctaagtaaataagttaaattctgatatgccacttatgtcaaaataattgttatatagatgaattattactgtaacatcatgaagtatcttaaaattatatgacttttggcctctcaaatgtcttacatgataataccccaatttccagtctttaattgattgtatacctcacgtaagtgtctgtcatcacttgatacctgtatctggcactaaaacaaatgtagccggctctaatgaaatttgaagtttggataggagacattgtaaaactcaagaatgggaaaaaaaaattttaacagaagtatgtatgaaggaaatattttaagtataatctacccaaagaaaataactgctacagccaacattaaaggttttattccctgttttgttaagtaacttcactccaaattgtgacattctttagagaaaatattttccttaagagtagttatttacgtgttttattgggggagcatattttcaggggggcaacatcttgctaagaacatttgattagcctcacttctgtcctcaccttctatattgcttacttttcaagatatttcttctgagcccttttctttgtatgcccagctccctgttatgtaattaagtagttgattaccattccaaatgcttcccctacacaaggctgttgtccaccctgtttcatgaatttgtgaattaagtaggtgcctaatattttcctactattagggtgaaaaggaataagaaactaaagtggcttccaaatgtttgtgtcttggtttcttcaccctagtgcaaaataggaaatgtttattggcagtcatttcttttccattactccttttaaccacattacaaaaagctaggattttgtgtctagaaggagacttgtattaaaagacaagattcttagtagttattcatcaggcttaagtttcctggtgtatttcttgtgggagaggtagaaggacattttgtagtagtattctaactattaatataatgctgcttgggttatcagaaagtattgaatacttcagataagtcaagttagtatttagtatagcagctgttcttcagagcacaggaaactgggatagtatgtagtattatgctgtttccattattgtttctcattgcataacacttttaatttatatgttggtatacaatttgcccctttactaaaaaaaaaaatctagtttcattcttgttccttgccacattaagcagttttttcatttacgttttaaattttcttaatattagaagaaaaagaaaacagaacaaaagagaaatgtcatgacttagaaaaggaaattttaagttttatggaatactgtagctttattttctgacatttctgcttatagatagattagaaaatccttgtttcttttgtttgctttgttttaaaatccagtaaggttgaggaacttgacattttaaaactgcagttttatttttaactacataagaggctggtcatgtgaaatgtgcactgctatgttggaatggatatgtatgtgacaattaacctcattaaagctctgttgctgtggtaggcattcagttattcctaatagtttattttaggtactatactgctatcctatttgctgaaattataaatactagcaatgtacaataattctcattctttggctgaataaaaacagaaatttaaaggtgctgtgtcacataaacagttaatgcctcagtactaaagttttgaaaaatattcctaaaaacttcacaggcatgaatttttgaaaagaagaagaaaccacatatacacatagaggaatttttaaagactggcattttaaagtatagctggtaaaaatggtatgtatccttatgtgtagaatttaaacttcttgaaaataatctaagctgcaacaatctatgtaactgctcttccacagttttacataaagataagaatttgtcttactaaaaggtaaatggaagattaaaaaagatgaaaaacattgtttttcctctattctatgtggacaattaaaagtatagccaagcctcagctcaaatgagttgcctttgtgtgagacagggtctcactctgtcaccctggccggagtgcagtggcgtgatcacagctcactgcaacctccacctcctgggctcaagcaatccttgtacctcagcctcctaagcagctgactaagtagactacaggcatgagccaccatgcccagctaatttttttttaatagctacaaggtatcagtatggtgcccaggctagtctcaaactcctggcttcaagcaatcctcccgcctcagcctcccagctttgcccagccgtgagttgctttgtgagttgtcttccttaactgcatcagttcatcccatactccgtacatgcactttttctcgtatttttctgcttttctatggtgtgtccacactcatttgtgtatttctacactggtatttcactacttattaagatatctgcatgtggacctacatttataaattgtaattccgttcagagaaataagaacttgattgggacagagctgggaaatgtttgtgatgaaaattattaggaataaggaaataatgatgctgtgtgagaaagcaagtagacttaaattctgagatagaaacatctgcaatcaacatagagaaggctactttacaaaaatgttatttcagtgcccgtatggacaaatctctttaaaaggctttgtctactgtgtacataaaggaacttataagcttcataaagtgcttatttttctctaggaagcccatgtgatagctctctcctctgttttcccactccttccccagcttttcctgctgcccactgctccaaacactgacatccagtggccagagaccagtccaaatggagcactaaaactacatatagatagtgatcatattgtttaaaatgttattgcaacatggtgtgtaaagtgcacaggtctgaaatatacagctcaataaatgtttacatatatatgcgcccatataaccatcattcagatcaagatgaggctcccagtcagtcctcatacataaccaccactctgacctctgtcactgttgttgacattcctatacatggaattatccagtctataggtttttgtgtctggtttaatttgatcagcattatgtctgtgaaatgcatctatgttgttgcatgtagcaataacagtagtttgttctttttcgttgctctgtagtattccatcagataaatacatcacaatttatccattctcccactgatagacattttggttgtttgtaatttttagcttttgtgtttaaagcagccataagcattcttgtgcatatattttaatggacacgtacactcatttctcttgtgtgtccacttaaaagtgaaacagctggctgcagtgagccttgatcgcaccactacattccatcctgggcgatagagtgagaccctgtctcaaaaaaacagacaaaaaaaaggagtgaaactactgagtcataagatgaatatatatttagctgtagaagatattaccaaatggttttcaacaatggttgtaccaatttacatacccaccaataatgtgtaagtgttctagttcttccacatcctcatcagtgcttggtaccatcagccctagtagtttagccactctgacaaatgtgtatatttgattgtggttttaaccattctggtgattttgtatttcactgagattttaaggtgtattttcctgataagtagtgatgtgtggaacacctttttatatttttattagtcatttggctatcctcaattaagtgcctgttcaagtcatttgttcatatttattgggttgtctttttttcttactgacttgcaggagtcttttatattttatggatatgagggtttttgtctgatattttaccataaatgtcttctctttagtttgcttttctactttctaagtgctttcctttgatgaccaaaaattttatgaagtccaatataccagtcttttatttaattgctaatacttttgcgtcgtatttaataaatgttcacaccaaggttatgaagatattcttatattcttctaaaagctttattggccgggtgaggtggctcatgcctgtaatcctagtgctttgggaggccaagccaggtggatcactggaggtcaggagttggagaccagcctggccaacatggtgaaaccccatctctactaaaagtataaaaattagccaggcatggtggtgcatgcctgtaatcccagctacgtgggaggctgaggcaggagaatcgcttgaacccaggaggcagaggttgcagtgagccaaggtcatgccactacactctagcctaggcaacagagcgagactctgtctcaaaaaataaaactaaaagctttattgttttaccatccacattaggtttacagtccatctactgctgatatttgtatatgatgtgaaatagtagccaaagtttatgtatttccatatgagtattaacttgacccagcacaatgtattgaaaagctgagttgtaatttttatgaagtcttcatatctggtagtgtaagacctctaacttttatctaatagttctaatagttttggctattcttaatcctttgcatttccatatacattttagaatcaccttgttagttttgggggcagaggatgttagggtttaattggtattgcattgaatgtataaatcaatttcaggagaaattatatcttaccaattttgagttttccaatgcatggacatggtatatccctctatttacttaggtatttaatttgtctcaccagtgttttatagatttacatgtagaggttagatttatatctaggtttttgacagttttactttattatcaaattgtttttaattagtttatagaaatatagtttttttggtatattaccctttcacttagaaaccttgttaaattcactttttaattctaatctgtatattattttagatttctttaagtctacagttatatcgtctgtaaataatgacagtttcatttctgccttttcaatttttatttttcttgccttattgagctgatcaggacctccaataacatgctaaatgaagtaatgacaatggactccttaaacttcttcaactcagaataagaattcaatatttttctattctatatatatatatttttttcttttcttttcttttttttttttttttttttttttttttgagacggagtctcgctctgccacccaggctggagtgcagtggctcaatctcagctcactgcaacctccacctcccaggttcaagtgattcttctgcctcagtctcccgggtggctgggaccacaggcatgcaccaccaccctcagctaatttttgtattattagtagagatggggtttcaccatattggccagactggcctcgaattcctgacctcgtgatccacccgcctcagcctcccaaagtgctgagattacaggcatgagccacctcacccagcccaatattatgttttatttaatttttttatagatatcatatagcagattgttttatttctaattttcagagagtttttactaaatgctttttctgcctctgttgagataatcttgtatttttcttctttattcttcaattttcaaatgctgaaaatagaataaattccattttcatgatgtattgcccttttcatatatcaatggatatagtttgctaatattttgcctaagatttttggatcataaggaggatagacctagactgggtgtggtatctcacacctgtaatcccaacactttgggaggccaagaggaaggattgctttagcccaggagttggagaccagcctgggcaacatagagagacctcatctctacaaaagattaattagccaaggatggtggtgcacacctgtagtaccaaatacctgggaggctgaggtgggagaatcacttgagtccaggaagcagaagttgcagtgaaccaagattgtaccactgtactcccacctgggcaacagagcaggagcctagcattaaaaaaagaagaagaagaagaagaagaaggaggaggaggaggaggaggaggaagaagaaggacagacctgtaatttttctgtctttaatatttttgtcaagttttggtatcaagattattctggcctcataaaaaaaaagttggagatgtgttccctttttttctacactctggaagagtttgcacctgatattattcctcctgtttaaaataattcaccattgaagccacttgaatgagaagttttctttgtgggaaagttgtcattaattggaatatatcttgtctacttacagttaatgtaattattattggttttaagtctaccatcttacaatttcttttacatttttgtcctatatcctcttggttcctgtattgtgtcttcttttgataaaccaaatattttcttttgtccattgtttcctcctatgttagttcgttagtaatttttagaaattcatttagtaccttaaagattacagcttgtatctttgacttgctgccttaaattggtacattaccacttcccaacaatgcaggaattttatgacagtttaaatctgttttccccttttttttttttttttttgagatggagtctttgtcgccaggctgcagtgcagtggcacgatcttggctcactgcaacctctgattccctggttcaagcgattctcctgcctcagcctcccgagtagctgggattacagacacaagccagcacacccagctaatttttgtatttttagtagagacggggtttcaccatgttggccaggatggtctagatctcctgacctcgtgatctgcccacctcagcctcccaaagtgctgggattacaggtattcccccttcttccttttatgttattgttgtcatgtattttacttctacattctatgtatgttttatctctatatatgtgttttagacttcataagacattatttttttttttttgagacagagtctcgctctgtcgcccaggctggagtgcagtggcgggatctcggctcactgcaagctccgcctcccgggttcatgccattctcctgcctcagcctcccaagtagctggggctacaggcgcctgccactacgcccggctaattttttgtatttttagtagagatggggtttcaccgttttagccgggatggtctcgatctcctgacctcgtgatccgcccgcctcggcctcccaaagtgctgggattacaggcgtgagccaccgcgcccggccgacattatttttattagtagtactactactatatattttaaagactctggctgggcactgtggctcacgcctgtaatcccagcactttgcgaggccaaggcaggtggatcacctgaggtcaggagttcgagaccagcctggctaacatggtgaaaccccgtttctactaaaaatacaaaaaatgagccaggagtggtagtgcatgcctgtaatcctagctacttgggaggctgaggcaggagaaacgcttgaacccggaagagggaggttgcagtgagccaaggtcgcaccattgcactccagattgggcaacaagagcgaaactccatctcaaaaaaaaaaaaaaaaaaatagactctatattgtttgtttgctcacatatttatgttttctggtgtttttctttccatcctgccttttttacttccatctgggattacttttcttcatctggagaattctctttagtatttattttagtgccagtcttctgacaatgaattctctcagcttttgttttttgaaaccttctttcttttgcctttatttttctgtatttttatttttttaagataaaattcatgtatcatgtaatatacccatctaatcattccattcagatacaattcaatgttacctttatttttgaaggatatttttgccttgtatgaaatactaggttcaccattttattttattttatttttgagaccaagtctcactctgtcacccaggctggagtgcagtggcacaatcttggctcactgcaacctccacctcctaggttcaagtgattcttgtgtctcagcctcccaggtagctgggattacaggcatgcaccaccacgcctggctaatttttgtgtttttagtagagatggggcttcaccacattagcgaggctggtctcaaactcctgacctcaagtgatctgcccacctcggcctcccaaagtgctgggattacaggtgtgagctactggcgcccagcctaggttcaccattttcaagatatcattccaatccttaagttctgtggaaaaagccattagttatatttcctttgaaggtaatgtgtcttttttctgtggtcacttttaagattttctcttcgtctttgtttttattttttattatacttttaagttctgggttacatgtgcagaacgtgcaggtttgttacataggtatacacgtgccctggtggtttgctgcacccatcaacctgtcaccaaattaggtatttctcctaatgttatccctcccctagcccccaaccccccgacaggccccagcgtgtgatgttcccctccctgtttccatgtgttctcattgttcaactcccacttatgagtgagaacatgcggtgtttagttttctgatcttttgatagtttgctgagaatgatggtttccagcttcatccatcctaagattggtaaacttcctgaatctgttggttgatgtccttccttattagaattcttaaccagtcattcttcaaatagttttttccaatccgttttctctctcccgttttctaggattgtgtgttatactatgttccatatgtctgttatagtcctttgtttgccatcttaatttctccctgtacttcaatctgtatagtttttactgacctaattaacttatcctgttctgctgagcctaatcaattttaaatttagttgtatatcttatattttggattctaaaatatccatgacacttttttgtaggtgccaagtctctgatcatatcttgtcttttcctctatattcttgaacacattaatcaaagtaattttaaaactcttgtctgagaaatccagtgtctgattactactactagttgtttgtttccattgtctgttgtcagtcatttggtgctgttttttagcatgccttataagtttggtgaaatgtcatacattgtgtgttaaatactgtaggggctttgaacgatgttatcttcctctaagatggttatgttttcttcttgcagtctgataaaatacaggcatatcactgtaatcctattgaaggttggttttagactttgttgggcttgtacatttcagttttgctcttactcctagcatatggcctctttgggctctcatctgaaaatctagggtgtttatcagggccacttcacctcggtgaccttgaattccaacctttccctcctcagtactaagagctgctcagctcgttagcctctcatctgctgctttttgctggatttcttgaagtctcaccttgttgcacaggagtctgcaattggcagacacctcaaggagatactgtaccagtatttcaggctcacttccctgaggtttcttcgctctgggattttgccccttaagtcctagctactttcccaagctccaacttttgtctcttcaaccaagtgggattactgcttgctgctaggtatttatttccctgtgttgtgaatttgcagtgccttgaagaagtaatcaaaatgaacacagagctcaccaaagtgtgcttcccttttttccctcctttcagctattttattgcagctcgtcaagttctccctgcattggtttgctccctgttgcctataaaagatgttctacttaacccttttcctgtttgccccaagaatacttgccagcagcacttgctgctgcagtatttaccccaagataactttgccacgaactctcgcttttattattactttcgtttagctctagtatattgacttcagaaaaaaaggacatcgttctctttatagcattctgttcttagtagtggtatttccatttacaaagtataataattctcgatcgctgaaaatgtcgaatcctagaaaatgtagcattcctacacgtgatgttaacatcattctcgaacagttcttggacagagatttatttaatgaattcgatttttctgaaatagatgattttgatgattcagatgcttctgatactagatctgtttagaaataacatcaagaacagtttttatattttattttcacattgaaaatcagtcagatttgctttagcctcaaagaatgtgtttacgtaaaattaaatgaatgctggcagtgagctgtactttttttttctaaaccggaaaagggttaatatagctttcatcgttgttttcagtaggagggctagtccaatcacaagctactctattgtggccaaaagcaaaaatctggtggtaatcatttttaatcgccattgttgatttctccgcagtggcttctggcattgataacttggttgtcacatggtcatatgtgaaggcacccggtttattcatttgttcctttgtccattaaatagtttttgagcacttctttcaggccaggtattactctagacacaagcaatataacaatatttaagataagatctgtgtcactttggcacttgcagcctgtttttatagaaaggctactaaatggttgccgagtcggacttgtggtaattaaaatagacttttcttgtgtgggggttgggagtgagaaaaaagagactggaatcttttagatgattacatcttctttatataaatatttttagccttttgaaaaaactctgtagagcttaatgcagttcacagttcacccacactacatcaatatttggcctaccttttgcaagcccaattccctaactatgagtttctgtgttacataaaaatctcaccgggagcacaattatttgacaatttgagttgaaactccaggaactgatttatggagaacaaacttagctctgaaattatgtctctttatgaatatcgacatgaaatctgatgaagaatcatcctactgtggtttcccattttaacttctgtttttgaaaaacatttcagatgcaactaagcacttattaaatgcttcgtgataccaaaaaatggcttggtggtctttgtcttccagaatagcataaatttcagtgttaccaagataaaaatataatctgggcacatgtcactgttaaaatattatagtcagatcaaggattctattcctgtctttgttattctttcccacttttgaaactttatccagtggatttttttttattacaaagacgtattccagagataacagtttgtacttctgattatgatccatgttcatgtgatcaaaaggcagcaataataggacactgtcatatatggtagctccatagaaactaggctgcactgggaggacagattcgccatcttgagcacctgtggcttggtattctcgaaattgtagcccctttggaatggctgaagaactaccagttaaaggtaaagaaaccagacacacaaggccacgtattgtatgattccacttacatgaaatgtccagaatgggcaaatccatagagacagaaagattagtgtttttcaggggctggtgggagggggaaatagggagtgacaatgtatacaggtgatggggttttggggtgatcaaaatgttctggaattaggtagtggtaatggttgcaagacattgtaaatgtagtaaaaaacaatgaatggtacacttaaaatgaattttatcttatattttaaaaaatcacacacaggccgtgcacagtggctcacgcctgtgatcccagcactttgggaggccgagacgggtggatcacctgaggtcaggagttggagaacagcctgaccaaaagggagaaactccatctctaataaaatacaaaaattagccgggcgtggtagcgcatgcctgtaatcccagctacttgagaggctgaggcaggagaatcactttaacccgggaggcagaggttgcagtgagcctagatcgcaccattgcactccagcctgggcaacaagagtgaaactccgtctcaaaaaaaaaaaaaaaaaaaatcacgcatagctagaaaggctgtagctagtttgaggaagtcagtactaacacctggctattcagagaatgccatcctgcccccctttctttggcatcaactctgaagcatagttatgttatggttggaaaatcttttctaactagagattaagctcttggggacaaagtaaacttgcctcttacaggaaacaccaaagttccagcttaacagagaaagggaacctccttgggaatcatacttttcccattattgggtagtgctcggacagatgtcaaagtgctgtatgtttccatggtgatcatatccagcttatcattacttgtatctttgccctaaagtttaatttcttactttgggactcattataataatgggagcaccggccttttgggaggccaaggcgggtggatcacgtgaggtcaggagtttgagagcagcctggccaacatggcgaaacgctgtctctactcacgcctgtaatcccagcactttgggaggctgaggcgggcggatcacgaggtcaggagatcgagaccatcctggctaacacggtgaaaccccgtctttactaaaaatacaaaaaattagccgggcgtggtggcggatgactgtagtcccagctgctcgggaggctgaggcagaagaatggcgtgaacctaggaggcagagcttgcagtgagccgagatcgcgccactgcactccagcctgggcaacagagcaagactctgtctcaaaaaaaaaaaaatacaaaaattagctgggcgtggtggtgggtgcctgtgggcccagctacttgggaggctgaggcaggatactctcttgaacccaggaagcagaggttgcagtgagccgagatcacgccattgcactccagcctaagcgacagagtgaaactccgtctcaaaaaaataaaaaataaaaaataatgtaagtaccaggcctttgtttgagttcagtttttctttggtgagcacttttctaaaatctctctcatcttacctatgttaactttgtctcagaagcaggctcatttgtgcagttagctgaaatatttattcagaaagtcatttatagcagttgtcttttcatcaaacataatacctttaaaatagcagaaaattaatgccattcatgattttgccattttactaagtagtcagaagctatgtctcccttagccccatcatatacatttgaaatatctttatcctagataatctgtattcatttgaatgcaaaagttttatcaatatgagtgaacttatacatctttttattcgctgatggagatatcacttgaaactttgttcctggcaaagcaaagagatgaaatgtattgaaaaaaatcgattagacttttaaaacttcaaaatacttttatagaaaatgtaaataagattgtttctaactgcagagtgttttacataaaatctttatgtgaagaatttatattgcagtacaataaagtcagtgctttttatatgttttgaatggtaaacattttgaaggtattttttgaagtaactaggtattgacattttttaataatatattttgaataaagcacacctaaaatgcatgaacttgtgtaagtatttggcatcattagtctagttgtacatatttttaaaaataagaatgggcttagaagataatgtatttgtagtaagtatagtatattttttactgagtgagtctgatacgtcttttagatatttgagtaaagtctactgttaaagtattccagatttttaaattccagtgtccttgctgtggaatctagtgttggctttctgatgtcagaataatcaaaccctgctcatatacacatccagaaaactttttctaatgatgatacatttagcaaaatcgcaagtctttaaaaattctagttaaatagacttacttgagacaagtgtacattgtgaaatctaaaataaaaatttgtgactatataatacataatcttcattatgtaggctatttctaaaaacttagtttctgtgctgatttcatgttaagtttttcaaacgttagcagattataatggctacagtaagttttgttctaaatctggtagccatttattattaaatgattaatgattaaacattaatcatttaataattacttaggaattataaattacaatgtcaaatcttcatacatcaggctccttgcactataattacttaaaattagtttgcatcaatagtctatataaacagatatcttagtttagaggaaaaaatattctattttctaggtactttaatagtttggtcttgtgaaaattacataggtgtgtgtttatgtatgtgtatacacacatgtattgggggcttacaataccaaattaataagactgcccctcactccttaaatcgactatctgccctgccagtaatcccccacctgtactggtatatacagagttttctctggtacaaatgattaatcaagaaaaagggtgtgaaatatttgtgttcgtttctttttaaatgaataatgggatacacataaactagtaacaccacattgatttcctaaagacctaatacagctttaagagggaataacattccagagctccaggattattttaatttagctttcaagatggttacgattttgatttaatatagagacttcatagtgttaaattttagggtttttttttttttttttgtatttttagtagagatggggtttcaccatgttggtcaggctggtctcgaactcctgccctgatgatctgcctgcctcggcctcccaaagtgctgggattacaggcgtgagccactgtgcccaacctaaattttaggtatttaaaacatccattgatgctttgttttgtttttgggttttttttttattgttgttacttaagggatgcatcttatttatttggttgacttttatctagacatcataaatgtgatgcttacttttttattagccacttcattgttgatgtcttaatgggagatcttagtttgatgaatctactctttgaaattttagtttgattagtcatttgtttctgctaggttttggcttttgttttgttttttgagtgataacctaagaagtttctacagtggaaaatatcattatgacatcttcatcccttataaagttgtttcatttagaggaatttttcaaagcctatgttgagaaatgggcaaattaagtaaagcatcataacaattttttttatagtgaactcattttatttatagaacggcaaacacattcactctttttgctaacatccggggcttttttcattgtgactgctttgcacacttaaaaatgtttctcccaggccgggcacggtggttcatgcctgtaatcccagcactttgggaggccgaggcgggcggatcacaaggtcaggagattgagaccatcctggctaacatggtgaaaccctgtctctactaaaaatacaacaaaaattagccgggcgtggtggcaggcgcctgtagtcccagctactggggaggctgagacaggagaatggcatgaacccgggaggcggagcttgtagtgagccgagatcgcgccactgcactccagcctgggcgacagagcaagactctgtctcaaaaaaaaaaaaaaaaaaaaagtttctcccagcaaaggctaactggaatttatttttgtttaaagacaaatacttttaatgtggataaaataaaagttggaagtatgcctttcatgtggcaaactggaaattagtggttagtactccattgcagcattaaataccaattctttacaatagggtgcacatatcagatgctgtttttcccttaacctttgcacttttcattgaaaatgttttcaaatcaaatcttgttttattgggtttcacatgattggactaatacttacatatatgcttctttttaaggtatttagacattgacaattagttatttccttatgagccatagctttgaaaaaccattttagaagaaatttccattttttaaacaaaagtgttgggaggccgaggcgggcagatcacgaggtcgagaccatcctggctaacatggtgaaaccccgtctctaataaaaatacaaaaaattagccaggcatggtggtgggcacctgtagtcccaggtacttgggaggctgaggcaggagaatggcgtgaacccgggaagcagaacttgcagtgagccaagatcgcaccacaccactgcactccagcctgggcgacagagcgagactccgtcttaaaaaaaaaaaaaaaaaaaaaaaagtgattttttaaagaaaagataccgataatttgtctttgctgtagatgaatgccacgtttttatatactaggactattactgaataatactgtttatttctttagatcaacgaatatattaaattctgtcttttttgttcaaataaacgctgtgagatgattgggaaggctgtgtgttgaagttagatgcaaagttggaccttgtacagtgagcctcttgtgagaactgagccatgaaagataaagcctgtcattcatgtctgccttggcctgtgcccagctttattagtaaaaaccattcagtttttactaatgatatctaccagtatctaaagagaaataccttcatcctctagaagaaaacaaggttacccaaagagctcacttaattccttcctttttccctgaacccttggttttaagtgaagagtaaaatgtactagatatgacactctctctgagtattactgaggattttgtggaaaaggcagtttggtactttatttccagcttagctgcagacttggtgaccctgagcaaatcactcagcctccctttgcctccatttcttcatctgtaaaatggggttaacctgtgcctccctgtctcaccagcatactgagggatcgattaaagaggattaaaaaaatccataaggtacactgattccaaagatgggtagaatgatatttaataatgaagactttctgttatatagcaatttaattttaaaagtatctttaccaggccaggtgcggtggctcactcctgtaatcccagcactttgggaggctgaggagggtggatcacgaggtcaggagatcaagaccatcctggctaacacggtgaaaccccgtctctactaaaagtacaaaaaaattagccaggcatggtgatgagcgcctgtagtcccagctactcacgaggctgaggcaggagaatggcatgaacccgggaggcggagcttgcagtgagccgagatcacgccactgcactccagcctggggggcagagtgagactctgtctcaaaaaaaaaataaaataaaagtatctttacccacttctctgtagtgaatattgactagcattttgaagtaggaactaacaaagtataaaattaagtagattttttatatttatgggtattgttctagtacaaatttatggtgtacactgtcggtctgagtgtgggtttaaaatatatcattgtgcttggctaatttgtagaatgtcttatttgaattgacttcatttatttcagaggaatgcatagatgatcagatcaaactgtcgtcatagcagtgttttcagcacatacgagaatcttagagtttaggagccttagagctcacccagtgcaatttcctgccggaagcagattccttcctggtgacctcaccaacaggtgcttgtgcagccttttcctgaaaactttttgggaaagtgggggctgctacctcactactttgatgtgtaccttttgttcaagaactttctaaaacttggagctaatcatgggttatttcagaagatgtaagcattttaagttttttattgaattccatccttatttaaaaggcctggttatgtaatattttctgttttttttttttttttttgtatggtttcccacattgattaggttgttttcttcattttcttaatagattaaaaatactttcttctctttctatttgtgtcttcttccatttagtatttatgggagggagcaagaagggaaaggatgtctatttttaaaattgactacaatcatgactgttcttcttgtcattctgtagcagctggatttattaccatctcttatttaaaggtccttcagaacacgttgaagcagttcatttcaggtcaatggctggtaagcaatgtcaggacctctggggaaggagaagctgacgggatcccagaggaaagaattgaggttgtttgctcccttgtagaaagcccacagatcccttcccagactagaaaaaaagtgccagagtgtcctgaaactttccttctaaggcacatacttcaaagagactggggattcctttgttttaaatataggtggggtctcacagtgttgcccaggctgggctcaagcgatcctgccacctgggcctcccaaagtgatgggattacaggcatgagccaccatgcacggccatggagattctaatgtggtgccagctgccaggtaagaaagctgtgagacaatgtgttgattttcctttactacgtcaggtttgaggacatcatctagcatcaacgggtaacgtcaccctttgttccatctttgggaaataatagtagtagcttgttactgttagctgacccctacattagcatcaataaagtaaatccctttaactttccttttggcctttcctttctctctctctgcctccccaccagccccgactctctcctgtgtgcgtacacatccacacacacctccatggtattccttctttctcccacctaagggaagctgtgcccgatcttgctgcagtccaggtcaccgtactgagatgagtcagccacagactctaaacactagcagcgattagccgtatgtagccaccaagtgcactgttttagacaggtttacacagctctttgctgtccactcatatcagctgtgtagtagcccaaggcagcctgtcaggcagaagaattaccaaccaaagtggatctattcataagataaaagatccggagtccgtgccctcttaaaaaacttttgtcttcagacatatgggtgcgtgttcatctctggccaaaactttgtttccagtttcaaagggctggttgcgaaggtggccttgtaacctttctgttgccggctctgttagttgcctgataagcagtagctaattcatcctcctcagaatttgagagtggcatctattagattcagaccaccaaggtgcctgcgcgggctctcctggttacgactgagtccccttttctcatctgtggggtgaacgcttctatttgcagaaatttgcttgcatctttttccttttatttattattactttttagagatgcggccttgctctgttgcccaggctggagtgcggtggactcttttcttttgttgatctttgccatcctctgcctggcttaatgaggttctttccctgcgtatttatgtcccaggagctcaccttccccctaggtttttaagaaggaagcagaaaatgttacaaagtataagggattctatgaagtccatagataggatttgctttgggagtagatgatttcttcttattttggtgtaaacatcaatttggatggcaattagaatgtctttagcctctttaaaaagcccttctggggcaaacctttgcaagtcactcagctggcatgtaatgagatttttatttgcatggctttttttttctaagtctctctagaagaacataaggacattctgaacatgcaaggaatacagttattctcacatcaaggatcaattttattttgtatcttcattttatgtcattttcctttattttattcacattaatctagcattaattccccccagagggaatgatatttttggttgctgccacctgtgttattaagtgacagcttttctttatctgcttttctgaatttcatatttatatactttattgtagttttttaaaatctattctagctgggctagaatcttccaagtattaattcataatgaacttccctcttctggaattgtttaggagggctaatgttccatgttcccttcgttgctatagatatgaagttatttcgatgttctttgagtgctttattatagcgataactggtactgcctttgattaaaggtgagctatatggagttaagcatttttatactagtaactatttattgagaattttcagaattctatagctacttgtctttaacagttataagaggcatgtatttttttttccttcatggtctggaagttagttttctctttgtttgggtagatcggaatgagttgttgagctgtgttgaaaacacacatgaatcaaaaaagcagatgtattgtagaaatgtgatgttttcatgtttcgggaatttgaccggaaagctttatgtatgggttttatttttaacaaagcagtaagggcttactttttaccaacttgtgtgtgtgtaaagatgtatttgttcaagctttaagaataaacctgtcaatgtacaaatgcctg

SEQ ID NO: 176898 - DNA, 2547 bp, Homo sapiens
  Payload ID: 14714
  Gene Symbol: RPS6KA6
  Gene Name: ribosomal protein S6 kinase, 90kDa, polypeptide 6
  Uniprot ID: Q9UK32
  ENST ID: ENST00000262752
  CDS Start-End: 9-2246
aaggggagatgctaccattcgctcctcaggacgagccctgggaccgagaaatggaagtgttcagcggcggcggcgcgagcagcggcgaggtaaatggtcttaaaatggttgatgagccaatggaagagggagaagcagattcttgtcatgatgaaggagttgttaaagaaatccctattactcatcatgttaaggaaggctatgagaaagcagatcctgcacagtttgagttgctcaaggttcttggtcaggggtcatttggaaaggtttttcttgttagaaagaagaccggtcctgatgctgggcagctctatgcaatgaaggtgttaaaaaaagcctctttaaaagttcgagacagagttcggacaaagatggagagggatatactggtggaagtaaatcatccatttattgtcaaattgcactatgcctttcagactgaagggaaactgtacttaatactggattttctcaggggaggagatgttttcacaagattatccaaagaggttctgtttacagaggaagatgtgaaattctacctcgcagaactggcccttgctttggatcatctgcaccaattaggaattgtttatagagacctgaagccagaaaacattttgcttgatgaaataggacatatcaaattaacagattttggactcagcaaggagtcagtagatcaagaaaagaaggcttactcattttgtggtacagtagagtatatggctcctgaagtagtaaataggagaggccattcccagagtgctgattggtggtcatatggtgttcttatgtttgaaatgcttactggtactctgccatttcaaggtaaagacagaaatgagaccatgaatatgatattaaaagcaaaacttggaatgcctcaatttcttagtgctgaagcacaaagtcttctaaggatgttattcaaaaggaatccagcaaatagattgggatcagaaggagttgaagaaatcaaaagacatctgttttttgcaaatattgactgggataaattatataaaagagaagttcaacctcctttcaaacctgcttctggaaaaccagatgatactttttgttttgatcctgaatttactgcaaaaacacctaaagattctcccggtttgccagccagtgcaaatgctcatcagctcttcaaaggattcagctttgttgcaacttctattgcagaagaatataaaatcactcctatcacaagtgcaaatgtattaccaattgttcagataaatggaaatgctgcacaatttggtgaagtatatgaattgaaggaggatattggtgttggctcctactctgtttgcaagcgatgcatacatgcaactaccaacatggaatttgcagtgaagatcattgacaaaagtaagcgagacccttcagaagagattgaaatattgatgcgctatggacaacatcccaacattattactttgaaggatgtctttgatgatggtagatatgtttaccttgttacggatttaatgaaaggaggagagttacttgaccgtattctcaaacaaaaatgtttctcggaacgggaggctagtgatatactatatgtaataagtaagacagttgactatcttcattgtcaaggagttgttcatcgtgatcttaaacctagtaatattttatacatggatgaatcagccagtgcagattcaatcaggatatgtgattttgggtttgcaaaacaacttcgaggagaaaatggacttctcttaactccatgctacactgcaaactttgttgcacctgaggttcttatgcaacagggatatgatgctgcttgtgatatctggagtttaggagtccttttttacacaatgttggctggctacactccatttgctaatggccccaatgatactcctgaagagatactgctgcgtataggcaatggaaaattctctttgagtggtggaaactgggacaatatttcagacggagcaaaggatttgctttcccatatgcttcatatggacccacatcagcggtatactgctgaacaaatattaaagcactcatggataactcacagagaccagttgccaaatgatcagccaaagagaaatgatgtgtcacatgttgttaagggagcaatggttgcaacatactctgccctgactcacaagacctttcaaccagtcctagagcctgtagctgcttcaagcttagcccagcgacggagcatgaaaaagcgaacatcaactggcctgtaagatttgtggtgttcctaggccaaactggatgaagatgaaattaaatgtgtggcttttttcctattcttatcaaaggcatcgttgtctgctaaattacttgaatattaagtaatattaaatccccatttttaggggaagtgagatttaaaaaaccattcacaggtccacaatattcatactatgtgtttgcagtagtgttcaagtgtttatttaagcatataattggtgtccaccaggtcctcacaacttctctgcacacaagcttctaaaattcctttcaaataaagttactttaatattt

SEQ ID NO: 176899 - DNA, 8169 bp, Homo sapiens
  Payload ID: 14714
  Gene Symbol: RPS6KA6
  Gene Name: ribosomal protein S6 kinase, 90kDa, polypeptide 6
  Uniprot ID: Q9UK32
  ENST ID: ENST00000620340
  CDS Start-End: 1-2238
atgggtctctctacctcagcaatttggaaaaatactcgagtggaaattgttaatccctatgaagtaaaacgaaaggtgaaggtaaatggtcttaaaatggttgatgagccaatggaagagggagaagcagattcttgtcatgatgaaggagttgttaaagaaatccctattactcatcatgttaaggaaggctatgagaaagcagatcctgcacagtttgagttgctcaaggttcttggtcaggggtcatttggaaaggtttttcttgttagaaagaagaccggtcctgatgctgggcagctctatgcaatgaaggtgttaaaaaaagcctctttaaaagttcgagacagagttcggacaaagatggagagggatatactggtggaagtaaatcatccatttattgtcaaattgcactatgcctttcagactgaagggaaactgtacttaatactggattttctcaggggaggagatgttttcacaagattatccaaagaggttctgtttacagaggaagatgtgaaattctacctcgcagaactggcccttgctttggatcatctgcaccaattaggaattgtttatagagacctgaagccagaaaacattttgcttgatgaaataggacatatcaaattaacagattttggactcagcaaggagtcagtagatcaagaaaagaaggcttactcattttgtggtacagtagagtatatggctcctgaagtagtaaataggagaggccattcccagagtgctgattggtggtcatatggtgttcttatgtttgaaatgcttactggtactctgccatttcaaggtaaagacagaaatgagaccatgaatatgatattaaaagcaaaacttggaatgcctcaatttcttagtgctgaagcacaaagtcttctaaggatgttattcaaaaggaatccagcaaatagattgggatcagaaggagttgaagaaatcaaaagacatctgttttttgcaaatattgactgggataaattatataaaagagaagttcaacctcctttcaaacctgcttctggaaaaccagatgatactttttgttttgatcctgaatttactgcaaaaacacctaaagattctcccggtttgccagccagtgcaaatgctcatcagctcttcaaaggattcagctttgttgcaacttctattgcagaagaatataaaatcactcctatcacaagtgcaaatgtattaccaattgttcagataaatggaaatgctgcacaatttggtgaagtatatgaattgaaggaggatattggtgttggctcctactctgtttgcaagcgatgcatacatgcaactaccaacatggaatttgcagtgaagatcattgacaaaagtaagcgagacccttcagaagagattgaaatattgatgcgctatggacaacatcccaacattattactttgaaggatgtctttgatgatggtagatatgtttaccttgttacggatttaatgaaaggaggagagttacttgaccgtattctcaaacaaaaatgtttctcggaacgggaggctagtgatatactatatgtaataagtaagacagttgactatcttcattgtcaaggagttgttcatcgtgatcttaaacctagtaatattttatacatggatgaatcagccagtgcagattcaatcaggatatgtgattttgggtttgcaaaacaacttcgaggagaaaatggacttctcttaactccatgctacactgcaaactttgttgcacctgaggttcttatgcaacagggatatgatgctgcttgtgatatctggagtttaggagtccttttttacacaatgttggctggctacactccatttgctaatggccccaatgatactcctgaagagatactgctgcgtataggcaatggaaaattctctttgagtggtggaaactgggacaatatttcagacggagcaaaggatttgctttcccatatgcttcatatggacccacatcagcggtatactgctgaacaaatattaaagcactcatggataactcacagagaccagttgccaaatgatcagccaaagagaaatgatgtgtcacatgttgttaagggagcaatggttgcaacatactctgccctgactcacaagacctttcaaccagtcctagagcctgtagctgcttcaagcttagcccagcgacggagcatgaaaaagcgaacatcaactggcctgtaagatttgtggtgttcctaggccaaactggatgaagatgaaattaaatgtgtggcttttttcctattcttatcaaaggcatcgttgtctgctaaattacttgaatattaagtaatattaaatccccatttttaggggaagtgagatttaaaaaaccattcacaggtccacaatattcatactatgtgtttgcagtagtgttcaagtgtttatttaagcatataattggtgtccaccaggtcctcacaacttctctgcacacaagcttctaaaattcctttcaaataaagttactttaatattttttttcttgtttcatacaattatggtttggggagtcattaccaacaatcagtatacatatataatagtataatgacaagcaatgttagtatttttaaacatcagatcctgaaggataggctttttctaatgaaagaaaaacaacaaaaacttattataaaagcttgttattccgtaaaaccaaaggactccattcatttgactcactgtagttactaaaatgtaaacatagtggtttggtgccagagcaaaatacatttgtgctaatatatgaattcttgatatagttggtgccaaagtttttatagaagaattatatctcagataatgtgtgcaggcagatctgtatattatccataataagtggcctcatttagaaataaaggtttttataaggcttctgtaaattttacatcatggaaatttagtacaagtgaaactttttttttttccaaaggctttatactgttggtgtaatcttataaataggtcatagttaagcctttgaaaatgaagtatgtggtgttgacactatcctggtgttatataaactgactttcaagttaaccaattggattgtaatcatcatctatcccctttataaatgaactacactgttgtttttctgacttcgatgtgctttgaagtacagtgtagcatatcattctaccttgaatcctatgataatacagttgacatcttgctgtagtggacttgtgcatatagcacacatgatatagtatattgtattacagtaaactttagacaatgctacttaatcattttacttcatgaagataaactaacattttaaatatgaataatattaatggtctacaaaaaatttgagcacattttaaaatcatatttataaaaaactggccaaattggtcttatttaatgtataattcagaaccactgtgtagtatgtattcttttctctaaatgatgaaatgctaaagaatcatttcacgttgttgaagaaaataccgttgctacaacaacagcagcagctactactgctactactactactactactactactactactactactgacagaaagaattcatgaatgtaaactggaggatatcacagttttctttagtgaatataagtgaactacttgtgcgtgttaggtgtactatttgctatgtattttattttgctttattcagagagaaagttgattactgagtgctgaattatacaatttaggctaggaaactcgtaactttggtatttaataaaagaaactatacatattctgtttgtaatgtaaataatctataccccatgcacaaatatctgtttcctgggtgtgatatattaaagtatgtattcttattttgaggtatcttttggaaataattgaaagagattaaataacaatttatgccacatgaaaaataattacttagaagtagttaggtatcatgtcttatggctttttatgttccattttggctttttttctcatttgctttattactatatgtacttgcatgtaacagtttgtaagcatatattctgacttattttccttctgtcattatctagtgctgttatgccttcctatcagaatcgataagtcaaactcagaggtgtgattttggtgttgaagttttcaggacagagatactatttccatggatgcattttaagtaataaaattaggggaagtgaaatcagaaaatgaaaaatgattacaaaataactttcaggttttctataatcaatggctttaaaaagtagacagtcttaattaattttaaattagcttgctcagaaaggtcatgccatacagtcctatcataaaaggaacactataagaattaagcaatgaacagcatgatttctgatcacccagtgaggactgacagtgtataaaagatacaggtatgctactggatgtacccgataattgtttgagagttttctagtgaaaaactcaaatatgctagcttaaccacagtagtagggggcaaccttattatatgggagagcttcaaaacatactgtcattttgtagaaggagcccaggtaaggatgcctaatcctgtccagtttggctagaactccatagccaaaaatgcagatttggattgaacatttttttgatgggacttctatcaatgcttaactagtaaaaacacatcttttctataagactttagaatactgtggtttctaatgggttcttgaataatgattttgcattgtgtttttctagttaatggtttttggtagtatttaatgatagcacagtttggggttttattgttcttgaagggggaggatattgaatttgtttttcttagagaaaacatcaggtttgctcaaatagactaacaacctgttgtccttaagcacatactaccatgaataaactcaggaaacaattttcaagaaaattcgaatgcagtgctggtgatggggatttttgtgggaaaaaacaatggtttcaagtcctttcacaaagatcaaacttcagcctattttgttagactcagcaatgtctaaaacagtgttttttgtaatttattgtcattggtaattcaatataataaaacaattttgatagcacctctgtttggctcaaagggattccatatgtttaggcaacccacaaccttaagaacagatgcttggtatttataatgtctgcccattggaacaacatgttaaaatagtactgcccagagaaacttccatacagattgactagtattttctagatagaggtctttcatatatgaagaaggaaaacaaccatttatcttggccctaaggcccacaagaaaacttaggctttaaagtgggcaaagcatatttgtggtattctgtacattctctttctcctggctttccagccccttcatgctatctatcttatttgagcacctcacagcaatactccatcaacgaaatttaccctatccccagaaggattctgtgtgatccttactccttgttccttcctcttcctcttccccaaatcaggatatccattctatcagaacagacatttccagctaaaaaggtgaaaggaaagctatcttattaaattaatttacatttttctgtcagtggctaatagttaattggcattttttaaggaagttgtgcattaatcaagtttttagttgctggatcttcaggcaatctaacaaggtgataattttaaattcagttcctatcacggaaaatattttgggggaaaggaacagtgtgtcccagggtcagagtatctaataaactgtttctttttttgcacaatttccttcctacttcctttctacttctcaatctaccttttctcttaaaaacttttaaactttttaatcacaatgaacttctatgacaaaatgatgtggaggtagacagagattggcgattatttctgtatatgttgtttttaaacccatagttttgtattcttgtttctcacagtacatgacctatatagcataagaagttttattccccccaccccccatcccattcctgttataaagaaaaaaaaaagcacagagagattgaatccaaactactcatggagtccaaatttttccagatcccttttccagattttaggacctagaaatcctttaagtcacaatgttatttcaaaaaaaaaaaaaaaaaaatgcaagccatattaagtatatattggccaactgcaattaaacttctttaaaacatttttgttttacatttcaaagcttattcaggcatttttggcatgtacctcaagatcaatgattgttgaaattagcagaataaatcaatagtgggctatttgcctttttatgtgggaatatagtggcattgatagtgattattcacaacatacattatactcatggatgcactgttcctggttttagtcttacagtgtagtgaattccatcatatactttcaataaaatgttatgcttgatcacctaaaattcagtttggttgctaatacataagagaaaagggaactatacttgaatatattaaattatagacataagtttctttgaaatatttagaaaaacaaaagttttagaatatggaaatccaagcttacattatattggcaaattatgtatgtttcaattattcactaaataaattttagctaaatgcttataaataaatatatatatgtaattgccaagttagggtttgctttgtattcacatttctaaacgctggacaatagagcttctgtggatgactgttttgctgtaattccaactgtctagttatgggaactaataatttattcttcaaaaggtattaagcatttaattttacgtggacaattatagagaatgtactaactgcattcgtttattaaaaaattgtcaaaatgtgactgattaggttacttttatctttcctatgaactaatattgctcaggtcacattttctttctctttccaaattcattctctctgaaattgctgcttataacaaatatgtagtgttttgttttttagtatgataaaattatttttaacagcaggaaagcagtctatcaagaaacagccggccgggcacagtggctcatgcctgtaatcccagcactttgggaggccgaggcggtggatcacctgaggtcaggaattcgagaccagcctgaccaacatggagaaacccgtctctactaaaaatacaaagttagccaggtgtggtggcgcatgcctgtaatcccagctactcaggaggctgagacaggagaatcacttgaacctgggaggcagaggttgcggtgagccgagattgtgccaatttcactccagcctgggcaacaagagcgaaactccgtctcacaaaaaaaaaaaaaaaaaaaaaaaaaaaaaaagaaaagaaacagccatttaaaaagttacacattaaaccttaaatatccaaattccagcatggtttgtaagttagaatttatcttgcattaaattccatagtacaaaaaaaaggagaaggtggtttttctgtttgataaaaaaaaaaaaaaacaggaagtactgttggtagttgggagttacataggctttatgaagcaaccacagtttgctatagccacattttttaaaaaattggtttgccaacacatcccaagcacttttgaattcctaaacttatttctgatattaaatatatatgtatatactgacatttcattgcatttctgaagactgaaatggcattaaataaaagttgtgtgtgaatttgatttacgtgtacttaaaaacttcaaagctgcagttaaacaatccccagtgttcaaaaactattttattgttctgactatattatgaattttatgttaccatttattttattaatgttttctttaaaccattggttttttgacattaaaattttcatttattatactaagttttttatcatgtaagaccaaatccagtagttcattttacaatgtttctttctctcacaatgctgctaaagaaatggctatcattttgaatttacaacatgccaaagaagacatagaagttatatttatttttgttcttgttaaaactctgtgagcaacagttctcaagatatgttaaattactggcattctctgggtaccaaataaaaaggctgcaactttctaacatttt

SEQ ID NO: 176900 - DNA, 5195 bp, Homo sapiens
  Payload ID: 14715
  Gene Symbol: RPS6KL1
  Gene Name: ribosomal protein S6 kinase-like 1
  Uniprot ID: Q9Y6S9
  ENST ID: ENST00000354625
  CDS Start-End: 486-2135
gaggggtcctcactcgctgaccacactgacctcaggaccaagggaacaaaacacagcaggggcaatccatccggtccacggagaagtgctaaaccccaaagggtaaatgagattcccacaggaggagcagggaggagacaacaggcagggtggagggaacagcatgaggaacagcatttgagcccagcgtgtgtggcctccatgtgctgaatgcgtactggataccaagcttgctctacggaggccctgtgaaggtggctgtggatcacagatatcctcagctctctccagagctcaacacagtaccagatgctccagaaatgtttgctgaactgaatttgactggaaaggaaaacagagccccaggcctgcgcggtggctcacgtctataatcccagcactgtgggaggccgaggcagacggatcacttgaggtcaggagttcaagaccagcctggccaacatggtcccagctgcagggcagccatgagcctggtggcctgtgagtgcctgcccagccccggcctggagcctgagccttgctcacgagcacggtcccaagctcacgtgtacctggagcagattcgcaacagggtggctctgggagtgcctgacatgacaaaacgtgactatctggtggatgcggccacgcagatccggctggccctggagcgcgatgttagtgaggactatgaggcggccttcaaccactatcagaatggcgtggacgtgctgctccgtggcatacacgttgaccccaacaaggagcgacgtgaggctgtgaagctgaaaattaccaaatacctgcggcgggcagaggagatcttcaactgccacctgcagcggccgctgagcagtggagccagccccagcgcgggtttcagcagcctgaggctccggcccattcgcacgctgagctctgccgtggagcagctgaggggctgcagggtggtcggggtcatcgagaaggtgcagctggtccaggacccggcaaccggagggacctttgtggtgaagagcctacccaggtgccacatggtgagcagggagcggctgaccatcatcccacacggagtcccctacatgacgaagctgctcaggtactttgtgagcgaggactccatcttcctgcacctggagcatgtgcaaggaggcactctctggtcccacctgctctcccaggcgcactcccgacattctgggctcagctctggctctacccaggagaggatgaaggctcagctcaacccccacctcaacctcctgaccccagcgaggcttccctcaggccatgcccctggccaggacagaatcgccctggagcctcctaggacttctccgaaccttctcctagctggggaggccccatccaccagaccccagagggaggctgaaggtgaacccacagccaggaccagcacctctggctcctcggaccttccaaaggccccaggtggccacctgcaccttcaagctaggagggctggccagaactcagacgctgggccccctcgggggctcacttgggttcctgagggggccggcccggtgctagggggctgtggccgaggcatggatcagagctgcctgtcagcagatggggccggccggggctgtggcagggccacctggagtgtgagagaggagcaggtgaagcagtgggcggcagagatgctggtagcgctggaggcgctgcacgagcagggggtgctgtgccgggacctccaccccgggaacctgctcctggaccaggcaggtcacatccggctcacatattttggccagtggtcagaggtggagccccagtgctgcggggaggccgtggacaatctctacagcgccccagaggtgggtgggatttccgagctgacggaagcctgtgactggtggagctttgggtctctactgtatgaactgctgacgggaatggcactgtcccagagccacccttcaggaatccaggcccacacccagctccagctgcccgagtggctcagtcgcccagcggcctctctgctgactgagctgctgcagttcgagcctacccggcgcctgggcatgggagaaggtggtgtcagcaaactcaagtcccatccctttttcagtaccatccaatggagcaagctggtggggtaagagggcagagcgggtgacggaagcagctggcctggtctggatcgcctctcctccttgcctgacacccaacccagggctggccctctatcagcgggctttgggcgaggaatggagggcactgtctgtcctgctgggctcccactggggcctcagaattatggccaccacccaggaagggccagctcctggaaaagctggaggtgggggcagtcaaggcttgccctgctaagcagcttgaaccatctacccatcagtcaacagacccgttgagcatgtggactcaccatgttaaaggttgccttctgtggcactggcgctgagctgttgaccacctgctgcaccctactgtgaggttctgtgactcactcactgccatgttgtgccccactcaggacatctctggagactcatctcaggacactgatccactggctcagtggacccaaaccagactgtcctggctagtcctcttagtcacacagcgagtaggcctcttccaccagaagctgttcgtgcagctggggaggcccagaagcagggatgccatctgttgtgcagggagggatgaggtaggggacaggatgacccccacccccacccccccacccccgattcctgaccatgccccctatcttgtgatttcagacttgggagagcaaaagggaggggaagaaaataagagtaatggggggaggaaggaatgcatgggtctgccccttagagcaagtctgaaaccagaatcaagagtcctcctccccagtgggcctgtgtgggggaagaggggcagcctgccccaggggtgcaagaggacagcaattcagcttccaggccaaagcagtttagacaaggtgtgcccatcaggactccctctcaggccctggctgtttaccatgtcactgcctactgtgacttcatgcccttttgggataagaaaccacaaaacgcatggaacaactatccatggctcttagccagaaatgtcttgcctctggtctctgaaaagctggggtgagtggttacctcaaagacaattgcctccagtttgggggctcctctcagggttcaccctgtcaccggggcgtgggaccgacctgggaaatttccactagagttttgccctcagctcctccctgccagcatcccagtcaccaccaggtggcgcttctgacacggtccacgtgcctggctctgaaggcccaactgtcagaccagacccctcactcatggtggggagacttgacttcctcgggctcttcaggagactgagacagagaagacaagtgaaagcgcagcctgtacatgactctctgtggtccacgtcctgcctctccctggggtttacacggccccaataaagcctgctctggcctacggtgttctcgcttcttccatgcaatgaccacggctcattggggcaggttggaaggctcccctgtagaagctccagagtgaagtcaagagcgagcttggggctgccaggaagtaggacgcagggctggtggtgagcagcatgccatgtgggcctcaggggaaggggtggggtcggggaggaccaggttctgtggggaagaggatgaagaagccttggaagaggctcatggtgcctgggggaataccagtttcatcctcacagtgaccccttgcaacagacggtagctcctgagaaaactgaagctcaaaaaggttaaggacacaacctagccagagttgcaagttagtgttccttctgctactctccctaagtcaggctggaccacttccaaccaccgcttcatgaagcacaagtcccttctggaacttctgtgcttcatccacccaaagctacacatctgacactttgttgggccctgagtttagaatactgtgggtcccagctcttacagtcgacctcctttcgataaaatggggtaaataatgcctattttgcaggtttaccagatagataaattaaagcttctaacaccaaatcctgttcttcctttcattcaacctaatttgtttttctatctactagagctctagttctactctctgggacccacttccctcctgtgacagaccttcacagagggatggcctcactgcaagagctcagcagacagggactctggaaaagacaaggctgtgtttaagcctggactccatcacacctgccacctgcagtctaggttagctacccaccctgtacactcacgctcactgaccactgctcctaggtcatcaaccctcacctgttcatgtgtattgaccttgagcatcttggtccacaaggctatcaaatccaaatgaaatgagatgcccccactcctcccaaatccatcactgaaataatgtaagcccacacaaaaaatgcaagtctactggtgttttgaaagggcttcacaaagatggtgaccccaaattctctattctagagtatggcttgacaggctcaaggaaggtggggcactaagagactatgatgctttatggaaacaaaacaaaaaacatcctaagccccccaaccatctgtatggacccctcgtctcagtcaagggtattccaaagttaacctgaaacgctagttcgggccatggtgggaagagggagccagccattcctcattatactcccctcccttttggaattactgttaaaacaggctccttaagtctgatgagaagcatttacaatctattttctctgaagcctgctggctggaggcttcatctgcataaaaccttggtctccacaaccccttactgtaacccagacattcctttctattgattccaggtctttagataataactctttcaaccaattgccaatcagaaaatctttgattctgcctatgacaacatccccaggtcttgagctgtcctgcctctccagaccaaaccactgtacatcttacatgtactgactggtatcttatgtctccctaaaatgtattaaatgtataaaactaagttgtagccagacgaccctggacacatgttctcaggatctcctaagagttgtatcacaggccatcagtcactcacacttggctcagaataaatctcttcaaatattttt

SEQ ID NO: 176901 - DNA, 2425 bp, Homo sapiens
  Payload ID: 14715
  Gene Symbol: RPS6KL1
  Gene Name: ribosomal protein S6 kinase-like 1
  Uniprot ID: Q9Y6S9
  ENST ID: ENST00000557413
  CDS Start-End: 746-2395
cttgcggctttaaggccggcaggagccgagccgggcggtgattggtggtttattctaaggctcaagtatgagctcatccgcagccaatggccgcgctgcaccggctggccccgcacgctggatgccggaaagcagcggcccgcggcgcgctctggcgtgaagggccggtacgtgagggggaggcctggcccgcggacccggctcccagctcgggcagttcttacagcccagctctgtgctctgctctctgctggctccaggaggggtcctcactcgctgaccacactgacctcaggaccaagggaacaaaacacagcaggggcaatccatccggtccacggagaagtgctaaaccccaaagggtaaatgagattcccacaggaggagcagggaggagacaacaggcagggtggagggaacagcatgaggaacagcatttgagcccagcgtgtgtggcctccatgtgctgaatgcgtactggataccaagcttgctctacggaggccctgtgaaggtggctgtggatcacagatatcctcagctctctccagagctcaacacagtaccagatgctccagaaatgtttgctgaactgaatttgactggaaaggaaaacagagccccaggcctgcgcggtggctcacgtctataatcccagcactgtgggaggccgaggcagacggatcacttgaggtcaggagttcaagaccagcctggccaacatggtcccagctgcagggcagccatgagcctggtggcctgtgagtgcctgcccagccccggcctggagcctgagccttgctcacgagcacggtcccaagctcacgtgtacctggagcagattcgcaacagggtggctctgggagtgcctgacatgacaaaacgtgactatctggtggatgcggccacgcagatccggctggccctggagcgcgatgttagtgaggactatgaggcggccttcaaccactatcagaatggcgtggacgtgctgctccgtggcatacacgttgaccccaacaaggagcgacgtgaggctgtgaagctgaaaattaccaaatacctgcggcgggcagaggagatcttcaactgccacctgcagcggccgctgagcagtggagccagccccagcgcgggtttcagcagcctgaggctccggcccattcgcacgctgagctctgccgtggagcagctgaggggctgcagggtggtcggggtcatcgagaaggtgcagctggtccaggacccggcaaccggagggacctttgtggtgaagagcctacccaggtgccacatggtgagcagggagcggctgaccatcatcccacacggagtcccctacatgacgaagctgctcaggtactttgtgagcgaggactccatcttcctgcacctggagcatgtgcaaggaggcactctctggtcccacctgctctcccaggcgcactcccgacattctgggctcagctctggctctacccaggagaggatgaaggctcagctcaacccccacctcaacctcctgaccccagcgaggcttccctcaggccatgcccctggccaggacagaatcgccctggagcctcctaggacttctccgaaccttctcctagctggggaggccccatccaccagaccccagagggaggctgaaggtgaacccacagccaggaccagcacctctggctcctcggaccttccaaaggccccaggtggccacctgcaccttcaagctaggagggctggccagaactcagacgctgggccccctcgggggctcacttgggttcctgagggggccggcccggtgctagggggctgtggccgaggcatggatcagagctgcctgtcagcagatggggccggccggggctgtggcagggccacctggagtgtgagagaggagcaggtgaagcagtgggcggcagagatgctggtagcgctggaggcgctgcacgagcagggggtgctgtgccgggacctccaccccgggaacctgctcctggaccaggcaggtcacatccggctcacatattttggccagtggtcagaggtggagccccagtgctgcggggaggccgtggacaatctctacagcgccccagaggtgggtgggatttccgagctgacggaagcctgtgactggtggagctttgggtctctactgtatgaactgctgacgggaatggcactgtcccagagccacccttcaggaatccaggcccacacccagctccagctgcccgagtggctcagtcgcccagcggcctctctgctgactgagctgctgcagttcgagcctacccggcgcctgggcatgggagaaggtggtgtcagcaaactcaagtcccatccctttttcagtaccatccaatggagcaagctggtggggtaagagggcagagcgggtgacggaagcagctgg

SEQ ID NO: 176902 - DNA, 2457 bp, Homo sapiens
  Payload ID: 14715
  Gene Symbol: RPS6KL1
  Gene Name: ribosomal protein S6 kinase-like 1
  Uniprot ID: Q9Y6S9
  ENST ID: ENST00000555009
  CDS Start-End: 218-1843
cagatatcctcagctctctccagagctcaacacagtaccagatgctccagaaatgtttgctgaactgaatttgactggaaaggaaaacagagccccaggcctgcgcggtggctcacgtctataatcccagcactgtgggaggccgaggcagacggatcacttgaggtcaggagttcaagaccagcctggccaacatggtcccagctgcagggcagccatgagcctggtggcctgtgagtgcctgcccagccccggcctggagcctgagccttgctcacgagcacggtcccaagctcacgtgtacctggagcagattcgcaacagggtggctctgggagtgcctgacatgacaaaacgtgactatctggtggatgcggccacgcagatccggctggccctggagcgcgatgttagtgaggactatgaggcggccttcaaccactatcagaatggcgtggacgtgctgctccgtggcatacacgttgaccccaacaaggagcgacgtgaggctgtgaagctgaaaattaccaaatacctgcggcgggcagaggagatcttcaactgccacctgcagcggccgctgagcagtggagccagccccagcgcggtgcagctggtccaggacccggcaaccggagggacctttgtggtgaagagcctacccaggtgccacatggtgagcagggagcggctgaccatcatcccacacggagtcccctacatgacgaagctgctcaggtactttgtgagcgaggactccatcttcctgcacctggagcatgtgcaaggaggcactctctggtcccacctgctctcccaggcgcactcccgacattctgggctcagctctggctctacccaggagaggatgaaggctcagctcaacccccacctcaacctcctgaccccagcgaggcttccctcaggccatgcccctggccaggacagaatcgccctggagcctcctaggacttctccgaaccttctcctagctggggaggccccatccaccagaccccagagggaggctgaaggtgaacccacagccaggaccagcacctctggctcctcggaccttccaaaggccccaggtggccacctgcaccttcaagctaggagggctggccagaactcagacgctgggccccctcgggggctcacttgggttcctgagggggccggcccggtgctagggggctgtggccgaggcatggatcagagctgcctgtcagcagatggggccggccggggctgtggcagggccacctggagtgtgagagaggagcaggtgaagcagtgggcggcagagatgctggtagcgctggaggcgctgcacgagcagggggtgctgtgccgggacctccaccccgggaacctgctcctggaccaggcaggtcacatccggctcacatattttggccagtggtcagaggtggagccccagtgctgcggggaggccgtggacaatctctacagcgccccagaggtgggtgggatttccgagctgacggaagcctgtgactggtggagctttgggtctctactgtatgaactgctgacgggaatggcactgtcccagagccacccttcaggaatccaggcccacacccagctccagctgcccgagtggctcagtcgcccagcggcctctctgctgactgagctgctgcagttcgagcctacccggcgcctgggcatgggagaaggtggtgtcagcaaactcaagtcccatccctttttcagtaccatccaatggagcaagctggtggggacatctctggagactcatctcaggacactgatccactggctcagtggacccaaaccagactgtcctggctagtcctcttagtcacacagcgagtaggcctcttccaccagaagctgttcgtgcagctggggaggcccagaagcagggatgccatctgttgtgcagggagggatgaggactccctctcaggccctggctgtttaccatgtcactgcctactgtgacttcatgcccttttgggataagaaaccacaaaacgcatggaacaactatccatggctcttagccagaaatgtcttgcctctggtctctgaaaagctggggtgagtggttacctcaaagacaattgcctccagtttgggggctcctctcagggttcaccctgtcaccggggcgtgggaccgacctgggaaatttccactagagttttgccctcagctcctccctgccagcatcccagtcaccaccaggtggcgcttctgacacggtccacgtgcctggctctgaaggcccaactgtcagaccagacccctcactcatggtggggagacttgacttcctcgggctcttcaggagactgagacagagaagacaagtgaaagcgcagcctgtacatgactctctgtggtccacgtcctgcctctccctggggtttacacggccccaataaagcctgctctggccta

SEQ ID NO: 176903 - DNA, 607 bp, Homo sapiens
  Payload ID: 14715
  Gene Symbol: RPS6KL1
  Gene Name: ribosomal protein S6 kinase-like 1
  ENST ID: ENST00000553789
  CDS Start-End: 1-474
accatcatcccacacggagtcccctacatgacgaagctgctcaggtactttgtgagcgaggactccatcttcctgcacctggagcatgtgcaaggtcacatccggctcacatattttggccagtggtcagaggtggagccccagtgctgcggggaggccgtggacaatctctacagcgccccagaggtgggtgggatttccgagctgacggaagcctgtgactggtggagctttgggtctctactgtatgaactgctgacgggaatggcactgtcccagagccacccttcaggaatccaggcccacacccagctccagctgcccgagtggctcagtcgcccagcggcctctctgctgactgagctgctgcagttcgagcctacccggcgcctgggcatgggagaaggtggtgtcagcaaactcaagtcccatccctttttcagtaccatccaatggagcaagctggtggggtaagagggcagagcgggtgacggaagcagctggcctggtctggatcgcctctcctccttgcctgacacccaacccagggctggccctctatcagcgggctttgggcgaggaatggagggcactgtctgtcctgctg

SEQ ID NO: 176904 - DNA, 630 bp, Homo sapiens
  Payload ID: 14715
  Gene Symbol: RPS6KL1
  Gene Name: ribosomal protein S6 kinase-like 1
  ENST ID: ENST00000553315
  CDS Start-End: 1-138
gcactgtcccagagccacccttcaggaatccaggcccacacccagctccagctgcccgagtggctcagtcgcccagcggcctctctgctgactgaggtgaggtgtagcccggccagaggaagcagctgcctagcctgaggaagctgctgcagttcgagcctacccggcgcctgggcatgggagaaggtggtgtcagcaaactcaagtcccatccctttttcagtaccatccaatggagcaagctggtggggtaagagggcagagcgggtgacggaagcagctggcctggtctggatcgcctctcctccttgcctgacacccaacccagggctggccctctatcagcgggctttgggcgaggaatggagggcactgtctgtcctgctgggctcccactggggcctcagaattatggccaccacccaggaagggccagctcctggaaaagctggaggtgggggcagtcaaggcttgccctgctaagcagcttgaaccatctacccatcagtcaacagacccgttgagcatgtggactcaccatgttaaaggttgccttctgtggcactggcgctgagctgttgaccacctgctgcaccctactgtgaggttctgtgactcactcactgccat

SEQ ID NO: 176905 - DNA, 527 bp, Homo sapiens
  Payload ID: 14715
  Gene Symbol: RPS6KL1
  Gene Name: ribosomal protein S6 kinase-like 1
  ENST ID: ENST00000553971
  CDS Start-End: 1-313
catcttcctgcacctggagcatgtgcaaggtcacatccggctcacatattttggccagtggtcagaggtggagccccagtgctgcggggaggccgtggacaatctctacagcgccccagaggtgggtgggatttccgagctgacggaagcctgtgactggtggagctttgggtctctactgtatgaactgctgacgggaatgctgctgcagttcgagcctacccggcgcctgggcatgggagaaggtggtgtcagcaaactcaagtcccatccctttttcagtaccatccaatggagcaagctggtggggtaagagggcagagcgggtgacggaagcagctggcctggtctggatcgcctctcctccttgcctgacacccaacccagggctggccctctatcagcgggctttgggcgaggaatggagggcactgtctgtcctgctgggctcccactggggcctcagaattatggccaccacccaggaagggccagctcctggaaaagctggaggtgggggcagtcaa

SEQ ID NO: 176906 - DNA, 583 bp, Homo sapiens
  Payload ID: 14715
  Gene Symbol: RPS6KL1
  Gene Name: ribosomal protein S6 kinase-like 1
  ENST ID: ENST00000556776
  CDS Start-End: 558-583
cgcgctctggcgtgaagggccggtacgtgagggggaggcctggcccgcggacccggctcccagctcgggcaggaggggtcctcactcgctgaccacactgacctcaggaccaagggaacaaaacacagcaggggcaatccatccggtccacggagaagtgctaaaccccaaagggtaaatgagattcccacaggaggagcagggaggagacaacaggcagggtggagggaacagcatgaggaacagcatttgagcccagcgtgtgtggcctccatgtgctgaatgcgtactggataccaagcttgctctacggaggccctgtgaaggtggctgtggatcacagatatcctcagctctctccagagctcaacacagtaccagatgctccagaaatgtttgctgaactgaatttgactggaaaggaaaacagagccccaggcctgcgcggtggctcacgtctataatcccagcactgtgggaggccgaggcagacggatcacttgaggtcaggagttcaagaccagcctggccaacatggtcccagctgcagggcagccatgagcctggtggcctgtgagtgcct

SEQ ID NO: 176907 - DNA, 2157 bp, Homo sapiens
  Payload ID: 14715
  Gene Symbol: RPS6KL1
  Gene Name: ribosomal protein S6 kinase-like 1
  ENST ID: ENST00000556848
  CDS Start-End: 1-224
ggagtgtgagagaggagcaggtgaagcagtgggcggcagagatgctggtagcgctggaggcgctgcacgagcagggggtgctgtgccgggacctccaccccgggaacctgctcctggaccaggcagtggtcagaggtggagccccagtgctgcggggaggccgtggacaatctctacagcgccccagaggtgggtgggatttccgagctgacggaagcctgtgactggtggagctttgggtctctactgtatgaactgctgacgggaatggcactgtcccagagccacccttcaggaatccaggcccacacccagctccagctgcccgagtggctcagtcgcccagcggcctctctgctgactgaggtgaggtgtagcccggccagaggaagcagctgcctagcctgaggaaggtgctgggaggggcacagaactgtgtctgaaccacgtgtgcttcgtgctcagtgtctgatgtgggtgcagagggcagtaggggcaacacatttctatatgttggtggccaaccaccaccaatgttcccagggtaaaatgggggttctgtgggccaggctgccagggagcaggccccctagaggccatagtggttggagtccctggaggtcaccccatgcctccacagctggagtggcccagctgactgggcctctctctgcagctgctgcagttcgagcctacccggcgcctgggcatgggagaaggtggtgtcagcaaactcaagtcccatccctttttcagtaccatccaatggagcaagctggtggggtaagagggcagagcgggtgacggaagcagctggcctggtctggatcgcctctcctccttgcctgacacccaacccagggctggccctctatcagcgggctttgggcgaggaatggagggcactgtctgtcctgctgggctcccactggggcctcagaattatggccaccacccaggaagggccagctcctggaaaagctggaggtgggggcagtcaaggcttgccctgctaagcagcttgaaccatctacccatcagtcaacagacccgttgagcatgtggactcaccatgttaaaggttgccttctgtggcactggcgctgagctgttgaccacctgctgcaccctactgtgaggttctgtgactcactcactgccatgttgtgccccactcaggacatctctggagactcatctcaggacactgatccactggctcagtggacccaaaccagactgtcctggctagtcctcttagtcacacagcgagtaggcctcttccaccagaagctgttcgtgcagctggggaggcccagaagcagggatgccatctgttgtgcagggagggatgaggtaggggacaggatgacccccacccccacccccccacccccgattcctgaccatgccccctatcttgtgatttcagacttgggagagcaaaagggaggggaagaaaataagagtaatggggggaggaaggaatgcatgggtctgccccttagagcaagtctgaaaccagaatcaagagtcctcctccccagtgggcctgtgtgggggaagaggggcagcctgccccaggggtgcaagaggacagcaattcagcttccaggccaaagcagtttagacaaggtgtgcccatcaggactccctctcaggccctggctgtttaccatgtcactgcctactgtgacttcatgcccttttgggataagaaaccacaaaacgcatggaacaactatccatggctcttagccagaaatgtcttgcctctggtctctgaaaagctggggtgagtggttacctcaaagacaattgcctccagtttgggggctcctctcagggttcaccctgtcaccggggcgtgggaccgacctgggaaatttccactagagttttgccctcagctcctccctgccagcatcccagtcaccaccaggtggcgcttctgacacggtccacgtgcctggctctgaaggcccaactgtcagaccagacccctcactcatggtggggagacttgacttcctcgggctcttcaggagactgagacagagaagacaagtgaaagcgcagcctgtacatgactctctgtggtccacgtcctgcctctccctggggtttacacggccccaataaagcctgctctggcct

SEQ ID NO: 176908 - DNA, 1247 bp, Homo sapiens
  Payload ID: 14715
  Gene Symbol: RPS6KL1
  Gene Name: ribosomal protein S6 kinase-like 1
  ENST ID: ENST00000555910
  CDS Start-End: 1-146
cagcggcctctctgctgactgagctgctgcagttcgagcctacccggcgcctgggcatgggagaaggtggtgtcagcaaactcaagtcccatccctttttcagtaccatccaatggagcaagctggtgggtcaacagacccgttgagcatgtggactcaccatgttaaaggttgccttctgtggcactggcgctgagctgttgaccacctgctgcaccctactgtgaggttctgtgactcactcactgccatgttgtgccccactcaggacatctctggagactcatctcaggacactgatccactggctcagtggacccaaaccagactgtcctggctagtcctcttagtcacacagcgagtaggcctcttccaccagaagctgttcgtgcagctggggaggcccagaagcagggatgccatctgttgtgcagggagggatgaggtaggggacaggatgacccccacccccacccccccacccccgattcctgaccatgccccctatcttgtgatttcagacttgggagagcaaaagggaggggaagaaaataagagtaatggggggaggaaggaatgcatgggtctgccccttagagcaagtctgaaaccagaatcaagagtcctcctccccagtgggcctgtgtgggggaagaggggcagcctgccccaggggtgcaagaggacagcaattcagcttccaggccaaagcagtttagacaaggtgtgcccatcaggactccctctcaggccctggctgtttaccatgtcactgcctactgtgacttcatgcccttttgggataagaaaccacaaaacgcatggaacaactatccatggctcttagccagaaatgtcttgcctctggtctctgaaaagctggggtgagtggttacctcaaagacaattgcctccagtttgggggctcctctcagggttcaccctgtcaccggggcgtgggaccgacctgggaaatttccactagagttttgccctcagctcctccctgccagcatcccagtcaccaccaggtggcgcttctgacacggtccacgtgcctggctctgaaggcccaactgtcagaccagacccctcactcatggtggggagacttgacttcctcgggctcttcaggagactgagacagagaagacaagtgaaagcgcagcctgtacatgactctctgtggtccacgtcctgcctctccctggggtttacacggccccaataaagcctgctctggccta

SEQ ID NO: 176909 - DNA, 3309 bp, Homo sapiens
  Payload ID: 14715
  Gene Symbol: RPS6KL1
  Gene Name: ribosomal protein S6 kinase-like 1
  Uniprot ID: Q9Y6S9
  ENST ID: ENST00000555647
  CDS Start-End: 289-1938
gctgcaccggctggccccgcacgctggatgccggaaagcagcggcccgcggcgcgctctggcgtgaagggccggtacgtgagggggaggcctggcccgcggacccggctcccagctcgggcagttcttacagcccagctctgtgctctgctctctgctggctccaggaggggtcctcactcgctgaccacactgacctcaggaccaagggaacaaaacacagcaggggcaatccatccggtccacggagaagtgctaaaccccaaagggtcccagctgcagggcagccatgagcctggtggcctgtgagtgcctgcccagccccggcctggagcctgagccttgctcacgagcacggtcccaagctcacgtgtacctggagcagattcgcaacagggtggctctgggagtgcctgacatgacaaaacgtgactatctggtggatgcggccacgcagatccggctggccctggagcgcgatgttagtgaggactatgaggcggccttcaaccactatcagaatggcgtggacgtgctgctccgtggcatacacgttgaccccaacaaggagcgacgtgaggctgtgaagctgaaaattaccaaatacctgcggcgggcagaggagatcttcaactgccacctgcagcggccgctgagcagtggagccagccccagcgcgggtttcagcagcctgaggctccggcccattcgcacgctgagctctgccgtggagcagctgaggggctgcagggtggtcggggtcatcgagaaggtgcagctggtccaggacccggcaaccggagggacctttgtggtgaagagcctacccaggtgccacatggtgagcagggagcggctgaccatcatcccacacggagtcccctacatgacgaagctgctcaggtactttgtgagcgaggactccatcttcctgcacctggagcatgtgcaaggaggcactctctggtcccacctgctctcccaggcgcactcccgacattctgggctcagctctggctctacccaggagaggatgaaggctcagctcaacccccacctcaacctcctgaccccagcgaggcttccctcaggccatgcccctggccaggacagaatcgccctggagcctcctaggacttctccgaaccttctcctagctggggaggccccatccaccagaccccagagggaggctgaaggtgaacccacagccaggaccagcacctctggctcctcggaccttccaaaggccccaggtggccacctgcaccttcaagctaggagggctggccagaactcagacgctgggccccctcgggggctcacttgggttcctgagggggccggcccggtgctagggggctgtggccgaggcatggatcagagctgcctgtcagcagatggggccggccggggctgtggcagggccacctggagtgtgagagaggagcaggtgaagcagtgggcggcagagatgctggtagcgctggaggcgctgcacgagcagggggtgctgtgccgggacctccaccccgggaacctgctcctggaccaggcaggtcacatccggctcacatattttggccagtggtcagaggtggagccccagtgctgcggggaggccgtggacaatctctacagcgccccagaggtgggtgggatttccgagctgacggaagcctgtgactggtggagctttgggtctctactgtatgaactgctgacgggaatggcactgtcccagagccacccttcaggaatccaggcccacacccagctccagctgcccgagtggctcagtcgcccagcggcctctctgctgactgagctgctgcagttcgagcctacccggcgcctgggcatgggagaaggtggtgtcagcaaactcaagtcccatccctttttcagtaccatccaatggagcaagctggtggggtaagagggcagagcgggtgacggaagcagctggcctggtctggatcgcctctcctccttgcctgacacccaacccagggctggccctctatcagcgggctttgggcgaggaatggagggcactgtctgtcctgctgggctcccactggggcctcagaattatggccaccacccaggaagggccagctcctggaaaagctggaggtgggggcagtcaaggcttgccctgctaagcagcttgaaccatctacccatcagtcaacagacccgttgagcatgtggactcaccatgttaaaggttgccttctgtggcactggcgctgagctgttgaccacctgctgcaccctactgtgaggttctgtgactcactcactgccatgttgtgccccactcaggacatctctggagactcatctcaggacactgatccactggctcagtggacccaaaccagactgtcctggctagtcctcttagtcacacagcgagtaggcctcttccaccagaagctgttcgtgcagctggggaggcccagaagcagggatgccatctgttgtgcagggagggatgaggtaggggacaggatgacccccacccccacccccccacccccgattcctgaccatgccccctatcttgtgatttcagacttgggagagcaaaagggaggggaagaaaataagagtaatggggggaggaaggaatgcatgggtctgccccttagagcaagtctgaaaccagaatcaagagtcctcctccccagtgggcctgtgtgggggaagaggggcagcctgccccaggggtgcaagaggacagcaattcagcttccaggccaaagcagtttagacaaggtgtgcccatcaggactccctctcaggccctggctgtttaccatgtcactgcctactgtgacttcatgcccttttgggataagaaaccacaaaacgcatggaacaactatccatggctcttagccagaaatgtcttgcctctggtctctgaaaagctggggtgagtggttacctcaaagacaattgcctccagtttgggggctcctctcagggttcaccctgtcaccggggcgtgggaccgacctgggaaatttccactagagttttgccctcagctcctccctgccagcatcccagtcaccaccaggtggcgcttctgacacggtccacgtgcctggctctgaaggcccaactgtcagaccagacccctcactcatggtggggagacttgacttcctcgggctcttcaggagactgagacagagaagacaagtgaaagcgcagcctgtacatgactctctgtggtccacgtcctgcctctccctggggtttacacggccccaataaagcctgctctggccta

SEQ ID NO: 176910 - DNA, 786 bp, Homo sapiens
  Payload ID: 14716
  Gene Symbol: RPS7
  Gene Name: ribosomal protein S7
  Uniprot ID: P62081
  ENST ID: ENST00000304921
  CDS Start-End: 165-749
gggactctctagcctcctaccgcttctcagtgatgttccggtttccgccctcctcctcgcgctgtttccgcctcttgccttcggacgccggattttgacgtgctctcgcgagatttgggtctcttcctaagccggcgctcggcaagttctcccaggagaaagccatgttcagttcgagcgccaagatcgtgaagcccaatggcgagaagccggacgagttcgagtccggcatctcccaggctcttctggagctggagatgaactcggacctcaaggctcagctcagggagctgaatattacggcagctaaggaaattgaagttggtggtggtcggaaagctatcataatctttgttcccgttcctcaactgaaatctttccagaaaatccaagtccggctagtacgcgaattggagaaaaagttcagtgggaagcatgtcgtctttatcgctcagaggagaattctgcctaagccaactcgaaaaagccgtacaaaaaataagcaaaagcgtcccaggagccgtactctgacagctgtgcacgatgccatccttgaggacttggtcttcccaagcgaaattgtgggcaagagaatccgcgtcaaactagatggcagccggctcataaaggttcatttggacaaagcacagcagaacaatgtggaacacaaggttgaaactttttctggtgtctataagaagctcacgggcaaggatgttaattttgaattcccagagtttcaattgtaaacaaaaatgactaaataaaaagtatatattcacagta

SEQ ID NO: 176911 - DNA, 764 bp, Homo sapiens
  Payload ID: 14716
  Gene Symbol: RPS7
  Gene Name: ribosomal protein S7
  Uniprot ID: P62081
  ENST ID: ENST00000403564
  CDS Start-End: 143-727
ctcttcctaagccggcgctcggcaaggtaggttggcggcctgctctccgacagaacttttcttcttgggttgaggaaaacgccttttggagtcaggccctggaggggcgagccttgctcacaggttctcccaggagaaagccatgttcagttcgagcgccaagatcgtgaagcccaatggcgagaagccggacgagttcgagtccggcatctcccaggctcttctggagctggagatgaactcggacctcaaggctcagctcagggagctgaatattacggcagctaaggaaattgaagttggtggtggtcggaaagctatcataatctttgttcccgttcctcaactgaaatctttccagaaaatccaagtccggctagtacgcgaattggagaaaaagttcagtgggaagcatgtcgtctttatcgctcagaggagaattctgcctaagccaactcgaaaaagccgtacaaaaaataagcaaaagcgtcccaggagccgtactctgacagctgtgcacgatgccatccttgaggacttggtcttcccaagcgaaattgtgggcaagagaatccgcgtcaaactagatggcagccggctcataaaggttcatttggacaaagcacagcagaacaatgtggaacacaaggttgaaactttttctggtgtctataagaagctcacgggcaaggatgttaattttgaattcccagagtttcaattgtaaacaaaaatgactaaataaaaagtatatattcacagta

SEQ ID NO: 176912 - DNA, 704 bp, Homo sapiens
  Payload ID: 14716
  Gene Symbol: RPS7
  Gene Name: ribosomal protein S7
  Uniprot ID: P62081
  ENST ID: ENST00000406376
  CDS Start-End: 101-685
ggcggcctgctctccgacagaacttttcttcttgggttgaggaaaacgccttttggagtcaggccctggaggggcgagccttgctcacagggagaaagccatgttcagttcgagcgccaagatcgtgaagcccaatggcgagaagccggacgagttcgagtccggcatctcccaggctcttctggagctggagatgaactcggacctcaaggctcagctcagggagctgaatattacggcagctaaggaaattgaagttggtggtggtcggaaagctatcataatctttgttcccgttcctcaactgaaatctttccagaaaatccaagtccggctagtacgcgaattggagaaaaagttcagtgggaagcatgtcgtctttatcgctcagaggagaattctgcctaagccaactcgaaaaagccgtacaaaaaataagcaaaagcgtcccaggagccgtactctgacagctgtgcacgatgccatccttgaggacttggtcttcccaagcgaaattgtgggcaagagaatccgcgtcaaactagatggcagccggctcataaaggttcatttggacaaagcacagcagaacaatgtggaacacaaggttgaaactttttctggtgtctataagaagctcacgggcaaggatgttaattttgaattcccagagtttcaattgtaaacaaaaatgactaaataaa

SEQ ID NO: 176913 - DNA, 833 bp, Homo sapiens
  Payload ID: 14716
  Gene Symbol: RPS7
  Gene Name: ribosomal protein S7
  ENST ID: ENST00000407445
  CDS Start-End: 48-611
ggtctcttcctaagccggcgctcggcaagttctcccaggagaaagccatgttcagttcgagcgccaagatcgtgaagcccaatggcgagaagccggacgagttcgagtccggcatctcccaggctcttctggagctggagatgaactcggacctcaaggctcagctcagggagctgaatattacggcagctaaggaaattgaagttggtggtggtcggaaagctatcataatctttgttcccgttcctcaactgaaatctttccagaaaatccaagtccggctagtacgcgaattggagaaaaagttcagtgggaagcatgtcgtctttatcgctcagaggagaattctgcctaagccaactcgaaaaagccgtacaaaaaataagcaaaagcgtcccaggagccgtactctgacagctgtgcacgatgccatccttgaggacttggtcttcccaagcgaaattgtgggcaagagaatccgcgtcaaactagatggcagccggctcataaaggttcatttggacaaagcacagcagaacaatgtggaacacaaggtaataggtcaacattttatcatggaaaggttcagccacagtgagagtggattttagtgtaaccagtctccatgcgccaccatagcaatgactgtagtaaactcaggactagttcttttacccgcacttcagcctgctctcctttggattatgtgtcaggtgttaaatggagatgtttcaagaattgaacacttgaaattctctgtaccttttggaagtagactctttctgtggtcttttagttaggctgtatattcttggtgagttaggggtgggtgg

SEQ ID NO: 176914 - DNA, 685 bp, Homo sapiens
  Payload ID: 14717
  Gene Symbol: RPS8
  Gene Name: ribosomal protein S8
  ENST ID: ENST00000372209
  CDS Start-End: 25-591
tctctttccagccagcgccgagcgatgggcatctctcgggacaactggcacaagcgccgcaaaaccgggggcaagagaaagccctaccacaagaagcggaagtatgagttggggcgcccagctgccaacaccaagattggcccccgccgcatccacacagtccgtgtgcggggaggttgtactcgtaaaacaaggatcatcgatgttgtctacaatgcatctaataacgagctggttcgtaccaagaccctggtgaagaattgcatcgtgctcatcgacagcacaccgtaccgacagtggtacgagtcccactatgcgctgcccctgggccgcaagaagggagccaagctgactcctgaggaagaagagattttaaacaaaaaacgatctaaaaaaattcagaagaaatatgatgaaaggaaaaagaatgccaaaatcagcagtctcctggaggagcagttccagcagggcaagcttcttgcgtgcatcgcttcaaggccgggacagtgtggccgagcagatggctatgtgctagagggcaaagagttggagttctatcttaggaaaatcaaggcccgcaaaggcaaataaatccttgttttgtcttcacccatgtaataaaggtgtttattgttttgttcccacatttatgttgcctgaatatatgactgttttctctgcttta

SEQ ID NO: 176915 - DNA, 881 bp, Homo sapiens
  Payload ID: 14717
  Gene Symbol: RPS8
  Gene Name: ribosomal protein S8
  Uniprot ID: P62241
  ENST ID: ENST00000396651
  CDS Start-End: 161-787
ctcctaggctcgtggccctaggcgcggcagctgacacgtaagtctcgtcgcccgacgttgtttcggcgctcagaaacaacgtaaagtaaaggggcggggcagcgttttacaaaccgaaccgtgaatctttgcggtttctctttccagccagcgccgagcgatgggcatctctcgggacaactggcacaagcgccgcaaaaccgggggcaagagaaagccctaccacaagaagcggaagtatgagttggggcgcccagctgccaacaccaagattggcccccgccgcatccacacagtccgtgtgcggggaggtaacaagaaataccgtgccctgaggttggacgtggggaatttctcctggggctcagagtgttgtactcgtaaaacaaggatcatcgatgttgtctacaatgcatctaataacgagctggttcgtaccaagaccctggtgaagaattgcatcgtgctcatcgacagcacaccgtaccgacagtggtacgagtcccactatgcgctgcccctgggccgcaagaagggagccaagctgactcctgaggaagaagagattttaaacaaaaaacgatctaaaaaaattcagaagaaatatgatgaaaggaaaaagaatgccaaaatcagcagtctcctggaggagcagttccagcagggcaagcttcttgcgtgcatcgcttcaaggccgggacagtgtggccgagcagatggctatgtgctagagggcaaagagttggagttctatcttaggaaaatcaaggcccgcaaaggcaaataaatccttgttttgtcttcacccatgtaataaaggtgtttattgttttgttcccacatttatgttgcctgaatatatgactgttttctctgcttta

SEQ ID NO: 176916 - DNA, 829 bp, Homo sapiens
  Payload ID: 14718
  Gene Symbol: RPS9
  Gene Name: ribosomal protein S9
  Uniprot ID: P46781
  ENST ID: ENST00000302907
  CDS Start-End: 173-757
tccactgcttctcagccagccaacgcctcttctgattggctctgacgtgcgtggtgcgtgaaaacgtcacgagacgccggcgttactataagagcgcagccgtggcgcttccgcgcctctttctcagtgaccgggtggtttgcttaggcgcagacggggaagcggagccaacatgccagtggcccggagctgggtttgtcgcaaaacttatgtgaccccgcggagacccttcgagaaatctcgtctcgaccaagagctgaagctgatcggcgagtatgggctccggaacaaacgtgaggtctggagggtcaaatttaccctggccaagatccgcaaggccgcccgggaactgctgacgcttgatgagaaggacccacggcgtctgttcgaaggcaacgccctgctgcggcggctggtccgcattggggtgctggatgagggcaagatgaagctggattacatcctgggcctgaagatagaggatttcttagagagacgcctgcagacccaggtcttcaagctgggcttggccaagtccatccaccacgctcgcgtgctgatccgccagcgccatatcagggtccgcaagcaggtggtgaacatcccgtccttcattgtccgcctggattcccagaagcacatcgacttctctctgcgctctccctacgggggtggccgcccgggccgcgtgaagaggaagaatgccaagaagggccagggtggggctggggctggagacgacgaggaggaggattaagtccacctgtccctcctgggctgctggattgtctcgttttcctgccaaataaacaggatcagcgctttacaa

SEQ ID NO: 176917 - DNA, 510 bp, Homo sapiens
  Payload ID: 14718
  Gene Symbol: RPS9
  Gene Name: ribosomal protein S9
  ENST ID: ENST00000391751
  CDS Start-End: 41-280
gggtggtttgcttaggcgcagacggggaagcggagccaacatgccagtggcccggagctgggtttgtcgcaaaacttatgtgaccccgcggagacccttcgagaaatctcgtctcgaccaagagctgaagctgatcggcgagtatgggctccggaacaaacgtgaggtctggagggtcaaatttaccctggccaagatccgcaaggccgcccgggaactgctgacgcttgatgagaaggacccacggcgtctgttcgaagggtccgcaagcaggtggtgaacatcccgtccttcattgtccgcctggattcccagaagcacatcgacttctctctgcgctctccctacgggggtggccgcccgggccgcgtgaagaggaagaatgccaagaagggccagggtggggctggggctggagacgacgaggaggaggattaagtccacctgtccctcctgggctgctggattgtctcgttttcctgccaaataaacaggatcagcgctttacaa

SEQ ID NO: 176918 - DNA, 772 bp, Homo sapiens
  Payload ID: 14718
  Gene Symbol: RPS9
  Gene Name: ribosomal protein S9
  Uniprot ID: P46781
  ENST ID: ENST00000391752
  CDS Start-End: 116-700
ccgggtggtttgcttaggtgaggtgcggtggtgtgctttttctctagggtttgggttggatggtggcccgggccttccgagtttccatgagcgcagacggggaagcggagccaacatgccagtggcccggagctgggtttgtcgcaaaacttatgtgaccccgcggagacccttcgagaaatctcgtctcgaccaagagctgaagctgatcggcgagtatgggctccggaacaaacgtgaggtctggagggtcaaatttaccctggccaagatccgcaaggccgcccgggaactgctgacgcttgatgagaaggacccacggcgtctgttcgaaggcaacgccctgctgcggcggctggtccgcattggggtgctggatgagggcaagatgaagctggattacatcctgggcctgaagatagaggatttcttagagagacgcctgcagacccaggtcttcaagctgggcttggccaagtccatccaccacgctcgcgtgctgatccgccagcgccatatcagggtccgcaagcaggtggtgaacatcccgtccttcattgtccgcctggattcccagaagcacatcgacttctctctgcgctctccctacgggggtggccgcccgggccgcgtgaagaggaagaatgccaagaagggccagggtggggctggggctggagacgacgaggaggaggattaagtccacctgtccctcctgggctgctggattgtctcgttttcctgccaaataaacaggatcagcgctttacaa

SEQ ID NO: 176919 - DNA, 709 bp, Homo sapiens
  Payload ID: 14718
  Gene Symbol: RPS9
  Gene Name: ribosomal protein S9
  Uniprot ID: P46781
  ENST ID: ENST00000391753
  CDS Start-End: 53-637
ttacgctcacacttctctcccgcgcaggcgcagacggggaagcggagccaacatgccagtggcccggagctgggtttgtcgcaaaacttatgtgaccccgcggagacccttcgagaaatctcgtctcgaccaagagctgaagctgatcggcgagtatgggctccggaacaaacgtgaggtctggagggtcaaatttaccctggccaagatccgcaaggccgcccgggaactgctgacgcttgatgagaaggacccacggcgtctgttcgaaggcaacgccctgctgcggcggctggtccgcattggggtgctggatgagggcaagatgaagctggattacatcctgggcctgaagatagaggatttcttagagagacgcctgcagacccaggtcttcaagctgggcttggccaagtccatccaccacgctcgcgtgctgatccgccagcgccatatcagggtccgcaagcaggtggtgaacatcccgtccttcattgtccgcctggattcccagaagcacatcgacttctctctgcgctctccctacgggggtggccgcccgggccgcgtgaagaggaagaatgccaagaagggccagggtggggctggggctggagacgacgaggaggaggattaagtccacctgtccctcctgggctgctggattgtctcgttttcctgccaaataaacaggatcagcgctttacaa

SEQ ID NO: 176920 - DNA, 1617 bp, Homo sapiens
  Payload ID: 14718
  Gene Symbol: RPS9
  Gene Name: ribosomal protein S9
  ENST ID: ENST00000402367
  CDS Start-End: 116-535
ccgggtggtttgcttaggtgaggtgcggtggtgtgctttttctctagggtttgggttggatggtggcccgggccttccgagtttccatgagcgcagacggggaagcggagccaacatgccagtggcccggagctgggtttgtcgcaaaacttatgtgaccccgcggagacccttcgagaaatctcgtctcgaccaagagctgaagctgatcggcgagtatgggctccggaacaaacgtgaggtctggagggtcaaatttaccctggccaagatccgcaaggccgcccgggaactgctgacgcttgatgagaaggacccacggcgtctgttcgaaggcaacgccctgctgcggcggctggtccgcattggggtgctggatgagggcaagatgaagctggattacatcctgggcctgaagatagaggatttcttagagagacgcctgcagacccaggtcttcaagctgggcttggccaagtccatccaccacgctcgcgtgctgatccgccagcgccatatcagccctcggaggtgatgggtgtgaactcacccagagggtacagattcacccttgcacacagctcaccagggagctggggcagcctcttgccccaatagcccagcgcaagggtcactgcggctctagccgtacaccttgtgaaggcctctgccaggcatgtgggcagctggacaggtaacagctcttggtgtccccagtggagggagagaaccagcctcacctcgcttgggtggtgggttcagctgtctcctggcccgcttgtgaagttgattccagaccccgatccatgactgcgttctgggtactcagtgtgccctttctgtaatgtggcaccattgagggggaggagctgtacagaaagagggcaagatgtttgcgtttagaatcttcgccccagcccttcactaaccctgtgagccgtaggcagagccttgtgtgtcaatgctttcgtcggagacgtagcctcgggttgctgtgttattgtgggcattgctgctgcacgtggtaatacagctcagtgtcaggtgtggggttcacgatatttcagactcggaacttgggggctctcacatggccatctcatttgctttgtggtcttaggtgggatactttcggatttctcctataaaatggggttgagaaagtcatctgaagcatttttggggattaaggtgataccctaaaaccccggagggcgcacgtaggatcaggtgcacccttcctgcagcgccttggtgtctgcagccgtggcggcctcacggggtgggtggagaggaaagagtggtgcggtagctggggttagcgtccgtttctcctccagtccacctcaccttgtcgctgcttccagggtccgcaagcaggtggtgaacatcccgtccttcattgtccgcctggattcccagaagcacatcgacttctctctgcgctctccctacgggggtggccgcccgggccgcgtgaagaggaagaatgccaagaagggccagggtggggctggggctggagacgacgaggaggaggattaagtccacctgtccctcctgggctgctggattgtctcgttttcctgccaaataaacaggatcagcgctttacaa

SEQ ID NO: 176921 - DNA, 944 bp, Homo sapiens
  Payload ID: 14718
  Gene Symbol: RPS9
  Gene Name: ribosomal protein S9
  ENST ID: ENST00000445961
  CDS Start-End: 116-535
ccgggtggtttgcttaggtgaggtgcggtggtgtgctttttctctagggtttgggttggatggtggcccgggccttccgagtttccatgagcgcagacggggaagcggagccaacatgccagtggcccggagctgggtttgtcgcaaaacttatgtgaccccgcggagacccttcgagaaatctcgtctcgaccaagagctgaagctgatcggcgagtatgggctccggaacaaacgtgaggtctggagggtcaaatttaccctggccaagatccgcaaggccgcccgggaactgctgacgcttgatgagaaggacccacggcgtctgttcgaaggcaacgccctgctgcggcggctggtccgcattggggtgctggatgagggcaagatgaagctggattacatcctgggcctgaagatagaggatttcttagagagacgcctgcagacccaggtcttcaagctgggcttggccaagtccatccaccacgctcgcgtgctgatccgccagcgccatatcagccctcggaggtgatgggtgtgaactcacccagagggtacagattcacccttgcacacagctcaccagggagctggggcagcctcttgccccaatagcccagcgcaagggtcactgcggctctagccgtacaccttgtgaaggcctctgccaggcatgtgggcagctggacagggtccgcaagcaggtggtgaacatcccgtccttcattgtccgcctggattcccagaagcacatcgacttctctctgcgctctccctacgggggtggccgcccgggccgcgtgaagaggaagaatgccaagaagggccagggtggggctggggctggagacgacgaggaggaggattaagtccacctgtccctcctgggctgctggattgtctcgttttcctgccaaataaacaggatcagcgctttacaa

SEQ ID NO: 176922 - DNA, 2384 bp, Homo sapiens
  Payload ID: 14718
  Gene Symbol: RPS9
  Gene Name: ribosomal protein S9
  ENST ID: ENST00000448962
  CDS Start-End: 57-290
ctctttctcagtgaccgggtggtttgcttaggcgcagacggggaagcggagccaacatgccagtggcccggagctgggtttgtcgcaaaacttatgtgaccccgcggagacccttcgagaaatctcgtctcgaccaagagctgaagctgatcggcgagtatgggctccggaacaaacgtgaggtctggagggtcaaatttaccctggccaagatccgcaaggccgcccgggaactgctgacgcttgatgagaaggacccacggcgtctgttcgaaggcgggagcctctgattcctggcggagagccacagtgagcccagcagaacccatctgagcgccagcatccagcccggtcaggaggatttgctgccccctcctggtggaatgcgcgccatgtcgtcaagcggccaccagatgactcgctcgctggtccactcaaaggcatcacatccagagcgctctgctggtcacagatttttcagctgggactttctggagctgtttttctaagctgactttcttgtgtgtttggttcccctttggttggtgccctgatcccaccctcggtgggcccacaggttcccccagtccctgctcacccaatgtcctgtgtttgctctgacgccgacattggaggaggaggacgagcggcaggacaaaggccactgagaccccggttacaacccccaggtatcttcccagaccttgcgcgtgatgacgtcgggaatgaggatgacatcgctgatgtgagcacctactgtgtgcaggcgcgtgctgggtcttcatgagctctaaccctcacagcagtcgtgcaacgtgggattgccaaccccccaacccatttcacagatgcacaaactgaggctcagaggggggaatcgcctgccccaggccccccagcctggaagaagcaggtctgggaggggaacctgggaccttgtgttttccccagctgtcctcctgctgccccaccaggtggacacctgcttcctgctctgggtcttctcatctgacagcaggggcctgtcttagtgtctccatctggggctgtgtcctccttacaaccctcccttccccagcacagcagggcctgggggagggagtgggctgtacaggacggaccctgcattgctctcacccccagcccagccaggtccatctcctactctgccaatccctgaccttcccatgcagagcctttgaccacagactgaagggctgcactgtcggcttctcggcttctgaggttttggtactcggactagcttccttgctcctcagcttacagacagtctattgtgggacctcaccttgtgatcgtgtggatcaatactccttaataaactcccctttatatatacatctatcctgttagttctgcccctctagagaaccctgactaatacatgtttctgaaatacgcagccatagaaggaaatgagaaatgaaacttcctgacacaggcaggaaacctcaggaagcagcgaggtcagagctgagttggcttctggtgacttgcaatgtcagggaatcactaaaagggaggtttccgcctctatatgagacagaggagaaccccagggccctcacagtcagggaggggttggggttttgggtgaaagtgggaagttgtggctcctcgtcccctgtgtttgtggatggcactggggtatctctgctcattgactcaggtttatggtcagccctgagcctccccctctgtgtgtgtgaaatagattcattgtagagttgtcagacatgaggttcacactggaccctcccctgctggttacaggcctgagcagactcacaagacccgggcaggtggtgccgtcctcctcttttcaagcctaacgcccagtgcagccctggtagaaaccctctctggcagatgaggcactgggagatgagtgtccaagaatgagaagaaagaggaatcatcctaatgataaaaagtgctatgactggctgcctgcgatggctcacgcctattttcccagcgctctgggaggccgaggtgggcagatcgctggagcccaggagttcgagaccagcctgggcaacatggtgaaaccccatctctactaaaaagacaaaaatgaactgggtgtggtggtgcacacctgtagttccagctacttaggagcctgaggtcgaagatcgcttgagtctggcaggcggaggttgcagtgaactggggtggtgcgccactgcactttagcctgggtgacagagcaagaacctgtctcaaaaacaaacacaggctgggcgtggtggctcacgcctgtaatcccagcactttgggaggccgaggcaggcagatcatgaggtcaagagatcgagaccatcctggccacacggtgaaaccccatctctactaaaaat

SEQ ID NO: 176923 - DNA, 752 bp, Homo sapiens
  Payload ID: 14718
  Gene Symbol: RPS9
  Gene Name: ribosomal protein S9
  ENST ID: ENST00000436445
  CDS Start-End: 49-468
accgggtggtttgcttaggtgaggcgcagacggggaagcggagccaacatgccagtggcccggagctgggtttgtcgcaaaacttatgtgaccccgcggagacccttcgagaaatctcgtctcgaccaagagctgaagctgatcggcgagtatgggctccggaacaaacgtgaggtctggagggtcaaatttaccctggccaagatccgcaaggccgcccgggaactgctgacgcttgatgagaaggacccacggcgtctgttcgaaggcaacgccctgctgcggcggctggtccgcattggggtgctggatgagggcaagatgaagctggattacatcctgggcctgaagatagaggatttcttagagagacgcctgcagacccaggtcttcaagctgggcttggccaagtccatccaccacgctcgcgtgctgatccgccagcgccatatcagccctcggaggtgatgggtgtgaactcacccagagggtacagattcacccttgcacacagctcaccagggagctggggcagcctcttgccccaatagcccagcgcaagggtcactgcggctctagccgtacaccttgtgaaggcctctgccaggcatgtgggcagctggacagggtccgcaagcaggtggtgaacatcccgtccttcattgtccgcctggattcccagaagcacatcgacttctctctgcgctctccctacgggggtggccgcccgggccgcgtgaagaggaagaatg

SEQ ID NO: 176924 - DNA, 1600 bp, Homo sapiens
  Payload ID: 14718
  Gene Symbol: RPS9
  Gene Name: ribosomal protein S9
  ENST ID: ENST00000441429
  CDS Start-End: 26-496
gcgcagacggggaagcggagccaacatgccagtggcccggagctgggtttgtcgcaaaacttatgtgaccccgcggagacccttcgagaaatctcgtctcgaccaagagctgaagctgatcggcgagtatgggctccggaacaaacgtgaggtctggagggtcaaatttaccctggccaagatccgcaaggccgcccgggaactgctgacgcttgatgagaaggacccacggcgtctgttcgaaggcaacgccctgctgcggcggctggtccgcattggggtgctggatgagggcaagatgaagctggattacatcctgggcctgaagatagaggatttcttagagagacgcctgcagacccaggtcttcaagctgggcttggccaagtccatccaccacgctcgcgtgctgatccgccagcgccatatcaggtaccacctcggatgggcacctgaatcttcctccacctgcccctctgatggttgccctcactaagcctgctgtccctatctcctatgcagccctcggaggtgatgggtgtgaactcacccagagggtacagattcacccttgcacacagctcaccagggagctggggcagcctcttgccccaatagcccagcgcaagggtcactgcggctctagccgtacaccttgtgaaggcctctgccaggcatgtgggcagctggacaggtaacagctcttggtgtccccagtggagggagagaaccagcctcacctcgcttgggtggtgggttcagctgtctcctggcccgcttgtgaagttgattccagaccccgatccatgactgcgttctgggtactcagtgtgccctttctgtaatgtggcaccattgagggggaggagctgtacagaaagagggcaagatgtttgcgtttagaatcttcgccccagcccttcactaaccctgtgagccgtaggcagagccttgtgtgtcaatgctttcgtcggagacgtagcctcgggttgctgtgttattgtgggcattgctgctgcacgtggtaatacagctcagtgtcaggtgtggggttcacgatatttcagactcggaacttgggggctctcacatggccatctcatttgctttgtggtcttaggtgggatactttcggatttctcctataaaatggggttgagaaagtcatctgaagcatttttggggattaaggtgataccctaaaaccccggagggcgcacgtaggatcaggtgcacccttcctgcagcgccttggtgtctgcagccgtggcggcctcacggggtgggtggagaggaaagagtggtgcggtagctggggttagcgtccgtttctcctccagtccacctcaccttgtcgctgcttccagggtccgcaagcaggtggtgaacatcccgtccttcattgtccgcctggattcccagaagcacatcgacttctctctgcgctctccctacgggggtggccgcccgggccgcgtgaagaggaagaatgccaagaagggccagggtggggctggggctggagacgacgaggaggaggattaagtccacctgtccctcctgggctgctggattgtctcgttttcctgccaaataaaca

SEQ ID NO: 176925 - DNA, 944 bp, Homo sapiens
  Payload ID: 14718
  Gene Symbol: RPS9
  Gene Name: ribosomal protein S9
  ENST ID: ENST00000610644
  CDS Start-End: 116-535
ccgggtggtttgcttaggtgaggtgcggcggtgtgctttttctctagggtttgggttggatggtggcccgggccttccgagtttccatgagcgcagacggggaagcggagccaacatgccagtggcccggagctgggtttgtcgcaaaacttatgtgaccccgcggagacccttcgagaaatctcgtctcgaccaagagctgaagctgatcggcgagtatgggctccggaacaaacgtgaggtctggagggtcaaatttaccctggccaagatccgcaaggccgcccgggaactgctgacgcttgatgagaaggacccacggcgtctgttcgaaggcaacgccctgctgcggcggctggtccgcattggggtgctggatgagggcaagatgaagctggattacatcctgggcctgaagatagaggatttcttagagagacgcctgcagacccaggtcttcaagctgggcttggccaagtccatccaccacgctcgcgtgctgatccgccagcgccatatcagccctcggaggtgatgggtgtgaactcacccagagggtacagattcacccttgcacacagctcaccagggagctggggcagcctcttgccccaatagcccagcgcaagggtcactgcggctctagccgtacaccttgtgaaggcctctgccaggcatgtgggcagctggacagggtccgcaagcaggtggtgaacatcccgtccttcattgtccgcctggattcccagaagcacatcgacttctctctgcgctctccctacgggggtggccgcccgggccgcgtgaagaggaagaatgccaagaagggccagggtggggctggggctggagacgacgaggaggaggattaagtccacctgtccctcctgggctgctggattgtctcgttttcctgccaaataaacaggatcagcgctttacaa

SEQ ID NO: 176926 - DNA, 709 bp, Homo sapiens; identical to SEQ ID NO: 176919
  Payload ID: 14718
  Gene Symbol: RPS9
  Gene Name: ribosomal protein S9
  Uniprot ID: P46781
  ENST ID: ENST00000619229
  CDS Start-End: 53-637

SEQ ID NO: 176927 - DNA, 709 bp, Homo sapiens; identical to SEQ ID NO: 176919
  Payload ID: 14718
  Gene Symbol: RPS9
  Gene Name: ribosomal protein S9
  Uniprot ID: P46781
  ENST ID: ENST00000611921
  CDS Start-End: 53-637

SEQ ID NO: 176928 - DNA, 1600 bp, Homo sapiens
  Payload ID: 14718
  Gene Symbol: RPS9
  Gene Name: ribosomal protein S9
  ENST ID: ENST00000611572
  CDS Start-End: 26-496
gcgcagacggggaagcggagccaacatgccagtggcccggagctgggtttgtcgcaaaacttatgtgaccccgcggagacccttcgagaaatctcgtctcgaccaagagctgaagctgatcggcgagtatgggctccggaacaaacgtgaggtctggagggtcaaatttaccctggccaagatccgcaaggccgcccgggaactgctgacgcttgatgagaaggacccacggcgtctgttcgaaggcaacgccctgctgcggcggctggtccgcattggggtgctggatgagggcaagatgaagctggattacatcctgggcctgaagatagaggatttcttagagagacgcctgcagacccaggtcttcaagctgggcttggccaagtccatccaccacgctcgcgtgctgatccgccagcgccatatcaggtaccacctcggatgggcacctgaatcttcctccacctgcccctctgatggttgccctcactaagcctgctgtccctatctcctatgcagccctcggaggtgatgggtgtgaactcacccagagggtacagattcacccttgcacacagctcaccagggagctggggcagcctcttgccccaatagcccagcgcaagggtcactgcggctctagccgtacaccttgtgaaggcctctgccaggcatgtgggcagctggacaggtaacagctcttggtgtccccagtggagggagagaaccagcctcacctcgcttgggtggtgggttcagctgtctcctggctcgcttgtgaagttgattccagaccccgatccatgactgcgttctgggtactcagtgtgccctttctgtaatgtggcaccattgagggggaggagctgtacagaaagagggcaagatgtttgcgtttagaatcttcgccccagcccttcactaaccctgtgagccgtaggcagagccttgtgtgtcaatgctttcgtcggagacgtagcctcgggttgctgtgttattgtgggcattgctgctgcacgtggtaatacagctcagtgtcaggtgtggggttcacgatatttcagactcggaacttgggggctctcacatggccatctcatttgctttgtggtcttaggtgggatactttcagatttctcctataaaatggggttgagaaagtcatctgaagcatttttggggattaaggtgataccctaaaaccccggagggcgcacgtaggatcaggtgcacccttcctgcagcgccttggtgtctgcagccgtggcggcctcacggggtgggtggagaggaaagagtggtgcggtagctggggttagcgtccgtttctcctccagtccacctcaccttgtcgcttcttccagggtccgcaagcaggtggtgaacatcccgtccttcattgtccgcctggattcccagaagcacatcgacttctctctgcgctctccctacgggggtggccgcccgggccgcgtgaagaggaagaatgccaagaagggccagggtggggctggggctggagacgacgaggaggaggattaagtccacctgtccctcctgggctgctggattgtctcgttttcctgccaaataaaca

SEQ ID NO: 176929 - DNA, 2384 bp, Homo sapiens
  Payload ID: 14718
  Gene Symbol: RPS9
  Gene Name: ribosomal protein S9
  ENST ID: ENST00000620356
  CDS Start-End: 57-290
ctctttctcagtgaccgggtggtttgcttaggcgcagacggggaagcggagccaacatgccagtggcccggagctgggtttgtcgcaaaacttatgtgaccccgcggagacccttcgagaaatctcgtctcgaccaagagctgaagctgatcggcgagtatgggctccggaacaaacgtgaggtctggagggtcaaatttaccctggccaagatccgcaaggccgcccgggaactgctgacgcttgatgagaaggacccacggcgtctgttcgaaggcgggagcctctgattcctggcggagagccacagtgagcccagcagaacccatctgagcgccagcatccagcccggtcaggaggatttgctgccccctcctggtggaatgcgcgccatgtcgtcaagcggccaccagatgactcgctcgctggtccactcaaaggcatcacatccagagcgctctgctggtcacagatttttcagctgggactttctggagctgtttttctaagctgactttcttgtgtgtttggttcccctttggttggtgccctgatcccaccctcggtgggcccacaggttcccccattccctgctcacccaatgtcctgtgtttgctctgacgccgacattggaggaggaggacgagcggcaggacaaaggccactgagaccccggttacaacccccaggtatcttcccagaccttgcgcgtgatgacgtcgggaatgaggatgacatcgctgatgtgagcacctactgtgtgcaggcgcgtgctgggtcttcatgagctctaaccctcacagcagtcgtgcaacgtgggattgccaaccccccaacccatttcacagatgcacaaactgaggctcagaggggggaatcgcctgccccaggccccccagcctggaagaagcaggtctgggaggggaacctgggaccttgtgttttccccagctgtcctcctgctgccccaccaggtggacacctgcttcctgctctgggtcttctcatctgacagcaggggcctgtcttagtgtctccatctggggctgtgtcctccttacaaccctcccttccccagcacagcagggcctgggggagggagtgggctgtacaggacggaccctgcattgctctcacccccagcccagccaggtccatctcctactctgccaatccctgaccttcccatgcagagcctttgaccacagactgaagggctgcactgtcggcttctcggcttctgaggttttggtactcggactagcttccttgctcctcagcttacagacagtctattgtgggacctcaccttgtgatcgtgtggatcaatactccttaataaactcccctttatatatacatctatcctgttagttctgcccctctagagaaccctgactaatacatgtttctgaaatacgcagccatagaaggaaatgagaaatgaaacttcctgacacaggcaggaaacctcaggaagcagcgaggtcagagctgagttggcttctggtgacttgcaatgtcagggaatcactaaaagggaggtttccgcctctatatgagacagaggagaaccccagggccctcacagtcagggaggggttggggttttgggtgaaagtgggaagttgtggctcctcgtcccctgtgtttgtggatggcactggggtatctctgctcattgactcaggtttatggtcagccctgagcctccccctctgtgtgtgtgaaatagattcattgtagagttgtcagacatgaggttcacactggaccctcccctgctggttacaggcctgagcagactcacaagacccgggcaggtggtgccgtcctcctcttttcaagcctaacgcccagtgcagccctggtagaaaccctctctggcagatgaggcactgggagatgagtgtccaagaatgagaagaaagaggaatcatcctaatgataaaaagtgctatgactggctgcctgcgatggctcacgcctattttcccagcgctctgggaggccgaggtgggcagatcgctggagcccaggagttcgagaccagcctgggcaacatggtgaaaccccatctctactaaaaagacaaaaatgaactgggtgtggtggtgcacacctgtagttccagctacttaggagtctgaggtcgaagatcgcttgagtctggcaggcggaggttgcagtgaactggggtggtgcgccactgcactttagcctgggtgacagagcaagaccctgtctcaaaaacaaacacaggctgggcgtggtggctcacgcctgtaatcccagcactttgggaggccgaggcaggcagatcatgaggtcaagagatcgagaccatcctggccacacggtgaaaccccatctctactaaaaat

SEQ ID NO: 176930 - DNA, 711 bp, Homo sapiens; identical to SEQ ID NO: 103487
  Payload ID: 14718
  Gene Symbol: RPS9
  Gene Name: ribosomal protein S9
  Uniprot ID: P46781
  ENST ID: ENST00000616877
  CDS Start-End: 57-641

SEQ ID NO: 176931 - DNA, 709 bp, Homo sapiens
  Payload ID: 14718
  Gene Symbol: RPS9
  Gene Name: ribosomal protein S9
  Uniprot ID: P46781
  ENST ID: ENST00000615346
  CDS Start-End: 53-637
ttacgctcacacttctctcccgcgcaggcgcagacggggaagcggagccaacatgccagtggcccggagctgggtttgtcgcaaaacttatgtgaccccgcggagacccttcgagaaatctcgtctcgaccaagagctgaagctgatcggcgagtatgggctccggaacaaacgtgaggtctggagggtcaaatttaccctggccaagatccgcaaggccgcccgggaactgctgacgcttgatgagaaggacccacggcgtctgttcgaaggcaacgccctgctgcggcggctggtccgcattggggtgctggatgagggcaagatgaagctggattacatcctgggcctgaagatagaggatttcttagagagacgcctgcagacccaggtcttcaagctgggcttggccaagtccatccaccacgctcgcgtgctgatccgccagcgccatatcagggtccgcaagcaggtggtgaacatcccgtccttcattgtccgcctggattcccagaagcacattgacttctctctgcgctctccctacgggggtggccgcccgggccgcgtgaagaggaagaatgccaagaagggccagggtggggctggggctggagacgacgaggaggaggattaagtccacctgtccctcctgggctgctggattgtctcgttttcctgccaaataaacaggatcagcgctttacaa

SEQ ID NO: 176932 - DNA, 772 bp, Homo sapiens
  Payload ID: 14718
  Gene Symbol: RPS9
  Gene Name: ribosomal protein S9
  Uniprot ID: P46781
  ENST ID: ENST00000610826
  CDS Start-End: 116-700
ccgggtggtttgcttaggtgaggtgcggcggtgtgctttttctctagggtttgggttggatggtggcccgggccttccgagtttccatgagcgcagacggggaagcggagccaacatgccagtggcccggagctgggtttgtcgcaaaacttatgtgaccccgcggagacccttcgagaaatctcgtctcgaccaagagctgaagctgatcggcgagtatgggctccggaacaaacgtgaggtctggagggtcaaatttaccctggccaagatccgcaaggccgcccgggaactgctgacgcttgatgagaaggacccacggcgtctgttcgaaggcaacgccctgctgcggcggctggtccgcattggggtgctggatgagggcaagatgaagctggattacatcctgggcctgaagatagaggatttcttagagagacgcctgcagacccaggtcttcaagctgggcttggccaagtccatccaccacgctcgcgtgctgatccgccagcgccatatcagggtccgcaagcaggtggtgaacatcccgtccttcattgtccgcctggattcccagaagcacatcgacttctctctgcgctctccctacgggggtggccgcccgggccgcgtgaagaggaagaatgccaagaagggccagggtggggctggggctggagacgacgaggaggaggattaagtccacctgtccctcctgggctgctggattgtctcgttttcctgccaaataaacaggatcagcgctttacaa

SEQ ID NO: 176933 - DNA, 772 bp, Homo sapiens
  Payload ID: 14718
  Gene Symbol: RPS9
  Gene Name: ribosomal protein S9
  Uniprot ID: P46781
  ENST ID: ENST00000616536
  CDS Start-End: 116-700
ccgggtggtttgcttaggtgcggtgcggtggtgtgctttttctctagggtttgggttggatggtggcccgggccttccgagtttccatgagcgcagacggggaagcggagccaacatgccagtggcccggagctgggtttgtcgcaaaacttatgtgaccccgcggagacccttcgagaaatctcgtctcgaccaagagctgaagctgatcggcgagtatgggctccggaacaaacgtgaggtctggagggtcaaatttaccctggccaagatccgcaaggccgcccgggaactgctgacgcttgatgagaaggacccacggcgtctgttcgaaggcaacgccctgctgcggcggctggtccgcattggggtgctggatgagggcaagatgaagctggattacatcctgggcctgaagatagaggatttcttagagagacgcctgcagacccaggtcttcaagctgggcttggccaagtccatccaccacgctcgcgtgctgatccgccagcgccatatcagggtccgcaagcaggtggtgaacatcccgtccttcattgtccgcctggattcccagaagcacatcgacttctctctgcgctctccctacgggggtggccgcccgggccgcgtgaagaggaagaatgccaagaagggccagggtggggctggggctggagacgacgaggaggaggattaagtccacctgtccctcctgggctgctggattgtctcgttttcctgccaaataaacaggatcagcgctttacaa

SEQ ID NO: 176934 - DNA, 510 bp, Homo sapiens; identical to SEQ ID NO: 176917
  Payload ID: 14718
  Gene Symbol: RPS9
  Gene Name: ribosomal protein S9
  ENST ID: ENST00000615167
  CDS Start-End: 41-280

SEQ ID NO: 176935 - DNA, 829 bp, Homo sapiens
  Payload ID: 14718
  Gene Symbol: RPS9
  Gene Name: ribosomal protein S9
  Uniprot ID: P46781
  ENST ID: ENST00000614737
  CDS Start-End: 173-757
tccactgcttctcagccagccaacgcctcttctgattggctctgacgtgcgtggtgcgtgaaaacgtcacgagacgccggcgttactataagagcgcagccgtggcgcttgcgcgcctctttctcagtgaccgggtggtttgcttaggcgcagacggggaagcggagccaacatgccagtggcccggagctgggtttgtcgcaaaacttatgtgaccccgcggagacccttcgagaaatctcgtctcgaccaagagctgaagctgatcggcgagtatgggctccggaacaaacgtgaggtctggagggtcaaatttaccctggccaagatccgcaaggccgcccgggaactgctgacgcttgatgagaaggacccacggcgtctgttcgaaggcaacgccctgctgcggcggctggtccgcattggggtgctggatgagggcaagatgaagctggattacatcctgggcctgaagatagaggatttcttagagagacgcctgcagacccaggtcttcaagctgggcttggccaagtccatccaccacgctcgcgtgctgatccgccagcgccatatcagggtccgcaagcaggtggtgaacatcccgtccttcattgtccgcctggattcccagaagcacatcgacttctctctgcgctctccctacgggggtggccgcccgggccgcgtgaagaggaagaatgccaagaagggccagggtggggctggggctggagacgacgaggaggaggattaagtccacctgtccctcctgggctgctggattgtctcgttttcctgccaaataaacaggatcagcgctttacaa

SEQ ID NO: 176936 - DNA, 711 bp, Homo sapiens
  Payload ID: 14718
  Gene Symbol: RPS9
  Gene Name: ribosomal protein S9
  Uniprot ID: P46781
  ENST ID: ENST00000616082
  CDS Start-End: 57-641
ctctttctcagtgaccgggtggtttgcttaggcgcagacggggaagcggagccaacatgccagtggcccggagctgggtttgtcgcaaaacttatgtgaccccgcggagacccttcgagaaatctcgtctcgaccaagagctgaagctgatcggcgagtatgggctccggaacaaacgtgaggtctggagggtcaaatttaccctggccaagatccgcaaggccgcccgggaactgctgacgcttgatgagaaggacccacggcgtctgttcgaaggcaacgccctgctgcggcggctggtccgcattggggtgctggatgagggcaagatgaagctggattacatcctgggcctgaagatagaggatttcttagagagacgcctgcagacccaggtcttcaagctgggcttggccaagtccatccaccacgctcgcgtgctgatccgccagcgccatatcagggtccgcaagcaggtggtgaacatcccgtccttcattgtccgcctggattcccagaagcacattgacttctctctgcgctctccctacgggggtggccgcccgggccgcgtgaagaggaagaatgccaagaagggccagggtggggctggggctggagacgacgaggaggaggattaagtccacctgtccctcctgggctgctggattgtctcgttttcctgccaaataaacaggatcagcgctttac

SEQ ID NO: 176937 - DNA, 752 bp, Homo sapiens; identical to SEQ ID NO: 176923
  Payload ID: 14718
  Gene Symbol: RPS9
  Gene Name: ribosomal protein S9
  ENST ID: ENST00000620740
  CDS Start-End: 49-468

SEQ ID NO: 176938 - DNA, 771 bp, Homo sapiens
  Payload ID: 14718
  Gene Symbol: RPS9
  Gene Name: ribosomal protein S9
  Uniprot ID: P46781
  ENST ID: ENST00000620940
  CDS Start-End: 115-699
cgggtggtttgcttaggtgaggtgcggtggtgtgctttttctctagggtttgggttggatggtggcccgggccttccgagtttccatgagcgcagacggggaagcggagccaacatgccagtggcccggagctgggtttgtcgcaaaacttatgtgaccccgcggagacccttcgagaaatctcgtctcgaccaagagctgaagctgatcggcgagtatgggctccggaacaaacgtgaggtctggagggtcaaatttaccctggccaagatccgcaaggccgcccgggaactgctgacgcttgatgagaaggacccacggcgtctgttcgaaggcaacgccctgctgcggcggctggtccgcattggggtgctggatgagggcaagatgaagctggattacatcctgggcctgaagatagaggatttcttagagagacgcctgcagacccaggtcttcaagctgggcttggccaagtccatccaccacgctcgcgtgctgatccgccagcgccatatcagggtccgcaagcaggtggtgaacatcccgtccttcattgtccgcctggattcccagaagcacattgacttctctctgcgctctccctacgggggtggccgcccgggccgcgtgaagaggaagaatgccaagaagggccagggtggggctggggctggagacgacgaggaggaggattaagtccacctgtccctcctgggctgctggattgtctcgttttcctgccaaataaacaggatcagcgctttacaa

SEQ ID NO: 176939 - DNA, 1617 bp, Homo sapiens
  Payload ID: 14718
  Gene Symbol: RPS9
  Gene Name: ribosomal protein S9
  ENST ID: ENST00000614095
  CDS Start-End: 116-535
ccgggtggtttgcttaggtgaggtgcggcggtgtgctttttctctagggtttgggttggatggtggcccgggccttccgagtttccatgagcgcagacggggaagcggagccaacatgccagtggcccggagctgggtttgtcgcaaaacttatgtgaccccgcggagacccttcgagaaatctcgtctcgaccaagagctgaagctgatcggcgagtatgggctccggaacaaacgtgaggtctggagggtcaaatttaccctggccaagatccgcaaggccgcccgggaactgctgacgcttgatgagaaggacccacggcgtctgttcgaaggcaacgccctgctgcggcggctggtccgcattggggtgctggatgagggcaagatgaagctggattacatcctgggcctgaagatagaggatttcttagagagacgcctgcagacccaggtcttcaagctgggcttggccaagtccatccaccacgctcgcgtgctgatccgccagcgccatatcagccctcggaggtgatgggtgtgaactcacccagagggtacagattcacccttgcacacagctcaccagggagctggggcagcctcttgccccaatagcccagcgcaagggtcactgcggctctagccgtacaccttgtgaaggcctctgccaggcatgtgggcagctggacaggtaacagctcttggtgtccccagtggagggagagaaccagcctcacctcgcttgggtggtgggttcagctgtctcctggctcgcttgtgaagttgattccagaccccgatccatgactgcgttctgggtactcagtgtgccctttctgtaatgtggcaccattgagggggaggagctgtacagaaagagggcaagatgtttgcgtttagaatcttcgccccagcccttcactaaccctgtgagccgtaggcagagccttgtgtgtcaatgctttcgtcggagacgtagcctcgggttgctgtgttattgtgggcattgctgctgcacgtggtaatacagctcagtgtcaggtgtggggttcacgatatttcagactcggaacttgggggctctcacatggccatctcatttgctttgtggtcttaggtgggatactttcagatttctcctataaaatggggttgagaaagtcatctgaagcatttttggggattaaggtgataccctaaaaccccggagggcgcacgtaggatcaggtgcacccttcctgcagcgccttggtgtctgcagccgtggcggcctcacggggtgggtggagaggaaagagtggtgcggtagctggggttagcgtccgtttctcctccagtccacctcaccttgtcgcttcttccagggtccgcaagcaggtggtgaacatcccgtccttcattgtccgcctggattcccagaagcacatcgacttctctctgcgctctccctacgggggtggccgcccgggccgcgtgaagaggaagaatgccaagaagggccagggtggggctggggctggagacgacgaggaggaggattaagtccacctgtccctcctgggctgctggattgtctcgttttcctgccaaataaacaggatcagcgctttacaa

SEQ ID NO: 176940 - DNA, 476 bp, Homo sapiens; identical to SEQ ID NO: 103488
  Payload ID: 14718
  Gene Symbol: RPS9
  Gene Name: ribosomal protein S9
  ENST ID: ENST00000626547
  CDS Start-End: 57-476

SEQ ID NO: 176941 - DNA, 476 bp, Homo sapiens; identical to SEQ ID NO: 103488
  Payload ID: 14718
  Gene Symbol: RPS9
  Gene Name: ribosomal protein S9
  ENST ID: ENST00000627616
  CDS Start-End: 57-476

SEQ ID NO: 176942 - DNA, 476 bp, Homo sapiens; identical to SEQ ID NO: 103488
  Payload ID: 14718
  Gene Symbol: RPS9
  Gene Name: ribosomal protein S9
  ENST ID: ENST00000628741
  CDS Start-End: 57-476

SEQ ID NO: 176943 - DNA, 476 bp, Homo sapiens; identical to SEQ ID NO: 103488
  Payload ID: 14718
  Gene Symbol: RPS9
  Gene Name: ribosomal protein S9
  ENST ID: ENST00000629619
  CDS Start-End: 57-476

SEQ ID NO: 176944 - DNA, 1171 bp, Homo sapiens
  Payload ID: 14719
  Gene Symbol: RPSA
  Gene Name: ribosomal protein SA
  Uniprot ID: P08865
  ENST ID: ENST00000301821
  CDS Start-End: 110-997
gtacataaggacgtcatttcctgccgcctgtcttttccgtgctacctgcagaggggtccatacggcgttgttctggattcccgtcgtaacttaaagggaaattttcacaatgtccggagcccttgatgtcctgcaaatgaaggaggaggatgtccttaagttccttgcagcaggaacccacttaggtggcaccaatcttgacttccagatggaacagtacatctataaaaggaaaagtgatggcatctatatcataaatctcaagaggacctgggagaagcttctgctggcagctcgtgcaattgttgccattgaaaaccctgctgatgtcagtgttatatcctccaggaatactggccagagggctgtgctgaagtttgctgctgccactggagccactccaattgctggccgcttcactcctggaaccttcactaaccagatccaggcagccttccgggagccacggcttcttgtggttactgaccccagggctgaccaccagcctctcacggaggcatcttatgttaacctacctaccattgcgctgtgtaacacagattctcctctgcgctatgtggacattgccatcccatgcaacaacaagggagctcactcagtgggtttgatgtggtggatgctggctcgggaagttctgcgcatgcgtggcaccatttcccgtgaacacccatgggaggtcatgcctgatctgtacttctacagagatcctgaagagattgaaaaagaagagcaggctgctgctgagaaggcagtgaccaaggaggaatttcagggtgaatggactgctcccgctcctgagttcactgctactcagcctgaggttgcagactggtctgaaggtgtacaggtgccctctgtgcctattcagcaattccctactgaagactggagcgctcagcctgccacggaagactggtctgcagctcccactgctcaggccactgaatgggtaggagcaaccactgactggtcttaagctgttcttgcataggctcttaagcagcatggaaaaatggttgatggaaaataaacatcagtttctaaaagttgtcttcatttagtttgctttttactccagatcagaatacctgggattgcatatcaaagcataataataaatacatgtctcgacatgagttgtacttctaaa

SEQ ID NO: 176945 - DNA, 1032 bp, Homo sapiens
  Payload ID: 14719
  Gene Symbol: RPSA
  Gene Name: ribosomal protein SA
  ENST ID: ENST00000443003
  CDS Start-End: 64-966
tgcagaggggtccatacggcgttgttctggattcccgtcgtaacttaaagggaaattttcacaatgtccggagcccttgatgtcctgcaaatgaaggaggaggatgtccttaagttccttgcagcaggaacccacttaggtggcaccaatcttgacttccagatggaacagtacatctataaaaggaaaagtgatggcatctatatcataaatctcaagaggacctgggagaagcttctgctggcagctcgtgcaattgttgccattgaaaaccctgctgatgtcagtgttatatcctccaggaatactggccaggtttgtggaacagtgagggctgtgctgaagtttgctgctgccactggagccactccaattgctggccgcttcactcctggaaccttcactaaccagatccaggcagccttccgggagccacggcttcttgtggttactgaccccagggctgaccaccagcctctcacggaggcatcttatgttaacctacctaccattgcgctgtgtaacacagattctcctctgcgctatgtggacattgccatcccatgcaacaacaagggagctcactcagtgggtttgatgtggtggatgctggctcgggaagttctgcgcatgcgtggcaccatttcccgtgaacacccatgggaggtcatgcctgatctgtacttctacagagatcctgaagagattgaaaaagaagagcaggctgctgctgagaaggcagtgaccaaggaggaatttcagggtgaatggactgctcccgctcctgagttcactgctactcagcctgaggttgcagactggtctgaaggtgtacaggtgccctctgtgcctattcagcaattccctactgaagactggagcgctcagcctgccacggaagactggtctgcagctcccactgctcaggccactgaatgggtaggagcaaccactgactggtcttaagctgttcttgcataggctcttaagcagcatggaaaaatggttgatggaaaataaacatcagtttct

SEQ ID NO: 176946 - DNA, 701 bp, Homo sapiens
  Payload ID: 14719
  Gene Symbol: RPSA
  Gene Name: ribosomal protein SA
  ENST ID: ENST00000444512
  CDS Start-End: 354-701
gggtgagttccgtgtagcgtccctggcgccttccagggctagaaaaatgagcttttcctgctcaaatgaagggtgagaagactagtgatgaaagccggtcagactggatctgtctcccgcccggcgcgccccaccttaggcctgcggcccgcacgtggccaggctcgggctggcgggttcccagagtgccccgggagcgggtggaggccgccctccagcggaggctccgagctggggttcggaccaggccgcgggtgggcgggagtgcagaaagcgggctaacatcctgtgttgctatcccttcggagtcccacacggcgattcccgtcgtaacttaaagggaaattttcacaatgtccggagcccttgatgtcctgcaaatgaaggaggaggatgtccttaagttccttgcagcaggaacccacttaggtggcaccaatcttgacttccagatggaacagtacatctataaaaggaaaagtgatggcatctatatcataaatctcaagaggacctgggagaagcttctgctggcagctcgtgcaattgttgccattgaaaaccctgctgatgtcagtgttatatcctccaggaatactggccagagggctgtgctgaagtttgctgctgccactggagccactccaattgctggccgcttcactcctggaaccttcactaaccagatccaggcagccttc

SEQ ID NO: 176947 - DNA, 874 bp, Homo sapiens
  Payload ID: 14719
  Gene Symbol: RPSA
  Gene Name: ribosomal protein SA
  ENST ID: ENST00000458478
  CDS Start-End: 84-874
cctgcagaggggtccatacggcgttgttctgggttgctctcttatttcagattcccgtcgtaacttaaagggaaattttcacaatgtccggagcccttgatgtcctgcaaatgaaggaggaggatgtccttaagttccttgcagcaggaacccacttaggtggcaccaatcttgacttccagatggaacagtacatctataaaaggaaaagtgatggcatctatatcataaatctcaagaggacctgggagaagcttctgctggcagctcgtgcaattgttgccattgaaaaccctgctgatgtcagtgttatatcctccaggaatactggccagagggctgtgctgaagtttgctgctgccactggagccactccaattgctggccgcttcactcctggaaccttcactaaccagatccaggcagccttccgggagccacggcttcttgtggttactgaccccagggctgaccaccagcctctcacggaggcatcttatgttaacctacctaccattgcgctgtgtaacacagattctcctctgcgctatgtggacattgccatcccatgcaacaacaagggagctcactcagtgggtttgatgtggtggatgctggctcgggaagttctgcgcatgcgtggcaccatttcccgtgaacacccatgggaggtcatgcctgatctgtacttctacagagatcctgaagagattgaaaaagaagagcaggctgctgctgagaaggcagtgaccaaggaggaatttcagggtgaatggactgctcccgctcctgagttcactgctactcagcctgaggttgcagactggtctgaaggtgtacaggtgccctctgtgcctattcagcaattccctac

SEQ ID NO: 176948 - DNA, 1257 bp, Homo sapiens
  Payload ID: 14720
  Gene Symbol: RPLP0
  Gene Name: ribosomal protein, large, P0
  Uniprot ID: P05388
  ENST ID: ENST00000228306
  CDS Start-End: 238-1191
gtctgacgggcgatggcgcagccaatagacaggagcgctatccgcggtttctgattggctactttgttcgcattataaaaggcacgcgcgggcgcgaggcccttctctcgccaggcgtcctcgtggaaggcccgggaccgcgggatgggtgtcggcgtgaccaggcctgagctccctgtctctcctcagtgacatcgtctttaaaccctgcgtggcaatccctgacgcaccgccgtgatgcccagggaagacagggcgacctggaagtccaactacttccttaagatcatccaactattggatgattatccgaaatgtttcattgtgggagcagacaatgtgggctccaagcagatgcagcagatccgcatgtcccttcgcgggaaggctgtggtgctgatgggcaagaacaccatgatgcgcaaggccatccgagggcacctggaaaacaacccagctctggagaaactgctgcctcatatccgggggaatgtgggctttgtgttcaccaaggaggacctcactgagatcagggacatgttgctggccaataaggtgccagctgctgcccgtgctggtgccattgccccatgtgaagtcactgtgccagcccagaacactggtctcgggcccgagaagacctcctttttccaggctttaggtatcaccactaaaatctccaggggcaccattgaaatcctgagtgatgtgcagctgatcaagactggagacaaagtgggagccagcgaagccacgctgctgaacatgctcaacatctcccccttctcctttgggctggtcatccagcaggtgttcgacaatggcagcatctacaaccctgaagtgcttgatatcacagaggaaactctgcattctcgcttcctggagggtgtccgcaatgttgccagtgtctgtctgcagattggctacccaactgttgcatcagtaccccattctatcatcaacgggtacaaacgagtcctggccttgtctgtggagacggattacaccttcccacttgctgaaaaggtcaaggccttcttggctgatccatctgcctttgtggctgctgcccctgtggctgctgccaccacagctgctcctgctgctgctgcagccccagctaaggttgaagccaaggaagagtcggaggagtcggacgaggatatgggatttggtctctttgactaatcaccaaaaagcaaccaacttagccagttttatttgcaaaacaaggaaataaaggcttacttcttt

SEQ ID NO: 176949 - DNA, 912 bp, Homo sapiens
  Payload ID: 14720
  Gene Symbol: RPLP0
  Gene Name: ribosomal protein, large, P0
  Uniprot ID: P05388
  ENST ID: ENST00000313104
  CDS Start-End: 74-841
ctctcgccaggcgtcctcgtggaagtgacatcgtctttaaaccctgcgtggcaatccctgacgcaccgccgtgatgcccagggaagacagggcgacctggaagtccaactacttccttaagatcatccaactattggatgattatccgaaatgtttcattgtgggagcagacaatgtgggctccaagcagatgcagcagatccgcatgtcccttcgcgggaaggctgtggtgctgatgggcaagaacaccatgatgcgcaaggccatccgagggcacctggaaaacaacccagctctggagaaactgctgcctcatatccgggggaatgtgggctttgtgttcaccaaggaggacctcactgagatcagggacatgttgctggccaataaggtgccagctgctgcccgtgctggtgccattgccccatgtgaagtcactgtgccagcccagaacactggtctcgggcccgagaagacctcctttttccaggctttaggtatcaccactaaaatctccaggggcaccattgaaatcctgggtgtccgcaatgttgccagtgtctgtctgcagattggctacccaactgttgcatcagtaccccattctatcatcaacgggtacaaacgagtcctggccttgtctgtggagacggattacaccttcccacttgctgaaaaggtcaaggccttcttggctgatccatctgcctttgtggctgctgcccctgtggctgctgccaccacagctgctcctgctgctgctgcagccccagctaaggttgaagccaaggaagagtcggaggagtcggacgaggatatgggatttggtctctttgactaatcaccaaaaagcaaccaacttagccagttttatttgcaaaacaaggaaataaaggcttacttctttaaaaa

SEQ ID NO: 176950 - DNA, 1218 bp, Homo sapiens
  Payload ID: 14720
  Gene Symbol: RPLP0
  Gene Name: ribosomal protein, large, P0
  Uniprot ID: P05388
  ENST ID: ENST00000392514
  CDS Start-End: 178-1131
gtctgacgggcgatggcgcagccaatagacaggagcgctatccgcggtttctgattggctactttgttcgcattataaaaggcacgcgcgggcgcgaggcccttctctcgccaggcgtcctcgtggaagtgacatcgtctttaaaccctgcgtggcaatccctgacgcaccgccgtgatgcccagggaagacagggcgacctggaagtccaactacttccttaagatcatccaactattggatgattatccgaaatgtttcattgtgggagcagacaatgtgggctccaagcagatgcagcagatccgcatgtcccttcgcgggaaggctgtggtgctgatgggcaagaacaccatgatgcgcaaggccatccgagggcacctggaaaacaacccagctctggagaaactgctgcctcatatccgggggaatgtgggctttgtgttcaccaaggaggacctcactgagatcagggacatgttgctggccaataaggtgccagctgctgcccgtgctggtgccattgccccatgtgaagtcactgtgccagcccagaacactggtctcgggcccgagaagacctcctttttccaggctttaggtatcaccactaaaatctccaggggcaccattgaaatcctgagtgatgtgcagctgatcaagactggagacaaagtgggagccagcgaagccacgctgctgaacatgctcaacatctcccccttctcctttgggctggtcatccagcaggtgttcgacaatggcagcatctacaaccctgaagtgcttgatatcacagaggaaactctgcattctcgcttcctggagggtgtccgcaatgttgccagtgtctgtctgcagattggctacccaactgttgcatcagtaccccattctatcatcaacgggtacaaacgagtcctggccttgtctgtggagacggattacaccttcccacttgctgaaaaggtcaaggccttcttggctgatccatctgcctttgtggctgctgcccctgtggctgctgccaccacagctgctcctgctgctgctgcagccccagctaaggttgaagccaaggaagagtcggaggagtcggacgaggatatgggatttggtctctttgactaatcaccaaaaagcaaccaacttagccagttttatttgcaaaacaaggaaataaaggcttacttctttaaaaagtctctggactcttaa

SEQ ID NO: 176951 - DNA, 720 bp, Homo sapiens
  Payload ID: 14720
  Gene Symbol: RPLP0
  Gene Name: ribosomal protein, large, P0
  ENST ID: ENST00000552292
  CDS Start-End: 326-649
gacaagtgaatgaagttcacatctggaaatcgttgaacatttttcgttcatggaactcaatggctacgttagtcgtttatgcttttcactgttgtggtaggggctttggaagtaaatgccatcaacaatggatacagaagacctggatttggaataagggcaaaatttatttgatggggctgaattgctctgccaggagcatttggtatgagatgaaatggcctctcttgagactgagctgccaacctggcaattattgtctgctaagggttctctttattcacccttacttggacttcctttcctgtagggaatctcacgtaaaatgaaatcttccctcccccagggtgtccgcaatgttgccagtgtctgtctgcagattggctacccaactgttgcatcagtaccccattctatcatcaacgggtacaaacgagtcctggccttgtctgtggagacggattacaccttcccacttgctgaaaaggtcaaggccttcttggctgatccatctgcctttgtggctgctgcccctgtggctgctgccaccacagctgctcctgctgctgctgcagccccagctaaggttgaagccaaggaagagtcggaggagtcggacgaggatatgggatttggtctctttgactaatcaccaaaaagcaaccaacttagccagttttatttgcaaaacaaggaaataaaggcttacttctttaaaaa

SEQ ID NO: 176952 - DNA, 770 bp, Homo sapiens
  Payload ID: 14720
  Gene Symbol: RPLP0
  Gene Name: ribosomal protein, large, P0
  ENST ID: ENST00000546990
  CDS Start-End: 33-770
ccctgcgtggcaatccctgacgcaccgccgtgatgcccagggaagacagggcgacctggaagtccaactacttccttaagatcatccaactattggatgattatccgaaatgtttcattgtgggagcagacaatgtgggctccaagcagatgcagcagatccgcatgtcccttcgcgggaaggctgtggtgctgatgggcaagaacaccatgatgcgcaaggccatccgagggcacctggaaaacaacccagctctggagaaactgctgcctcatatccgggggaatgtgggctttgtgttcaccaaggaggacctcactgagatcagggacatgttgctggccaataagagtgatgtgcagctgatcaagactggagacaaagtgggagccagcgaagccacgctgctgaacatgctcaacatctcccccttctcctttgggctggtcatccagcaggtgttcgacaatggcagcatctacaaccctgaagtgcttgatatcacagaggaaactctgcattctcgcttcctggagggtgtccgcaatgttgccagtgtctgtctgcagattggctacccaactgttgcatcagtaccccattctatcatcaacgggtacaaacgagtcctggccttgtctgtggagacggattacaccttcccacttgctgaaaaggtcaaggccttcttggctgatccatctgcctttgtggctgctgcccctgtggctgctgccaccacagctgctcctgctgctgctgcagcccca

SEQ ID NO: 176953 - DNA, 1003 bp, Homo sapiens
  Payload ID: 14720
  Gene Symbol: RPLP0
  Gene Name: ribosomal protein, large, P0
  ENST ID: ENST00000550856
  CDS Start-End: 262-1003
ggttgcctgtattcgttcagctttgtctgacgggcgatggcgcagccaatagacaggagcgctatccgcggtttctgattggctactttgttcgcattataaaaggcacgcgcgggcgcgaggcccttctctcgccaggcgtcctcgtggaaggcccgggaccgcgggatgggtgtcggcgtgaccaggcctgagctccctgtctctcctcagtgacatcgtctttaaaccctgcgtggcaatccctgacgcaccgccgtgatgcccagggaagacagggcgacctggaagtccaactacttccttaagatcatccaactattggatgattatccgaaatgtttcattgtgggagcagacaatgtgggctccaagcagatgcagcagatccgcatgtcccttcgcgggaaggctgtggtgctgatgggcaagaacaccatgatgcgcaaggccatccgagggcacctggaaaacaacccagctctggagaaactgctgcctcatatccgggggaatgtgggctttgtgttcaccaaggaggacctcactgagatcagggacatgttgctggccaataaggtgccagctgctgcccgtgctggtgccattgccccatgtgaagtcactgtgccagcccagaacactggtctcgggcccgagaagacctcctttttccaggctttaggtatcaccactaaaatctccaggggcaccattgaaatcctgagtgatgtgcagctgatcaagactggagacaaagtgggagccagcgaagccacgctgctgaacatgctcaacatctcccccttctcctttgggctggtcatccagcaggtgttcgacaatggcagcatctacaaccctgaagtgcttgatatcacagaggaaactctgcattctcgcttcctggagggtgtccgcaatgttgccagtgtctgtctgcagattggctacccaactgttgcatcagtaccccattctatcatcaacgggtacaaacgag

SEQ ID NO: 176954 - DNA, 402 bp, Homo sapiens
  Payload ID: 14720
  Gene Symbol: RPLP0
  Gene Name: ribosomal protein, large, P0
  ENST ID: ENST00000551914
  CDS Start-End: 38-402
ttaaaccctgcgtggcaatccctgacgcaccgccgtgatgcccagggaagacagggcgacctggaagtccaactacttccttaagatcatccaactattggatgattatccgaaatgtttcattgtgggagcagacaatgtgggctccaagcagatgcagcagatccgcatgtcccttcgcgggaaggctgtggtgctgatgggcaagaacaccatgatgcgcaaggccatccgagggcacctggaaaacaacccagctctggagaaactgctgcctcatatccgggggaatgtgggctttgtgttcaccaaggaggacctcactgagatcagggacatgttgctggccaataagctgctgcccgtgctggtgccattgccccatgtgaagtcactgtgcca

SEQ ID NO: 176955 - DNA, 966 bp, Homo sapiens
  Payload ID: 14720
  Gene Symbol: RPLP0
  Gene Name: ribosomal protein, large, P0
  ENST ID: ENST00000551258
  CDS Start-End: 64-534
gcgtcctcgtggaagtgacatcgtctttaaaccctgcgtggcaatccctgacgcaccgccgtgatgcccagggaagacagggcgacctggaagtccaactacttccttaagatcatccaactattggatgattatccgaaatgtttcattgtgggagcagacaatgtgggctccaagcagatgcagcagatccgcatgtcccttcgcgggaaggctgtggtgctgatgggcaagaacaccatgatgcgcaaggccatccgagggcacctggaaaacaacccagctctggagaaactgctgcctcatatccgggggaatgtgggctttgtgttcaccaaggaggacctcactgagatcagggacatgttgctggccaataaggtgccagctgctgcccgtgctggtgccattgccccatgtgaagtcactgtgccagcccagaacactggtctcgggcccgagaagacctcctttttccaggctttaggtgtttactgccccactattatctggttcagagtgatgtgcagctgatcaagactggagacaaagtgggagccagcgaagccacgctgctgaacatgctcaacatctcccccttctcctttgggctggtcatccagcaggtgttcgacaatggcagcatctacaaccctgaagtgcttgatatcacagaggaaactctgcattctcgcttcctggagggtgtccgcaatgttgccagtgtctgtctgcagattggctacccaactgttgcatcagtaccccattctatcatcaacgggtacaaacgagtcctggccttgtctgtggagacggattacaccttcccacttgctgaaaaggtcaaggccttcttggctgatccatctgcctttgtggctgctgcccctgtggctgctgccaccacagctgctcctgctgctgctgcagccccagctaaggttgaagccaaggaagagtcgg

SEQ ID NO: 176956 - DNA, 1106 bp, Homo sapiens
  Payload ID: 14720
  Gene Symbol: RPLP0
  Gene Name: ribosomal protein, large, P0
  ENST ID: ENST00000549098
  CDS Start-End: 77-250
cttctctcgccaggcgtcctcgtggaagtgacatcgtctttaaaccctgcgtggcaatccctgacgcaccgccgtgatgcccagggaagacagggcgacctggaagtccaactacttccttaagatcatcgtaagtgcaggcaactattggatgattatccgaaatgtttcattgtgggagcagacaatgtgggctccaagcagatgcagcagatccgcatgtcccttcgcgggaaggctgtggtgctgatgggcaagaacaccatgatgcgcaaggccatccgagggcacctggaaaacaacccagctctggagaaactgctgcctcatatccgggggaatgtgggctttgtgttcaccaaggaggacctcactgagatcagggacatgttgctggccaataaggtgccagctgctgcccgtgctggtgccattgccccatgtgaagtcactgtgccagcccagaacactggtctcgggcccgagaagacctcctttttccaggctttaggtatcaccactaaaatctccaggggcaccattgaaatcctgagtgatgtgcagctgatcaagactggagacaaagtgggagccagcgaagccacgctgctgaacatgctcaacatctcccccttctcctttgggctggtcatccagcaggtgttcgacaatggcagcatctacaaccctgaagtgcttgatatcacagaggaaactctgcattctcgcttcctggagggtgtccgcaatgttgccagtgtctgtctgcagattggctacccaactgttgcatcagtaccccattctatcatcaacgggtacaaacgagtcctggccttgtctgtggagacggattacaccttcccacttgctgaaaaggtcaaggccttcttggctgatccatctgcctttgtggctgctgcccctgtggctgctgccaccacagctgctcctgctgctgctgcagccccagctaaggttgaagccaaggaagagtcggaggagtcggacgaggatatgggatttggtctctttgactaatcaccaaaaagcaaccaacttagccagttttatttgcaaaacaaggaaataaaggcttacttctt

SEQ ID NO: 176957 - DNA, 993 bp, Homo sapiens
  Payload ID: 14720
  Gene Symbol: RPLP0
  Gene Name: ribosomal protein, large, P0
  ENST ID: ENST00000546989
  CDS Start-End: 77-922
cttctctcgccaggcgtcctcgtggaagtgacatcgtctttaaaccctgcgtggcaatccctgacgcaccgccgtgatgcccagggaagacagggcgacctggaagtccaactacttccttaagatcatccaactattggatgattatccgaaatgtttcattgtgggagcagacaatgtgggctccaagcagatgcagcagatccgcatgtcccttcgcgggaaggctgtggtgctgatgggcaagaacaccatgatgcgcaaggccatccgagggcacctggaaaacaacccagctctggagaaactgctgcctcatatccgggggaatgtgggctttgtgttcaccaaggaggacctcactgagatcagggacatgttgctggccaataaggtgccagctgctgcccgtgctggtgccattgccccatgtgaagtcactgtgccagcccagaacactggtctcgggcccgagaagacctcctttttccaggctttaggtatcaccactaaaatctccaggggcaccattgaaatcctggtgttcgacaatggcagcatctacaaccctgaagtgcttgatatcacagaggaaactctgcattctcgcttcctggagggtgtccgcaatgttgccagtgtctgtctgcagattggctacccaactgttgcatcagtaccccattctatcatcaacgggtacaaacgagtcctggccttgtctgtggagacggattacaccttcccacttgctgaaaaggtcaaggccttcttggctgatccatctgcctttgtggctgctgcccctgtggctgctgccaccacagctgctcctgctgctgctgcagccccagctaaggttgaagccaaggaagagtcggaggagtcggacgaggatatgggatttggtctctttgactaatcaccaaaaagcaaccaacttagccagttttatttgcaaaacaaggaaataaaggcttacttctttaaaaa

SEQ ID NO: 176958 - DNA, 1344 bp, Homo sapiens
  Payload ID: 14720
  Gene Symbol: RPLP0
  Gene Name: ribosomal protein, large, P0
  Uniprot ID: P05388
  ENST ID: ENST00000551150
  CDS Start-End: 317-1270
aggcgtcctcgtggaaggttcgtgtgctagttagatgggcgccaggggtcgccggcgggaagcatggaggggtctttgggggcctttgggaacatggagtcctattctgttccgcctggggcctcggtggcggcttgcacgccccgagatgacggccgctgccctaggcagggccggcgggcgattgcgcgtgtcctgctcctcttaggcccgggaccgcgggatgggtgtcggcgtgaccaggcctgagctccctgtctctcctcagtgacatcgtctttaaaccctgcgtggcaatccctgacgcaccgccgtgatgcccagggaagacagggcgacctggaagtccaactacttccttaagatcatccaactattggatgattatccgaaatgtttcattgtgggagcagacaatgtgggctccaagcagatgcagcagatccgcatgtcccttcgcgggaaggctgtggtgctgatgggcaagaacaccatgatgcgcaaggccatccgagggcacctggaaaacaacccagctctggagaaactgctgcctcatatccgggggaatgtgggctttgtgttcaccaaggaggacctcactgagatcagggacatgttgctggccaataaggtgccagctgctgcccgtgctggtgccattgccccatgtgaagtcactgtgccagcccagaacactggtctcgggcccgagaagacctcctttttccaggctttaggtatcaccactaaaatctccaggggcaccattgaaatcctgagtgatgtgcagctgatcaagactggagacaaagtgggagccagcgaagccacgctgctgaacatgctcaacatctcccccttctcctttgggctggtcatccagcaggtgttcgacaatggcagcatctacaaccctgaagtgcttgatatcacagaggaaactctgcattctcgcttcctggagggtgtccgcaatgttgccagtgtctgtctgcagattggctacccaactgttgcatcagtaccccattctatcatcaacgggtacaaacgagtcctggccttgtctgtggagacggattacaccttcccacttgctgaaaaggtcaaggccttcttggctgatccatctgcctttgtggctgctgcccctgtggctgctgccaccacagctgctcctgctgctgctgcagccccagctaaggttgaagccaaggaagagtcggaggagtcggacgaggatatgggatttggtctctttgactaatcaccaaaaagcaaccaacttagccagttttatttgcaaaacaaggaaataaaggcttacttctttaaaaagtc

SEQ ID NO: 176959 - DNA, 561 bp, Homo sapiens
  Payload ID: 14720
  Gene Symbol: RPLP0
  Gene Name: ribosomal protein, large, P0
  ENST ID: ENST00000550423
  CDS Start-End: 228-561
gagctccctgtctctcctcagtgacatcgtctttaaaccctgcgtggcaatccctgacgcaccgccgtgatgcccagggaagacagggcgacctggaagtccaactacttccttaagatcatcgtaagtgcagggtctgaggtcaggaatgactcattgtaaggaagcaagctgttgcatatttaggacctgtcagccaagaaacttaagtgtccaatgacttttggatggcctttgagcaactattggatgattatccgaaatgtttcattgtgggagcagacaatgtgggctccaagcagatgcagcagatccgcatgtcccttcgcgggaaggctgtggtgctgatgggcaagaacaccatgatgcgcaaggccatccgagggcacctggaaaacaacccagctctggagaaactgctgcctcatatccgggggaatgtgggctttgtgttcaccaaggaggacctcactgagatcagggacatgttgctggccaataaggtgccagctgctgcccgtgctggtgccattgccccatgtgaagtcactgtgccagccc

SEQ ID NO: 176960 - DNA, 781 bp, Homo sapiens
  Payload ID: 14720
  Gene Symbol: RPLP0
  Gene Name: ribosomal protein, large, P0
  ENST ID: ENST00000547211
  CDS Start-End: 50-781
gtgacatcgtctttaaaccctgcgtggcaatccctgacgcaccgccgtgatgcccagggaagacagggcgacctggaagtccaactacttccttaagatcatccagatgcagcagatccgcatgtcccttcgcgggaaggctgtggtgctgatgggcaagaacaccatgatgcgcaaggccatccgagggcacctggaaaacaacccagctctggagaaactgctgcctcatatccgggggaatgtgggctttgtgttcaccaaggaggacctcactgagatcagggacatgttgctggccaataaggtgccagctgctgcccgtgctggtgccattgccccatgtgaagtcactgtgccagcccagaacactggtctcgggcccgagaagacctcctttttccaggctttaggtatcaccactaaaatctccaggggcaccattgaaatcctgagtgatgtgcagctgatcaagactggagacaaagtgggagccagcgaagccacgctgctgaacatgctcaacatctcccccttctcctttgggctggtcatccagcaggtgttcgacaatggcagcatctacaaccctgaagtgcttgatatcacagaggaaactctgcattctcgcttcctggagggtgtccgcaatgttgccagtgtctgtctgcagattggctacccaactgttgcatcagtaccccattctatcatcaacgggtacaaacgagtcctggccttgtctgtggagacggattacaccttcccacttgctgaaaag

SEQ ID NO: 176961 - DNA, 864 bp, Homo sapiens
  Payload ID: 14720
  Gene Symbol: RPLP0
  Gene Name: ribosomal protein, large, P0
  ENST ID: ENST00000547173
  CDS Start-End: 43-543
cgtctttaaaccctgcgtggcaatccctgacgcaccgccgtgatgcccagggaagacagggcgacctggaagtccaactacttccttaagatcatccaactattggatgattatccgaaatgtttcattgtgggagcagacaatgtgggctccaagcagatgcagcagatccgcatgtcccttcgcgggaaggctgtggtgctgatgggcaagaacaccatgatgcgcaaggccatccgagggcacctggaaaacaacccagctctggagaaactgctgcctcatatccgggggaatgtgggctttgtgttcaccaaggaggacctcactgagatcagggacatgttgctggccaataaggtgccagctgctgcccgtgctggtgccattgccccatgtgaagtcactgtgccagcccagaacactggtctcgggcccgagaagacctcctttttccaggctttaggtatcaccactaaaatctccaggggcaccattgaaatcctggtgtttactgccccactattatctggttcagagtgatgtgcagctgatcaagactggagacaaagtgggagccagcgaagccacgctgctgaacatgctcaacatctcccccttctcctttgggctggtcatccagcaggtgttcgacaatggcagcatctacaaccctgaagtgcttgatatcacagaggaaactctgcattctcgcttcctggagggtgtccgcaatgttgccagtgtctgtctgcagattggctacccaactgttgcatcagtaccccattctatcatcaacgggtacaaacgagtcctggccttgtctgtggagacggattacaccttcccacttgctgaaaa

SEQ ID NO: 176962 - DNA, 680 bp, Homo sapiens
  Payload ID: 14720
  Gene Symbol: RPLP0
  Gene Name: ribosomal protein, large, P0
  ENST ID: ENST00000547191
  CDS Start-End: 222-680
tctctcgccaggcgtcctcgtggaagtgacatcgtctttaaaccctgcgtggcaatccctgacgcaccgccgtgatgcccagggaagacagggcgacctggaagtccaactacttccttaagatcatcgtctgaggtcaggaatgactcattgtaaggaagcaagctgttgcatatttaggacctgtcagccaagaaacttaagtgtccaatgacttttggatggcctttgagcaactattggatgattatccgaaatgtttcattgtgggagcagacaatgtgggctccaagcagatgcagcagatccgcatgtcccttcgcgggaaggctgtggtgctgatgggcaagaacaccatgatgcgcaaggccatccgagggcacctggaaaacaacccagctctggagaaactgctgcctcatatccgggggaatgtgggctttgtgttcaccaaggaggacctcactgagatcagggacatgttgctggccaataaggtgccagctgctgcccgtgctggtgccattgccccatgtgaagtcactgtgccagcccagaacactggtctcgggcccgagaagacctcctttttccaggctttaggtatcaccactaaaatctccaggggcaccattgaaatcctgagtgatgtgcagctgatcaagactggagacaaagtg

SEQ ID NO: 176963 - DNA, 792 bp, Homo sapiens
  Payload ID: 14720
  Gene Symbol: RPLP0
  Gene Name: ribosomal protein, large, P0
  ENST ID: ENST00000547475
  CDS Start-End: 42-470
gtctttaaaccctgcgtggcaatccctgacgcaccgccgtgatgcccagggaagacagggcgacctggaagtccaactacttccttaagatcatccaactattggatgattatccgaaatgtttcattgtgggagcagacaatgtgggctccaagcagatgcagcagatccgcatgtcccttcgcgggaaggctgtggtgctgatgggcaagaacaccatgatgcgcaaggccatccgagggcacctggaaaacaacccagctctggagaaactgctgcctcatatccgggggaatgtgggctttgtgttcaccaaggaggacctcactgagatcagggacatgttgctggccaataaggtgccagctgctgcccgtgctggtgccattgccccatgtgaagtcactgtgccagcccagaacactggtctcgggcccgagaagacctcctttttccaggctttagagtgatgtgcagctgatcaagactggagacaaagtgggagccagcgaagccacgctgctgaacatgctcaacatctcccccttctcctttgggctggtcatccagcaggtgttcgacaatggcagcatctacaaccctgaagtgcttgatatcacagaggaaactctgcattctcgcttcctggagggtgtccgcaatgttgccagtgtctgtctgcagattggctacccaactgttgcatcagtaccccattctatcatcaacgggtacaaacgagtcctggccttgtctgtggagacggattacaccttcccacttgctgaaaag

SEQ ID NO: 176964 - DNA, 1197 bp, Homo sapiens
  Payload ID: 14721
  Gene Symbol: RPLP1
  Gene Name: ribosomal protein, large, P1
  Uniprot ID: P05386
  ENST ID: ENST00000260379
  CDS Start-End: 166-510
tggacacataagaggctgcgtataggcgcgagagcccctttcctcagctgccgccaaggtgctcggtccttccgaggaagctaaggctgcgttggggtgaggccctcacttcatccggcgactagcaccgcgtccggcagcgccagccctacactcgcccgcgccatggcctctgtctccgagctcgcctgcatctactcggccctcattctgcacgacgatgaggtgacagtcacggaggataagatcaatgccctcattaaagcagccggtgtaaatgttgagcctttttggcctggcttgtttgcaaaggccctggccaacgtcaacattgggagcctcatctgcaatgtaggggccggtggacctgctccagcagctggtgctgcaccagcaggaggtcctgccccctccactgctgctgctccagctgaggagaagaaagtggaagcaaagaaagaagaatccgaggagtctgatgatgacatgggctttggtctttttgactaaacctcttttataacatgttcaataaaaagctgaactttactgctgttggtcttgtccatagttttggaatgtgctctgcaaaaatggtctgttttgtaatgttggctttcagcctattctgccatgacacaggctggattttccctgccaccattgccggatgtgagatttagacaatcctgatgctaacaagaaggcacctcatggtacagtgttgaaaactgcactggggtggcaggaggaaggatcagagcagatgctttgtccaggttacctgtgtaaacttgatgattataaggtgtgtcccctacactgggggtggagggtaatacagaccagctttagaaagcctcctgggtatttaccctatacaaccctgcctaagaacgaactttgacgtatgctgaatgttgactgctacatcccaaggttgtaaaaaaacaagacttagctatgtaatgtctcaccaaatgtttgggagttttatggtaacactgaaggagtgcagaaagtttacttaatagtttattaaggtctccagttacacaaagtggaaaaaaaaaaagattcaaacctgtgttccaaaaactaagagctttttttgtttgccaattaataataccatgaatggaattttcaacttttcaggcttggatttatataataaaccgtgggtattgtgtgttc

SEQ ID NO: 176965 - DNA, 445 bp, Homo sapiens
  Payload ID: 14721
  Gene Symbol: RPLP1
  Gene Name: ribosomal protein, large, P1
  Uniprot ID: P05386
  ENST ID: ENST00000357790
  CDS Start-End: 136-405
agagcccctttcctcagctgccgccaaggtgctcggtccttccgaggaagctaaggctgcgttggggtgaggccctcacttcatccggcgactagcaccgcgtccggcagcgccagccctacactcgcccgcgccatggcctctgtctccgagctcgcctgcatctactcggccctcattctgcacgacgatgaggtgacagtcacggccctggccaacgtcaacattgggagcctcatctgcaatgtaggggccggtggacctgctccagcagctggtgctgcaccagcaggaggtcctgccccctccactgctgctgctccagctgaggagaagaaagtggaagcaaagaaagaagaatccgaggagtctgatgatgacatgggctttggtctttttgactaaacctcttttataacatgttcaataaaaagctgaactttac

SEQ ID NO: 176966 - DNA, 256 bp, Homo sapiens
  Payload ID: 14721
  Gene Symbol: RPLP1
  Gene Name: ribosomal protein, large, P1
  ENST ID: ENST00000560274
  CDS Start-End: 66-230
ggccctcacttcatccggcgactagcaccgcgtccggcagcgccagccctacactcgcccgcgccatggcctctgtctccgagctcgcctgcatctactcggccctcattctgcacgacgatgaggtgacagtcacgctgaggagaagaaagtggaagcaaagaaagaagaatccgaggagtctgatgatgacatgggctttggtctttttgactaaacctcttttataacatgttcaataaaaagctgaacttta

SEQ ID NO: 176967 - DNA, 781 bp, Homo sapiens
  Payload ID: 14722
  Gene Symbol: RPLP2
  Gene Name: ribosomal protein, large, P2
  Uniprot ID: P05387
  ENST ID: ENST00000321153
  CDS Start-End: 395-742
ggcatgctgggggtgctaggtaccgaaggcagatgccgtccctttggactcgcttcgtccaacgcccccacgagtttcggtggcccttcgccccacgctataagagcagtcacttccggaactgctgcccttcgcctttgccgcgaaaagtgcctgacgggggctgggaagggggagggggaaggagtcaacgactccctccccgtcgtcattggctgagcgcctcgtgacgtcactctgaggcgcctcatgcggcgccgcgcacgggtcccagagccttctgggtagcggtttaaccccgcctcttgcgtcggcgccttccttttcctccctgtcgccaccgaggtcgcacgcgtgagacttctccgccgcctccgccgcagacgccgccgcgatgcgctacgtcgcctcctacctgctggctgccctagggggcaactcctcccccagcgccaaggacatcaagaagatcttggacagcgtgggtatcgaggcggacgacgaccggctcaacaaggttatcagtgagctgaatggaaaaaacattgaagacgtcattgcccagggtattggcaagcttgccagtgtacctgctggtggggctgtagccgtctctgctgccccaggctctgcagcccctgctgctggttctgcccctgctgcagcagaggagaagaaagatgagaagaaggaggagtctgaagagtcagatgatgacatgggatttggcctttttgattaaattcctgctcccctgcaaataaagcctttttacacatct

SEQ ID NO: 176968 - DNA, 637 bp, Homo sapiens
  Payload ID: 14722
  Gene Symbol: RPLP2
  Gene Name: ribosomal protein, large, P2
  Uniprot ID: P05387
  ENST ID: ENST00000530797
  CDS Start-End: 252-599
ccaccgaggtcgcacgcgtgagacttctccgccgcctccgccgcagacgccgccgcgtgagtgtggtgaccgggcccggggtgccggctggggacgcggagtccgtggggatgcggggtgggcggcggggtatttttgggacggaggcctacgggccgagccacgcgcggcctcgcccggcggccccgggatgggccggcaggaggccgccggggtaactccgccgtcgcgtcctctccgcccgcctcaggatgcgctacgtcgcctcctacctgctggctgccctagggggcaactcctcccccagcgccaaggacatcaagaagatcttggacagcgtgggtatcgaggcggacgacgaccggctcaacaaggttatcagtgagctgaatggaaaaaacattgaagacgtcattgcccagggtattggcaagcttgccagtgtacctgctggtggggctgtagccgtctctgctgccccaggctctgcagcccctgctgctggttctgcccctgctgcagcagaggagaagaaagatgagaagaaggaggagtctgaagagtcagatgatgacatgggatttggcctttttgattaaattcctgctcccctgcaaataaagcctttttacacatc

SEQ ID NO: 176969 - DNA, 313 bp, Homo sapiens
  Payload ID: 14722
  Gene Symbol: RPLP2
  Gene Name: ribosomal protein, large, P2
  ENST ID: ENST00000530398
  CDS Start-End: 1-278
tagggggcaactcctcccccagcgccaaggacatcaagaagatcttggacagcgttatcagtgagctgaatggaaaaaacattgaagacgtcattgcccagggtattggcaagcttgccagtgtacctgctggtggggctgtagccgtctctgctgccccaggctctgcagcccctgctgctggttctgcccctgctgcagcagaggagaagaaagatgagaagaaggaggagtctgaagagtcagatgatgacatgggatttggcctttttgattaaattcctgctcccctgcaaataaagcctttttacac

SEQ ID NO: 176970 - DNA, 2254 bp, Homo sapiens
  Payload ID: 14723
  Gene Symbol: RRNAD1
  Gene Name: ribosomal RNA adenine dimethylase domain containing 1
  Uniprot ID: Q96FB5
  ENST ID: ENST00000368216
  CDS Start-End: 631-2058
cgccgacgaagcccgggaaggcaggcgcgcgggttagaacgcgccagaggtcggcgcgcgcacacccgcaccgccccgaccccaggtagtgaggccagtgattccgagtgtgtgaggagcggcagtggcggcggaggagggggcggcgtgggtgggggcgggggcgggatgcgctccccggcccctctagccccgtggtggtacaacgcgaaggtgtgggaaggccgcgataaaccggaactgcagcccgccggacacctccggcttcacttccgtaagaggagaggagtgtacggcaaggggcgggaactggaacttggcccgcctcgttgtgagctgagctcagcggcacgcttttgtggcgtcactgcactgttaccccgccctacgtgtctctgacgctgacaccttctcactgtgaaacgtcgcgacctgtgacgtctggggggcgcctcaaatcttccactccagcatcggatcccggaaaggcagcgtcggagactggacccaaaactcttcctgttctgcctgcagagttgagccccgtccgggtcctggacccgcgtagtactgaccctggatccctgttcactgcgttctcgctccccgcgctccctgctggaccccgggatgccgggcatctccgcccgaggcctctctcatgaggggaggaagcagctagctgttaacctcacccgtgtcctggcactctaccgttccatcttggatgcctacatcatcgaatttttcacagacaacctatgggacacactcccttgctcatggcaggaagcattggatggactgaaaccaccacagctggccacaatgctgctggggatgcctggggaaggggaggtcgtcaggtacaggtcagtgtggccactcaccctgctggccctgaagtccacggcgtgtgccctggcctttacccggatgcctggctttcagaccccctcagaattcctggagaaccccagccagagctcccgactaacagctccattccggaaacatgtcaggcccaagaagcagcatgagatccggaggctgggagagttggtgaagaagctgagtgatttcacaggctgcacccaggttgtagacgtgggctcaggccagggccatctctcccgcttcatggctcttggcctggggttgatggtgaagagcatcgaaggggatcagagactggtggagagagcccagcgcctggaccaggagcttctgcaggctctggagaaagaggagaagaggaacccgcaggtggtccaaaccagccctcgtcactccccacaccacgtggttaggtgggtagaccccacagccctgtgtgaggagcttctgcttccactggagaacccgtgtcagggcagggcccgcttgctgctcacaggcctccacgcctgtggggatctgagtgttgccttgctgagacacttctcctgctgtcctgaggtggtggccctggcctcagtgggctgctgctacatgaagctgagtgaccctggcggctacccactgagtcagtgggtggctgggctgcctggctatgaactgccctaccggcttcgggagggggcctgccatgccctggaggaatatgctgagcggctacagaaagctggccctggccttcgaactcactgctaccgtgcagcactggagacagtcatccgacgggcccggcccgagctccgtcggccaggcgtgcagggtatccccagggtccacgagctcaagattgaagaatatgtgcagcgggggctacagcgagtggggctagatccccagctgccactgaatctggctgcccttcaggcccacgtggcccaggagaaccgtgtggtggccttcttcagcctggctctactgcttgccccactggtggagacgcttattctactggaccggctgctgtaccttcaggaacagggtttccatgctgagctcctgcccatcttcagtcctgaactctctcccagaaacctggttctggtggccaccaagatgcccctgggtcaggctctttctgttctggagactgaagacagctgatgcagcctgaggaaacatctcagaccccatcatctgaaagtgcccagagagcacagtggcagagtacatctcatccagagaaacagcatcctgcatcctccagagtcctggttccttcagtttcatcccctttctctccttccatggattatgtaatacattgtaaagttttaattaattaaaaattggatatctg

SEQ ID NO: 176971 - DNA, 1802 bp, Homo sapiens
  Payload ID: 14723
  Gene Symbol: RRNAD1
  Gene Name: ribosomal RNA adenine dimethylase domain containing 1
  Uniprot ID: Q96FB5
  ENST ID: ENST00000368218
  CDS Start-End: 664-1497
aagcgtccggagccggatgcggaaatcggtgcgcgccgacgaagcccgggaaggcaggcgcgcgggttagaacgcgccagaggtcggcgcgcgcacacccgcaccgccccgaccccaggtagtgaggccagtgattccgagtgtgtgaggagcggcagtggcggcggaggagggggcggcgtgggtgggggcgggggcgggatgcgctccccggcccctctagccccgtggtggtacaacgcgaaggtgtgggaaggccgcgataaaccggaactgcagcccgccggacacctccggcttcacttccgtaagaggagaggagtgtacggcaaggggcgggaactggaacttggcccgcctcgttgtgagctgagctcagcggcacgcttttgtggcgtcactgcactgttaccccgccctacgtgtctctgacgctgacaccttctcactgtgaaacgtcgcgacctgtgacgtctggggggcgcctcaaatcttccactccagcatcggatcccggaaaggcagcgtcggagactggacccaaaactcttcctgttctgcctgcagagttgagccccgtccgggtcctggacccgcgtagtactgaccctggatccctgttcactgcgttctcgctccccgcgctccctgctggaccccgggatgccgggcatctccgcccgaggcctctctcatgaggggaggaagcagctagctgttaacctcacccgtgtcctggcactctaccgttccatcttggatgcctacatcatcgaatttttcacagacaacctatgggacacactcccttgctcatggcaggaagcattggatggactgaaaccaccacagctggccacaatgctgctggggatgcctggggaaggggaggtcgtcaggtacaggtcagtgtggccactcaccctgctggccctgaagtccacggcgtgtgccctggcctttacccggatgcctggctttcagaccccctcagaattcctggagaaccccagccagagctcccgactaacagctccattccggaaacatgtcaggcccaagaagcagcatgagatccggaggctgggagagttggtgaagaagctgagtgatttcacaggctgcacccaggttgtagacgtgggctcaggccagggccatctctcccgcttcatggctcttggcctggggttgatggtgaagagcatcgaaggggatcagagactggtggagagagcccagcgcctggaccaggagcttctgcaggctctggagaaagaggagaagaggaacccgcagatatgtgcagcgggggctacagcgagtggggctagatccccagctgccactgaatctggctgcccttcaggcccacgtggcccaggagaaccgtgtggtggccttcttcagcctggctctactgcttgccccactggtggagacgcttattctactggaccggctgctgtaccttcaggaacagggtttccatgctgagctcctgcccatcttcagtcctgaactctctcccagaaacctggttctggtggccaccaagatgcccctgggtcaggctctttctgttctggagactgaagacagctgatgcagcctgaggaaacatctcagaccccatcatctgaaagtgcccagagagcacagtggcagagtacatctcatccagagaaacagcatcctgcatcctccagagtcctggttccttcagtttcatcccctttctctccttccatggattatgtaatacattgtaaagttttaattaattaaaaattggatatctg

SEQ ID NO: 176972 - DNA, 709 bp, Homo sapiens
  Payload ID: 14723
  Gene Symbol: RRNAD1
  Gene Name: ribosomal RNA adenine dimethylase domain containing 1
  ENST ID: ENST00000484742
  CDS Start-End: 408-709
tttctagtacctacctagattgtttttgtaatcttcccagatccaaggaatttttcacagacaacctatgggacacactcccttgctcatggcaggaagcattggatggactgaaaccaccacagctggccacaatgctgctggggatgcctggggaaggggaggtcgtcaggtatgggctagaaggtccctgtgctggggaactcaaggctttaagccctgcagtgagcatattgctcagagagtctcataaggtcttcctgggcctcgggttgtaaactgctgcactcagatgtgatgggactattcactggaggcctcggctggactatctcaggtacaggtcagtgtggccactcaccctgctggccctgaagtccacggcgtgtgccctggcctttacccggatgcctggctttcagaccccctcagaattcctggagaaccccagccagagctcccgactaacagctccattccggaaacatgtcaggcccaagaagcagcatgagatccggaggctgggagagttggtgaagaagctgagtgatttcacaggctgcacccaggttgtagacgtgggctcaggccagggccatctctcccgcttcatggctcttggcctggggttgatggtgaagagcatcgaaggggatcagagactggtggagagagcccagcgcctggaccaggagcttctgcaggctct

SEQ ID NO: 176973 - DNA, 459 bp, Homo sapiens
  Payload ID: 14723
  Gene Symbol: RRNAD1
  Gene Name: ribosomal RNA adenine dimethylase domain containing 1
  ENST ID: ENST00000524343
  CDS Start-End: 146-430
aaggcagcgtcggagactggacccaaaactcttcctgttctgcctgcagagttgagccccgtccgggtcctggacccgcgtagtactgaccctggatccctgttcactgcgttctcgctccccgcgctccctgctggaccccgggatgccgggcatctccgcccgaggcctctctcatgaggggaggaagcagctagctgttaacctcacccgtgtcctggcactctaccgttccatcttggatgcctacatcatcgtacaggtcagtgtggccactcaccctgctggccctgaagtccacggcgtgtgccctggcctttacccggatgcctggctttcagaccccctcagaattcctggagaaccccagccagagctcccgactaacagctccattccggaaacatgtcaggcccaagaagcagcatgagatccggaggctgggagagttggtgaaga

SEQ ID NO: 176974 - DNA, 1191 bp, Homo sapiens
  Payload ID: 14723
  Gene Symbol: RRNAD1
  Gene Name: ribosomal RNA adenine dimethylase domain containing 1
  ENST ID: ENST00000519086
  CDS Start-End: 157-1191
cggatcccggaaaggcagcgtcggagactggacccaaaactcttcctgttctgcctgcagagttgagccccgtccgggtcctggacccgcgtagtactgaccctggatccctgttcactgcgttctcgctccccgcgctccctgctggaccccgggatgccgggcatctccgcccgaggcctctctcatgaggggaggaagcagctagctgttaacctcacccgtgtcctggcactctaccgttccatcttggatgcctacatcatcgaatttttcacagacaacctatgggacacactcccttgctcatggcaggaagcattggatggactgaaaccaccacagctggccacaatgctgctggggatgcctggggaaggggaggtcgtcaggtacaggtcagtgtggccactcaccctgctggccctgaagtccacggcgtgtgccctggcctttacccggatgcctggctttcagaccccctcagaattcctggagaaccccagccagagctcccgactaacagctccattccggaaacatgtcaggcccaagaagcagcatgagatccggaggctgggagagggccatctctcccgcttcatggctcttggcctggggttgatggtgaagagcatcgaaggggatcagagactggtggagagagcccagcgcctggaccaggagcttctgcaggctctggagaaagaggagaagaggaacccgcaggtggtccaaaccagccctcgtcactccccacaccacgtggttaggtgggtagaccccacagccctgtgtgaggagcttctgcttccactggagaacccgtgtcagggcagggcccgcttgctgctcacaggcctccacgcctgtggggatctgagtgttgccttgctgagacacttctcctgctgtcctgaggtggtggccctggcctcagtgggctgctgctacatgaagctgagtgaccctggcggctacccactgagtcagtgggtggctgggctgcctggctatgaactgccctaccggcttcgggagggggcctgccatgccctggaggaatatgctgagcggctacagaaagctggccctggccttcgaactcactgctaccgtgcagcactggagacagtcatccgacgggcccggcccgagctccgtcggccaggcgtgcagggtatccccagg

SEQ ID NO: 176975 - DNA, 416 bp, Homo sapiens
  Payload ID: 14723
  Gene Symbol: RRNAD1
  Gene Name: ribosomal RNA adenine dimethylase domain containing 1
  ENST ID: ENST00000522237
  CDS Start-End: 1-416
agaaccccagccagagctcccgactaacagctccattccggaaacatgtcaggcccaagaagcagcatgagatccggaggctgggagagttggtgaagaagctgagtgatttcacaggctgcacccaggttgtagacgtgggctcaggccagggccatctctcccgcttcatggctcttggcctggggttgatggtgaagagcatcgaaggggatcagagactggtggagagagcccagcgcctggaccaggagcttctgcaggctctggagaaagaggagaagaggaacccgcaggtggtccaaaccagccctcgtcactccccacaccacgtggttagatatgtgcagcgggggctacagcgagtggggctagatccccagctgccactgaatctggctgcccttcaggcccac

SEQ ID NO: 176976 - DNA, 1096 bp, Homo sapiens
  Payload ID: 14723
  Gene Symbol: RRNAD1
  Gene Name: ribosomal RNA adenine dimethylase domain containing 1
  ENST ID: ENST00000476229
  CDS Start-End: 327-791
cttgctcatggcaggaagcattggatggactgaaaccaccacagctggccacaatgctgctggggatgcctggggaaggggaggtcgtcaggtatgggctagaaggtccctgtgctggggaactcaaggctttaagccctgcagtgagcatattgctcagagagtctcataaggtcttcctgggcctcgggttgtaaactgctgcactcagatgtgatgggactattcactggaggcctcggctggactatctcaggtacaggtcagtgtggccactcaccctgctggccctgaagtccacggcgtgtgccctggcctttacccggatgcctggctttcagaccccctcagaattcctggagaaccccagccagagctcccgactaacagctccattccggaaacatgtcaggcccaagaagcagcatgagatccggaggctgggagagggccatctctcccgcttcatggctcttggcctggggttgatggtgaagagcatcgaaggggatcagagactggtggagagagcccagcgcctggaccaggagcttctgcaggctctggagaaagaggagaagaggaacccgcagatatgtgcagcgggggctacagcgagtggggctagatccccagctgccactgaatctggctgcccttcaggcccacgtggcccaggagaaccgtgtggtggccttcttcagcctggctctactgcttgccccactggtggagacgcttattctactggaccggctgctgtaccttcaggaacagggtttccatgctgagctcctgcccatcttcagtcctgaactctctcccagaaacctggttctggtggccaccaagatgcccctgggtcaggctctttctgttctggagactgaagacagctgatgcagcctgaggaaacatctcagaccccatcatctgaaagtgcccagagagcacagtggcagagtacatctcatccagagaaacagcatcctgcatcctccagagtcctggttccttcagtttcatcccctttctctccttccatggattatgtaatacattgtaaagttttaattaattaaaaattggatatctg

SEQ ID NO: 176977 - DNA, 3022 bp, Homo sapiens
  Payload ID: 14724
  Gene Symbol: RRP1
  Gene Name: ribosomal RNA processing 1
  Uniprot ID: P56182
  ENST ID: ENST00000497547
  CDS Start-End: 118-1503
gcgggctgtgacgtcacgccacgcgccggggccaggaggaggcgggcgcaggaggcgcgtgctcagtgtgctgggtaccaggcgactccgggacagggggtctcggccgtcggcgtcatggtttcgcgcgtgcagctcccgcctgagatccagctggctcagcgcctggcggggaatgagcaggtgacccgggaccgggcggtgaggaagctccggaaatacatcgtcgccaggactcagcgggccgcaggtggttttacgcacgacgagctgctgaaggtgtggaaaggactgttttattgcatgtggatgcaggacaagccactcctccaggaagaattaggaaggactatttcccagctcgttcatgcttttcagaccacggaggcgcagcacctgttccttcaggccttctggcagaccatgaatcgcgagtggacgggcattgacaggctgcgcctggataaattctacatgctcatgcggatggtcctgaacgagtccttgaaggttctgaagatgcaaggctgggaagaaagacagatcgaggagctgctagagctgctgatgactgagatcctgcaccccagcagccaggcccccaacggtgtgaagagccacttcatcgagatcttcctggaggagctgaccaaagtgggcgccgaggagcttacggcagaccagaacctgaagttcatcgaccccttctgcagaattgctgcccggaccaaggattccttggttttgaacaacatcactcgaggcatctttgagacgattgtggagcaggccccgcttgccattgaagacctcctgaatgaactggacacacaggatgaggaggtggcgtcggacagtgatgagtcctctgagggtggtgagcgtggagacgcgctgtcccagaagaggtctgagaagccgcccgcaggctccatctgcagggctgaacctgaggctggtgaggagcaggcaggtgacgacagggacagtggcggccccgttctccagtttgactacgaggcagttgctaacagactgtttgaaatggccagccgccagagcaccccttctcagaacagaaagcgtctctacaaagtgatccggaagctgcaggacctggcaggaggcattttccctgaagatgagatcccagagaaggcctgcaggcgcctgcttgaagggaggcggcagaagaagacgaagaagcagaagcgtctgctcaggttgcagcaggagagagggaaaggtgagaaggagcccccgagcccgggcatggagaggaagaggagcaggaggaggggtgtaggggccgaccccgaggcgcgggcagaggctggtgagcagccaggcacagctgagcgggccctgctccgagatcagcccaggggccgtggccagagaggggctcgccagagaaggaggacacctcggcccctgaccagtgcccgagcaaaggcggccaatgtccaggagccggagaagaagaagaaacgcagggagtgatgtggccgggccaaggacaggcagggagggaggccaggcctcgcttgcaccgcgggacgaggctgaccgggctgttctgtagactcaggaccgtggctccagaactcctgtgccaggcgggagggaagggcggcactggagagatgggcccatcattaggggccagcatcccaggaactggacctttccccagagcctccgcctgtggctgtgatgaccttgggccagaaggtcaaactccgaagactgaaactctgcctgcagcaggactggccgcccctgctgtggggggttcagaaaataaaatgccgcgcagcccttgccaggggaagtgtcgcttcaggtgtgtcctacggacgtgtgggaggtggcaggcgccagcctccgagcagtgtggtggtttatattcatgtttgtggaaaaatcttgcaagacatttctcctttcacagaactgcccaggtgttaacagggctgtctggacggggctcttttgcttccccctcaatctggggtctagagttgtgcaaggaattcagctccagtaaggcctggattgcccggggtgagcgtgtgtgtggtgggaagacctggcttccgcgagagccttgttcctggaggcaggagcgccccgccatcctgggtacccgcgggtccgcaggctgcgcacctctttccctcagccaggtcaccctcagcgtcctccctgcccctctccccttcacacctgctggagcctgtgagggaggtggcgggtccccactgtggcgacggagagctgacagtagcccagggctttccacctgcatggaacaagggcctgtctgccgccagcgctgtggccacagcctgcataggtgacaaggggccgctgcgttgggttttgcccgcatcttctgttccatgggtgcccagccagccaggccgtgtgggatccagcgagaggccagggcttggagtgggcctgggaccaggaaggacctctaggctgtggctggccttgtgcagaccctggactgcatccggttccccaaagccctgctgcattcgagtgtcccccaaccccgggcaggtggcacctggtgacacctccttcagtcccactcagctgggcggccggggcaggcttagggcacagttaggggccaaggagagggaaggccagggcccctgttctaggggttagggttctttccccaaaggaacttaaaaagacaagcgtggccaggcacagtggctcacacctgtaatcccagcactttgggaggccgaggtggccagatcacctgaggtcaggagtttgagaccagactgaccaacatggagaaaccccatctctactaaaatacaaaattagccaggcgtggtggcacatgcctgtaatcccagctactcgggaggctgaggcaggagaattgcttgaacctgggaggcagaggttgtggtgagctaagatcacgccattgcactccagcctgggcaacgagagggaaactctgtttcaaaaaaaaaaaaaaaaa

SEQ ID NO: 176978 - DNA, 805 bp, Homo sapiens
  Payload ID: 14724
  Gene Symbol: RRP1
  Gene Name: ribosomal RNA processing 1
  ENST ID: ENST00000483896
  CDS Start-End: 72-209
cgcaggaggcgcgtgctcagtgtgctgggtaccaggcgactccgggacagggggtctcggccgtcggcgtcatggtttcgcgcgtgcagctcccgcctgagatccagctggctcagcgcctggcggggaatgagcaggtgacccgggaccgggcggtgaggaagctccggaaatacatcgtcgccaggactcagcgggccgcagattaaccttgtggccactgtccagcttaggaaaccgtcaaggtggttttacgcacgacgagctgctgaaggtgtggaaaggactgttttattgcatgtggatgcaggacaagccactcctccaggaagaattaggaaggactatttcccagctcgttcatgcttttcagaccacggaggcgcagcacctgttccttcaggccttctggcagaccatgaatcgcgagtggacgggcattgacaggctgcgcctggataaattctacatgctcatgcggatggtcctgaacgagtccttgaaggttctgaagatgcaaggctgggaagaaagacagatcgaggagctgctagagctgctgatgactgagatcctgcaccccagcagccaggcccccaacggtgtgaagagccacttcatcgagatcttcctggaggagctgaccaaagtgggcgccgaggagcttacggcagaccagaacctgaagttcatcgaccccttctgcagaattgctgcccggaccaaggattccttggttttgaacaacatcactcgaggcatctttgagacgattgtggagcaggccccgcttgccattgaagac

SEQ ID NO: 176979 - DNA, 4038 bp, Homo sapiens
  Payload ID: 14725
  Gene Symbol: RRP12
  Gene Name: ribosomal RNA processing 12 homolog
  Uniprot ID: Q5JTH9
  ENST ID: ENST00000315563
  CDS Start-End: 53-3646
cgtccctggaagccggtcatttaagctcattcctcgccacggcttagtcaacatgggtcgctcgggaaagttgccttctggtgtctcagctaagttgaagcgctggaagaaaggccacagcagcgacagcaaccccgccatctgccgccaccgtcaggccgcccgcagccgcttcttcagccggccgtcaggaaggagtgacctgacagtcgatgctgtgaagttacataatgagctgcagtcagggtccttgcgcttgggcaaaagcgaagccccggagacgcccatggaagaagaggcggagctggttctcaccgagaagtcctcgggtaccttcctgagtggcctttccgactgcacaaacgtcaccttcagcaaagtacagcgcttctgggagtccaactcggctgcccacaaggagatctgtgctgttctggctgctgtcactgaggtgattcgctcccagggagggaaggagacggagactgagtacttcgctgctctgatccggaaggctgcccagcatggagtatgctcagtcctcaagggcagtgaattcatgtttgaaaaggcccctgcccatcatcctgctgccatttccactgccaagttctgcatccaggagattgagaagtctggaggctccaaggaggccaccaccacgctgcacatgctgacgctgctgaaggacctgctgccctgcttcccggaaggcctggtgaagagctgcagtgagactctcctcagggtcatgaccttgagccatgtgctggtgacagcctgtgccatgcaggcctttcacagcctcttccacgccaggcctggcctgagcaccctgtcagcagagctcaacgcccagatcatcacggccctgtacgactatgttcccagtgagaatgatttacaacccctgctagcctggcttaaggtcatggagaaagcccacatcaacctggtgaggttgcagtgggacctggggctaggccacctccctcgcttttttggaactgcggtgacctgcctcctttccccacactcgcaagtgctgactgctgctacgcagagcctcaaggagatcctgaaggaatgcgtggctccccacatggctgacattggctccgtgacctcctcggcctcaggccctgcccaatctgttgccaagatgttcagggcagtggaggagggcctgacgtacaaattccatgcggcctggagctccgtgttgcagctgctgtgtgtcttcttcgaggcgtgtgggagacaggcccaccctgtgatgaggaagtgcctccagtccctgtgtgacctgcgcctctcccctcatttcccccacacggcggctcttgaccaggcagtgggggctgcggtgaccagtatgggacctgaggtggtgctgcaggctgtgcctttggaaattgatggctctgaggagactctggatttcccacggagctggctgctgcctgtcatccgagaccatgttcaggaaacgcgacttggttttttcaccacctacttcttgcccctggctaacaccctgaagagcaaagccatggacctggctcaggcaggcagcacagtggaatctaagatctacgacacactccagtggcagatgtggacactcctgcctgggttctgcacaaggcctacagatgtggccatctccttcaaagggctggcacggacgctgggcatggccatcagcgagcgtccagacctgagggtcaccgtgtgccaggccctgcgcaccctcatcaccaagggctgccaggcagaggctgaccgtgctgaagtgagtcgctttgccaagaactttctgccgatcctcttcaacctgtatgggcagcccgtggcagccggggacactccagcccctcgccgggctgtgctggaaaccatcagaacttacctcaccatcactgacactcagttggtgaacagtctcctggaaaaagccagtgagaaggtgctcgaccctgccagctctgactttaccagattgtctgtcctggacctggtcgtggccttggctccgtgtgctgacgaagctgccatcagtaagctatactccaccatccggccctacctagagagcaaggcccacggggtgcagaagaaggcctaccgagtgctggaggaggtgtgtgccagtcctcagggccccggggccctcttcgtgcagagccacctggaggacctgaagaagacactgctggactcgctgcggagcacctcctcacccgccaagaggccccgtttgaagtgcctcctacacatcgtgaggaagctctcagctgaacacaaggagttcatcactgccctcatcccagaggtgatcctgtgcaccaaggaggtgtcggtgggcgcacggaagaacgcttttgcactgctcgtggagatgggccatgctttcctaaggtttggctcgaaccaggaagaggccctgcagtgctacctcgtcctgatctaccctggcctggtgggcgcggtgaccatggtcagctgcagcatcctggccctgacccacctccttttcgagtttaaaggtctgatggggaccagtacagtggagcagctgctggagaatgtgtgcctgcttctggcctcccgcacccgtgacgtggtcaagtctgcactgggcttcatcaaggtggcagtgactgtcatggacgtggcgcacctggccaaacatgtgcagctggtgatggaagccattgggaagctttcagatgacatgcggcggcacttccgcatgaagcttcggaacctgttcaccaagttcatccgcaagtttggatttgagctggtgaaaaggctgttgcccgaggagtaccacagagtcctggtcaacatccggaaagctgaggcccgggccaagaggcaccgagccctgagccaggctgccgtggaggaggaagaagaggaggaggaggaggaggagcccgcccagggcaaaggtgacagcattgaggagattttagctgactcagaggacgaggaggacaatgaggaggaggaaagaagccgaggcaaggagcagcggaagctggcacgacagaggagccgggcatggctgaaagagggcggtggggacgagcccctcaacttcctggatcccaaggtggcccaacgagtcctggccacgcagccagggccaggccggggcaggaagaaggaccacggcttcaaggtgagcgccgatggccggctgatcataagggaggaggcagacggcaacaagatggaggaagaggaaggtgccaaaggcgaagatgaagagatggctgacccaatggaagatgtgatcatcaggaataaaaagcaccagaagctcaagcaccagaaagaggctgaggaggaggagctggagataccccctcagtaccaagctggaggctctggcattcatcgccctgtggccaagaaggctatgcctggggctgaatacaaggccaagaaagcaaaaggtgatgtgaagaagaaaggccggccggatccctatgcctacatccccctcaacagaagcaagctcaaccgcaggaagaagatgaagctgcagggacagttcaaaggcctggtgaaggctgcccggcgaggttcccaggtgggacacaaaaaccgcagaaaggatcgtcgaccctgaggcccagggcccctgggctgccctgtggtccagtctgaggccctttcagcccccaggctgccttgccaccagctccaggtgctcaagattctggcagagcctggactcaggatgacttggaactagggcttggctctcagaagtcctggattttggaaactccaaatggaatcacccttcagagacatccctggtgcctggagatgggaatgtggcctcagtgcctctgagtaggtgccatgaggcacctttgctttctgcccagagtggccatgagcaccagaacagatgatctccatttccgccagctgcctgtagccacgtggcatcctgcctgtggtctgggtgagatttactgtgaccagatgtagaataaatgtgtctcatcctgc

SEQ ID NO: 176980 - DNA, 4425 bp, Homo sapiens
  Payload ID: 14725
  Gene Symbol: RRP12
  Gene Name: ribosomal RNA processing 12 homolog
  Uniprot ID: Q5JTH9
  ENST ID: ENST00000370992
  CDS Start-End: 140-4033
agtaatgcacacgaatccggaagtgacgccagaagaagaggaagtgaaggctacagggtatccacgtgggttctgagcgtgtttctacgtccctggaagccggtcatttaagctcattcctcgccacggcttagtcaacatgggtcgctcgggaaagttgccttctggtgtctcagctaagttgaagcgctggaagaaaggccacagcagcgacagcaaccccgccatctgccgccaccgtcaggccgcccgcagccgcttcttcagccggccgtcaggaaggagtgacctgacagtcgatgctgtgaagttacataatgagctgcagtcagggtccttgcgcttgggcaaaagcgaagccccggagacgcccatggaagaagaggcggagctggttctcaccgagaagtcctcgggtaccttcctgagtggcctttccgactgcacaaacgtcaccttcagcaaagtacagcgcttctgggagtccaactcggctgcccacaaggagatctgtgctgttctggctgctgtcactgaggtgattcgctcccagggagggaaggagacggagactgagtacttcgctgctctgatgacaacaatggaagcagtggagtccccggagtccctggccgccgttgcttacctgctgaaccttgtcctgaagcgtgttcccagccctgtgcttattaagaagttctctgatacctccaaagccttcatggatatcatgtcagctcaggccagcagcggctccacctctgtcctccgatgggtcctttcctgcctggccacccttctgcggaagcaagacctggaggcctggggctaccccgtgacccttcaggtgtaccatgggctgctgagcttcacggtgcatcccaagcccaagatccggaaggctgcccagcatggagtatgctcagtcctcaagggcagtgaattcatgtttgaaaaggcccctgcccatcatcctgctgccatttccactgccaagttctgcatccaggagattgagaagtctggaggctccaaggaggccaccaccacgctgcacatgctgacgctgctgaaggacctgctgccctgcttcccggaaggcctggtgaagagctgcagtgagactctcctcagggtcatgaccttgagccatgtgctggtgacagcctgtgccatgcaggcctttcacagcctcttccacgccaggcctggcctgagcaccctgtcagcagagctcaacgcccagatcatcacggccctgtacgactatgttcccagtgagaatgatttacaacccctgctagcctggcttaaggtcatggagaaagcccacatcaacctggtgaggttgcagtgggacctggggctaggccacctccctcgcttttttggaactgcggtgacctgcctcctttccccacactcgcaagtgctgactgctgctacgcagagcctcaaggagatcctgaaggaatgcgtggctccccacatggctgacattggctccgtgacctcctcggcctcaggccctgcccaatctgttgccaagatgttcagggcagtggaggagggcctgacgtacaaattccatgcggcctggagctccgtgttgcagctgctgtgtgtcttcttcgaggcgtgtgggagacaggcccaccctgtgatgaggaagtgcctccagtccctgtgtgacctgcgcctctcccctcatttcccccacacggcggctcttgaccaggcagtgggggctgcggtgaccagtatgggacctgaggtggtgctgcaggctgtgcctttggaaattgatggctctgaggagactctggatttcccacggagctggctgctgcctgtcatccgagaccatgttcaggaaacgcgacttggttttttcaccacctacttcttgcccctggctaacaccctgaagagcaaagccatggacctggctcaggcaggcagcacagtggaatctaagatctacgacacactccagtggcagatgtggacactcctgcctgggttctgcacaaggcctacagatgtggccatctccttcaaagggctggcacggacgctgggcatggccatcagcgagcgtccagacctgagggtcaccgtgtgccaggccctgcgcaccctcatcaccaagggctgccaggcagaggctgaccgtgctgaagtgagtcgctttgccaagaactttctgccgatcctcttcaacctgtatgggcagcccgtggcagccggggacactccagcccctcgccgggctgtgctggaaaccatcagaacttacctcaccatcactgacactcagttggtgaacagtctcctggaaaaagccagtgagaaggtgctcgaccctgccagctctgactttaccagattgtctgtcctggacctggtcgtggccttggctccgtgtgctgacgaagctgccatcagtaagctatactccaccatccggccctacctagagagcaaggcccacggggtgcagaagaaggcctaccgagtgctggaggaggtgtgtgccagtcctcagggccccggggccctcttcgtgcagagccacctggaggacctgaagaagacactgctggactcgctgcggagcacctcctcacccgccaagaggccccgtttgaagtgcctcctacacatcgtgaggaagctctcagctgaacacaaggagttcatcactgccctcatcccagaggtgatcctgtgcaccaaggaggtgtcggtgggcgcacggaagaacgcttttgcactgctcgtggagatgggccatgctttcctaaggtttggctcgaaccaggaagaggccctgcagtgctacctcgtcctgatctaccctggcctggtgggcgcggtgaccatggtcagctgcagcatcctggccctgacccacctccttttcgagtttaaaggtctgatggggaccagtacagtggagcagctgctggagaatgtgtgcctgcttctggcctcccgcacccgtgacgtggtcaagtctgcactgggcttcatcaaggtggcagtgactgtcatggacgtggcgcacctggccaaacatgtgcagctggtgatggaagccattgggaagctttcagatgacatgcggcggcacttccgcatgaagcttcggaacctgttcaccaagttcatccgcaagtttggatttgagctggtgaaaaggctgttgcccgaggagtaccacagagtcctggtcaacatccggaaagctgaggcccgggccaagaggcaccgagccctgagccaggctgccgtggaggaggaagaagaggaggaggaggaggaggagcccgcccagggcaaaggtgacagcattgaggagattttagctgactcagaggacgaggaggacaatgaggaggaggaaagaagccgaggcaaggagcagcggaagctggcacgacagaggagccgggcatggctgaaagagggcggtggggacgagcccctcaacttcctggatcccaaggtggcccaacgagtcctggccacgcagccagggccaggccggggcaggaagaaggaccacggcttcaaggtgagcgccgatggccggctgatcataagggaggaggcagacggcaacaagatggaggaagaggaaggtgccaaaggcgaagatgaagagatggctgacccaatggaagatgtgatcatcaggaataaaaagcaccagaagctcaagcaccagaaagaggctgaggaggaggagctggagataccccctcagtaccaagctggaggctctggcattcatcgccctgtggccaagaaggctatgcctggggctgaatacaaggccaagaaagcaaaaggtgatgtgaagaagaaaggccggccggatccctatgcctacatccccctcaacagaagcaagctcaaccgcaggaagaagatgaagctgcagggacagttcaaaggcctggtgaaggctgcccggcgaggttcccaggtgggacacaaaaaccgcagaaaggatcgtcgaccctgaggcccagggcccctgggctgccctgtggtccagtctgaggccctttcagcccccaggctgccttgccaccagctccaggtgctcaagattctggcagagcctggactcaggatgacttggaactagggcttggctctcagaagtcctggattttggaaactccaaatggaatcacccttcagagacatccctggtgcctggagatgggaatgtggcctcagtgcctctgagtaggtgccatgaggcacctttgctttctgcccagagtggccatgagcaccagaacagatgatctccatttccgccagctgcctgtagccacgtggcatcctgcctgtggtctgggtgagatttactgtgaccagatgtagaataaatgtgtctcatcctgc

SEQ ID NO: 176981 - DNA, 545 bp, Homo sapiens
  Payload ID: 14725
  Gene Symbol: RRP12
  Gene Name: ribosomal RNA processing 12 homolog
  ENST ID: ENST00000439965
  CDS Start-End: 353-545
gcatgcgtcctccctctccagtcccgcgtcggtcgccgcagtcacggagcgcacgtcgggaaacctctcagcctcatctgtaaaatgtgatcataaataccgggtacctggaagtgctcgagacagatctcactatgttgaccgggctggtctcaaactcctggcctcaagcagtcctcctgcagcaacttcacagcaacactggaatgacaggttaatgcacacgaatccggaagtgacgccagaagaagaggaagtgaaggctacagggtatccacgtgggttctgagcgtgtttctacgtccctggaagccggtcatttaagctcattcctcgccacggcttagtcaacatgggtcgctcgggaaagttgccttctggtgtctcagctaagttgaagcgctggaagaaaggccacagcagcgacagcaaccccgccatctgccgccaccgtcaggccgcccgcagccgcttcttcagccggccgtcaggaaggagtgacctgacagtcgatgctgtgaagttacataatgagctgcagtcag

SEQ ID NO: 176982 - DNA, 4242 bp, Homo sapiens
  Payload ID: 14725
  Gene Symbol: RRP12
  Gene Name: ribosomal RNA processing 12 homolog
  Uniprot ID: Q5JTH9
  ENST ID: ENST00000414986
  CDS Start-End: 140-3850
agtaatgcacacgaatccggaagtgacgccagaagaagaggaagtgaaggctacagggtatccacgtgggttctgagcgtgtttctacgtccctggaagccggtcatttaagctcattcctcgccacggcttagtcaacatgggtcgctcgggaaagttgccttctggtgtctcagctaagttgaagcgctggaagaaaggccacagcagcgacagcaaccccgccatctgccgccaccgtcaggccgcccgcagccgcttcttcagccggccgtcaggaaggagtgacctgacagtcgatgctgtgaagttacataatgagctgcagtcagggtccttgcgcttgggcaaaagcgaagccccggagacgcccatggaagaagaggcggagctggttctcaccgagaagtcctcgggtaccttcctgagtggcctttccgactgcacaaacgtcaccttcagcaaagtacagcgcttctgggagtccaactcggctgcccacaaggagatctgtgctgttctggctgctgtcactgaggtgattcgctcccagggagggaaggagacggagactgagtacttcgctgctctggtcctttcctgcctggccacccttctgcggaagcaagacctggaggcctggggctaccccgtgacccttcaggtgtaccatgggctgctgagcttcacggtgcatcccaagcccaagatccggaaggctgcccagcatggagtatgctcagtcctcaagggcagtgaattcatgtttgaaaaggcccctgcccatcatcctgctgccatttccactgccaagttctgcatccaggagattgagaagtctggaggctccaaggaggccaccaccacgctgcacatgctgacgctgctgaaggacctgctgccctgcttcccggaaggcctggtgaagagctgcagtgagactctcctcagggtcatgaccttgagccatgtgctggtgacagcctgtgccatgcaggcctttcacagcctcttccacgccaggcctggcctgagcaccctgtcagcagagctcaacgcccagatcatcacggccctgtacgactatgttcccagtgagaatgatttacaacccctgctagcctggcttaaggtcatggagaaagcccacatcaacctggtgaggttgcagtgggacctggggctaggccacctccctcgcttttttggaactgcggtgacctgcctcctttccccacactcgcaagtgctgactgctgctacgcagagcctcaaggagatcctgaaggaatgcgtggctccccacatggctgacattggctccgtgacctcctcggcctcaggccctgcccaatctgttgccaagatgttcagggcagtggaggagggcctgacgtacaaattccatgcggcctggagctccgtgttgcagctgctgtgtgtcttcttcgaggcgtgtgggagacaggcccaccctgtgatgaggaagtgcctccagtccctgtgtgacctgcgcctctcccctcatttcccccacacggcggctcttgaccaggcagtgggggctgcggtgaccagtatgggacctgaggtggtgctgcaggctgtgcctttggaaattgatggctctgaggagactctggatttcccacggagctggctgctgcctgtcatccgagaccatgttcaggaaacgcgacttggttttttcaccacctacttcttgcccctggctaacaccctgaagagcaaagccatggacctggctcaggcaggcagcacagtggaatctaagatctacgacacactccagtggcagatgtggacactcctgcctgggttctgcacaaggcctacagatgtggccatctccttcaaagggctggcacggacgctgggcatggccatcagcgagcgtccagacctgagggtcaccgtgtgccaggccctgcgcaccctcatcaccaagggctgccaggcagaggctgaccgtgctgaagtgagtcgctttgccaagaactttctgccgatcctcttcaacctgtatgggcagcccgtggcagccggggacactccagcccctcgccgggctgtgctggaaaccatcagaacttacctcaccatcactgacactcagttggtgaacagtctcctggaaaaagccagtgagaaggtgctcgaccctgccagctctgactttaccagattgtctgtcctggacctggtcgtggccttggctccgtgtgctgacgaagctgccatcagtaagctatactccaccatccggccctacctagagagcaaggcccacggggtgcagaagaaggcctaccgagtgctggaggaggtgtgtgccagtcctcagggccccggggccctcttcgtgcagagccacctggaggacctgaagaagacactgctggactcgctgcggagcacctcctcacccgccaagaggccccgtttgaagtgcctcctacacatcgtgaggaagctctcagctgaacacaaggagttcatcactgccctcatcccagaggtgatcctgtgcaccaaggaggtgtcggtgggcgcacggaagaacgcttttgcactgctcgtggagatgggccatgctttcctaaggtttggctcgaaccaggaagaggccctgcagtgctacctcgtcctgatctaccctggcctggtgggcgcggtgaccatggtcagctgcagcatcctggccctgacccacctccttttcgagtttaaaggtctgatggggaccagtacagtggagcagctgctggagaatgtgtgcctgcttctggcctcccgcacccgtgacgtggtcaagtctgcactgggcttcatcaaggtggcagtgactgtcatggacgtggcgcacctggccaaacatgtgcagctggtgatggaagccattgggaagctttcagatgacatgcggcggcacttccgcatgaagcttcggaacctgttcaccaagttcatccgcaagtttggatttgagctggtgaaaaggctgttgcccgaggagtaccacagagtcctggtcaacatccggaaagctgaggcccgggccaagaggcaccgagccctgagccaggctgccgtggaggaggaagaagaggaggaggaggaggaggagcccgcccagggcaaaggtgacagcattgaggagattttagctgactcagaggacgaggaggacaatgaggaggaggaaagaagccgaggcaaggagcagcggaagctggcacgacagaggagccgggcatggctgaaagagggcggtggggacgagcccctcaacttcctggatcccaaggtggcccaacgagtcctggccacgcagccagggccaggccggggcaggaagaaggaccacggcttcaaggtgagcgccgatggccggctgatcataagggaggaggcagacggcaacaagatggaggaagaggaaggtgccaaaggcgaagatgaagagatggctgacccaatggaagatgtgatcatcaggaataaaaagcaccagaagctcaagcaccagaaagaggctgaggaggaggagctggagataccccctcagtaccaagctggaggctctggcattcatcgccctgtggccaagaaggctatgcctggggctgaatacaaggccaagaaagcaaaaggtgatgtgaagaagaaaggccggccggatccctatgcctacatccccctcaacagaagcaagctcaaccgcaggaagaagatgaagctgcagggacagttcaaaggcctggtgaaggctgcccggcgaggttcccaggtgggacacaaaaaccgcagaaaggatcgtcgaccctgaggcccagggcccctgggctgccctgtggtccagtctgaggccctttcagcccccaggctgccttgccaccagctccaggtgctcaagattctggcagagcctggactcaggatgacttggaactagggcttggctctcagaagtcctggattttggaaactccaaatggaatcacccttcagagacatccctggtgcctggagatgggaatgtggcctcagtgcctctgagtaggtgccatgaggcacctttgctttctgcccagagtggccatgagcaccagaacagatgatctccatttccgccagctgcctgtagccacgtggcatcctgcctgtggtctgggtgagatttactgtgaccagatgtagaataaatgtgtctcatcctgc

SEQ ID NO: 176983 - DNA, 4476 bp, Homo sapiens
  Payload ID: 14725
  Gene Symbol: RRP12
  Gene Name: ribosomal RNA processing 12 homolog
  Uniprot ID: Q5JTH9
  ENST ID: ENST00000536831
  CDS Start-End: 190-4083
atgcgtcctccctctccagtcccgcgtcggtcgccgcagtcacggagcgcactaatgcacacgaatccggaagtgacgccagaagaagaggaagtgaaggctacagggtatccacgtgggttctgagcgtgtttctacgtccctggaagccggtcatttaagctcattcctcgccacggcttagtcaacatgggtcgctcgggaaagttgccttctggtgtctcagctaagttgaagcgctggaagaaaggccacagcagcgacagcaaccccgccatctgccgccaccgtcaggccgcccgcagccgcttcttcagccggccgtcaggaaggagtgacctgacagtcgatgctgtgaagttacataatgagctgcagtcagggtccttgcgcttgggcaaaagcgaagccccggagacgcccatggaagaagaggcggagctggttctcaccgagaagtcctcgggtaccttcctgagtggcctttccgactgcacaaacgtcaccttcagcaaagtacagcgcttctgggagtccaactcggctgcccacaaggagatctgtgctgttctggctgctgtcactgaggtgattcgctcccagggagggaaggagacggagactgagtacttcgctgctctgatgacaacaatggaagcagtggagtccccggagtccctggccgccgttgcttacctgctgaaccttgtcctgaagcgtgttcccagccctgtgcttattaagaagttctctgatacctccaaagccttcatggatatcatgtcagctcaggccagcagcggctccacctctgtcctccgatgggtcctttcctgcctggccacccttctgcggaagcaagacctggaggcctggggctaccccgtgacccttcaggtgtaccatgggctgctgagcttcacggtgcatcccaagcccaagatccggaaggctgcccagcatggagtatgctcagtcctcaagggcagtgaattcatgtttgaaaaggcccctgcccatcatcctgctgccatttccactgccaagttctgcatccaggagattgagaagtctggaggctccaaggaggccaccaccacgctgcacatgctgacgctgctgaaggacctgctgccctgcttcccggaaggcctggtgaagagctgcagtgagactctcctcagggtcatgaccttgagccatgtgctggtgacagcctgtgccatgcaggcctttcacagcctcttccacgccaggcctggcctgagcaccctgtcagcagagctcaacgcccagatcatcacggccctgtacgactatgttcccagtgagaatgatttacaacccctgctagcctggcttaaggtcatggagaaagcccacatcaacctggtgaggttgcagtgggacctggggctaggccacctccctcgcttttttggaactgcggtgacctgcctcctttccccacactcgcaagtgctgactgctgctacgcagagcctcaaggagatcctgaaggaatgcgtggctccccacatggctgacattggctccgtgacctcctcggcctcaggccctgcccaatctgttgccaagatgttcagggcagtggaggagggcctgacgtacaaattccatgcggcctggagctccgtgttgcagctgctgtgtgtcttcttcgaggcgtgtgggagacaggcccaccctgtgatgaggaagtgcctccagtccctgtgtgacctgcgcctctcccctcatttcccccacacggcggctcttgaccaggcagtgggggctgcggtgaccagtatgggacctgaggtggtgctgcaggctgtgcctttggaaattgatggctctgaggagactctggatttcccacggagctggctgctgcctgtcatccgagaccatgttcaggaaacgcgacttggttttttcaccacctacttcttgcccctggctaacaccctgaagagcaaagccatggacctggctcaggcaggcagcacagtggaatctaagatctacgacacactccagtggcagatgtggacactcctgcctgggttctgcacaaggcctacagatgtggccatctccttcaaagggctggcacggacgctgggcatggccatcagcgagcgtccagacctgagggtcaccgtgtgccaggccctgcgcaccctcatcaccaagggctgccaggcagaggctgaccgtgctgaagtgagtcgctttgccaagaactttctgccgatcctcttcaacctgtatgggcagcccgtggcagccggggacactccagcccctcgccgggctgtgctggaaaccatcagaacttacctcaccatcactgacactcagttggtgaacagtctcctggaaaaagccagtgagaaggtgctcgaccctgccagctctgactttaccagattgtctgtcctggacctggtcgtggccttggctccgtgtgctgacgaagctgccatcagtaagctatactccaccatccggccctacctagagagcaaggcccacggggtgcagaagaaggcctaccgagtgctggaggaggtgtgtgccagtcctcagggccccggggccctcttcgtgcagagccacctggaggacctgaagaagacactgctggactcgctgcggagcacctcctcacccgccaagaggccccgtttgaagtgcctcctacacatcgtgaggaagctctcagctgaacacaaggagttcatcactgccctcatcccagaggtgatcctgtgcaccaaggaggtgtcggtgggcgcacggaagaacgcttttgcactgctcgtggagatgggccatgctttcctaaggtttggctcgaaccaggaagaggccctgcagtgctacctcgtcctgatctaccctggcctggtgggcgcggtgaccatggtcagctgcagcatcctggccctgacccacctccttttcgagtttaaaggtctgatggggaccagtacagtggagcagctgctggagaatgtgtgcctgcttctggcctcccgcacccgtgacgtggtcaagtctgcactgggcttcatcaaggtggcagtgactgtcatggacgtggcgcacctggccaaacatgtgcagctggtgatggaagccattgggaagctttcagatgacatgcggcggcacttccgcatgaagcttcggaacctgttcaccaagttcatccgcaagtttggatttgagctggtgaaaaggctgttgcccgaggagtaccacagagtcctggtcaacatccggaaagctgaggcccgggccaagaggcaccgagccctgagccaggctgccgtggaggaggaagaagaggaggaggaggaggaggagcccgcccagggcaaaggtgacagcattgaggagattttagctgactcagaggacgaggaggacaatgaggaggaggaaagaagccgaggcaaggagcagcggaagctggcacgacagaggagccgggcatggctgaaagagggcggtggggacgagcccctcaacttcctggatcccaaggtggcccaacgagtcctggccacgcagccagggccaggccggggcaggaagaaggaccacggcttcaaggtgagcgccgatggccggctgatcataagggaggaggcagacggcaacaagatggaggaagaggaaggtgccaaaggcgaagatgaagagatggctgacccaatggaagatgtgatcatcaggaataaaaagcaccagaagctcaagcaccagaaagaggctgaggaggaggagctggagataccccctcagtaccaagctggaggctctggcattcatcgccctgtggccaagaaggctatgcctggggctgaatacaaggccaagaaagcaaaaggtgatgtgaagaagaaaggccggccggatccctatgcctacatccccctcaacagaagcaagctcaaccgcaggaagaagatgaagctgcagggacagttcaaaggcctggtgaaggctgcccggcgaggttcccaggtgggacacaaaaaccgcagaaaggatcgtcgaccctgaggcccagggcccctgggctgccctgtggtccagtctgaggccctttcagcccccaggctgccttgccaccagctccaggtgctcaagattctggcagagcctggactcaggatgacttggaactagggcttggctctcagaagtcctggattttggaaactccaaatggaatcacccttcagagacatccctggtgcctggagatgggaatgtggcctcagtgcctctgagtaggtgccatgaggcacctttgctttctgcccagagtggccatgagcaccagaacagatgatctccatttccgccagctgcctgtagccacgtggcatcctgcctgtggtctgggtgagatttactgtgaccagatgtagaataaatgtgtctcatcctgca

SEQ ID NO: 176984 - DNA, 543 bp, Homo sapiens
  Payload ID: 14725
  Gene Symbol: RRP12
  Gene Name: ribosomal RNA processing 12 homolog
  ENST ID: ENST00000622320
  CDS Start-End: 446-543
atgcgtcctccctctccagtcccgcgtcggtcgccgcagtcacggagcgcacgcctccacctggatcatgagtgtgacagctggagctcctgcagcccatctgtggagcacaaggtgacagtgaaaatggaagtcatacgttatggaggttgaagcagaaaaagagagggatcccaggatcctgaagattctgtggaactgccatagcagcctggactgcccattacctcctgatttccatttcttgaataggccctgagaagaatgaagaatttgaagtggtaaatggggaacggtttaattttgggtaatgcacacgaatccggaagtgacgccagaagaagaggaagtgaaggctacagggtatccacgtgggttctgagcgtgtttctacgtccctggaagccggtcatttaagctcattcctcgccacggcttagtcaacatgggtcgctcgggaaagttgccttctggtgtctcagctaagttgaagcgctggaagaaaggccacagcagcgacagcaaccccgccatctgccgcca

SEQ ID NO: 176985 - DNA, 459 bp, Homo sapiens
  Payload ID: 14725
  Gene Symbol: RRP12
  Gene Name: ribosomal RNA processing 12 homolog
  ENST ID: ENST00000487612
  CDS Start-End: 1-321
cgaggcaaggagcagcggaagctggcacgacagaggagccgggcatggctgaaagagggcggtggggacgagcccctcaacttcctggatcccaaggtggcccaacgagtcctggccacgcagccagggccaggccggggcaggaagaaggaccacggcttcaaggtgagcgccgatggccggctgatcataagggaggaggcagacggcaacaagatggaggaagaggaaggtgccaaaggtgggcccaacgcgcttgtccattcattcaccgtgttcacttattccttcggtgatcacttgctgaggaagcgtggctaaaaacagaccagagaaactcttctctcggcagcttcctcaaactttttgagtttctcaaactttttttgagaaacattaagaaatctttttatgttgtaaccgagccatttatacaatacatatttaacttaaaggaaa

SEQ ID NO: 176986 - DNA, 833 bp, Homo sapiens
  Payload ID: 14725
  Gene Symbol: RRP12
  Gene Name: ribosomal RNA processing 12 homolog
  ENST ID: ENST00000618765
  CDS Start-End: 304-833
tataaggcttacgcctgtggccctgaaacctggtcctggctggagtaagaaccccatagaacccttagcaacctaacttcctccctagcaacggatctccttggagctcctccccatccgaagccaggaggaggtgtaaaaccggatgttgactgttttaccatagtaatgcacacgaatccggaagtgacgccagaagaagaggaagtgaaggctacagggtatccacgtgggttctgagcgtgtttctacgtccctggaagccggtcatttaagctcattcctcgccacggcttagtcaacatgggtcgctcgggaaagttgccttctggtgtctcagctaagttgaagcgctggaagaaaggccacagcagcgacagcaaccccgccatctgccgccaccgtcaggccgcccgcagccgcttcttcagccggccgtcaggaaggagtgacctgacagtcgatgctgtgaagttacataatgagctgcagtcagggtccttgcgcttgggcaaaagcgaagccccggagacgcccatggaagaagaggcggagctggttctcaccgagaagtcctcgggtaccttcctgagtggcctttccgactgcacaaacgtcaccttcagcaaagtacagcgcttctgggagtccaactcggctgcccacaaggagatctgtgctgttctggctgctgtcactgaggtgattcgctcccagggagggaaggagacggagactgagtacttcgctgctctgatgacaacaatggaagcagtggagtccccggagtccctggccgccgttgcttacctgctgaaccttgtcctgaagcg

SEQ ID NO: 176987 - DNA, 7771 bp, Homo sapiens
  Payload ID: 14726
  Gene Symbol: RRP15
  Gene Name: ribosomal RNA processing 15 homolog
  Uniprot ID: Q9Y3B9
  ENST ID: ENST00000366932
  CDS Start-End: 31-879
actgtcaggtgacgcttccggcgcagaaaaatggcagccgccgctccggactcacgtgtgagtgaggaagaaaacctgaaaaagaccccaaagaagaagatgaaaatggtaactggagccgtagcgtcggtgctggaagacgaggccacagacacttctgatagtgaaggaagctgtggatcggaaaaggaccacttttattctgatgatgacgcaatagaagctgacagtgagggtgatgctgagccctgtgacaaagaaaatgaaaatgatggagaatcaagtgttgggactaatatgggctgggcagatgctatggctaaagtcctcaacaagaaaactcctgaaagtaaacctactattctggtcaaaaataagaagctggaaaaggaaaaagaaaagttaaagcaagaaagactagagaaaataaaacagcgtgataagaggctggagtgggaaatgatgtgcagagtaaagccagatgttgtccaagacaaagagacagagagaaatcttcagagaattgcaacaaggggtgtggtgcaattatttaatgctgttcagaaacatcaaaagaatgttgatgaaaaggttaaggaagctggaagttctatgagaaagcgtgctaagttgatatcaactgtttccaagaaagatttcatcagtgttttgagagggatggatggaagtacaaatgagactgcttcaagcaggaagaaaccaaaagccaaacagactgaagtgaaatcagaagaaggcccaggttggacgatcctacgtgatgatttcatgatgggagcatctatgaaagactgggacaaggaaagtgatgggccagatgacagcagaccagaatctgcaagtgactctgatacataaagcatcataggaaatacaattgcagtcgttttattttttctagaaaaatatgtcatcctctgatagttggggaattataaggataccatttgtaagaaagccaaaagacttttgccagatttcatatttccccttttcatgtacactttatatatacttcattaaaattatattttaaacccttgtataattttaagcattgttcctcagaacatttgtaaaaggatatatttctgcttgaccagcgagatgtgcattttgccaggatcatattggtcatgtctattggtgtattatttcagtatcaccaatgttttcagaaatacagtactaattcatcattaaactctttgaagttaatatttttctgccttctaacttatagactcaactatgtatctgtagtttttgggaatggttggtgttttttgctttgtgttgggaagttattgagaaaacctatataataaaatttaaaattatagtttttcagattttgggtcgtgattttagttttaggtaatctggaagatatgatttaagaaacaacagatttcaactttttttttttttttttttttttttttttttttttttttgagacggagtcttgctctgtggccccggatggaatgcagtggcgtgatctcggctcactgcaagcaccgcctcccaggttcacgccattctcccacctcaacctctcaagtagctgggactacaggtgcctgccaccacgcccagctaattttttgtttttgtatttttagtagagacggggtttcaccatgttagccaggatggtctcaatctcctgacctcgtgatccacccgcctcggcctcccaaagtgctgggattacaggcgtgagccactgcgcccggcccagatttcaacttttattttatttcctttcatttattaaataatataaataatgacagatttattttaggtgttagcctatttttgcatgagagatttacagaggtggaaattctcatgcttaacttatgcaatgagacaatttctcaggaagcaagtttgacatgctttagtctctctcttcttttttttcctcccaaatatttgagttagcttaaattcttttttatggactgcccaaccagtgaattgatgcacttagacaacaagtaatctgcagcagaatattgcatccaatttgagacttgattccatattattgccttaaaggctattaaattgggtgacttttagtatccagctgttaaaaagaggaaagactgtttaatatcattccaaaatttttgtgaaatgtggcccaagatctaaagtttttaagggaattatttttaataaatatgatctgtccctttttgaaaaggatccatcccttttcataataaaaataattccctcctaccacccagttgcacatacttgcatctgttatgtattgaaggataatcccccccaaaaaaactatccaagagcagagatgtttatattttgaaacccatttgagtgttacagtattatatgactaaagctgaatcagtctgtggcctggtatttgttatcataaaggaagatgtacacctaaggtatcaagtggttaaaacagcaaagtacaagatgcatttttgtatttattctaacttttgaacattagtgtctttcagtataaataaatgtgaacaaatatacctcagtagtaatacaggagaactaaatatcctgctataacttaatacagatacatatttcaatatgacttaacaaacacacaattttgaaaaaaaaaaaaaaaaagtgcagcaacttaaacacatttttctccccagaactaagattacacttaatttaatttaatgtgtttctgcgttatactagagttttgcaggaatttttctgaatagtacattcacatgatagatacggataaataccttatttactaaaatgttttgaaacatattttatagtccctcatttgatttgaaaaaatttgacaagatcttcacattgaaagtaaggacgagaatatttgcagatttccttcgttccaaaattattttattccaaagaaaaattgagttgccactatcaggaaaaaaaaaatgtatcacttctgttagaaggctatgaagtatatataaattatatgacaatttttatcatatagatttgatatcttctatgtattcgtatttttgcatcttgggtattaagcaaaataccatatgtataaatatgaaaccaggaatgtgcatattttagaaactaattgtgtatcttaagtgaatgttttgagtagttctgtcacccctattctaaatattttacctacaacatttaaattattctgatatcaatcagataaataatccgagtgtatttcatctttctacattgtctttgtggtttttgtttgtttgtttttgagacggtctcacactgtcacccaggctggagtgcagtggtgcaatctcagctcactgcaacctccacctcccaggttccagctatcctcccacctcagcctcccaagtagctaggactacaggtgtgcaccaccatgcccagctaattttttgtctttttgatgtagatggggttaccccatgttgcccaggctggttgtgaactcctgagctcaagggatccccccgcctcttgcctcccaaagtgcttggattacaggtgtgagccaccataccacctgtctttgaattttttaacgaggggaaagaaaactgcaattcctgcctccccatttatttaaacataacacctaggattttatttttggtaactacttagaataatatagtaggttacttatcttcggttagaaagaactatggaaaataggaaccaataatttggaagtattatttccttatttcatatatagaaataattatcttatttccttatttcatatatagaatattctagatacttggatggctggggttgatgttcttagtatttatcatagtttagcattggttgttatttttaagcatcagaatttgaaagccaatgataatacctgattaggactgaaaatagaattatcttagtagtttagcactttttataatggagttggagcactgaatttattttcaaattacctagaattctgcattgctcaaacattattcaattgattgcaaaatataccttggaaaccctttggatagaacagttcagagggttaccactagtacttagagcctaaagtcactcagtaggaggttctcaaaggtctatttgaaggcaatccaatttctttaaaataaaatattttttgccttttaaaacagatgggtgaagaaagggacgtataaattctgggaaacctcttatgttttcctcccatttccttctatgtctccattaatgtgctaacttgaaggaatttaacttcaaggaaagttgactgatgaagtttatgtagagctgtgaatattataatttgtcaatactttattgataatgttaactttgtttttatttggaaacattttttccagttgaccaaagcagaattcattctgttcttccctcaaattcatctattaggatcaatgtgattgacatttatctccactctgcatgtcactgatatggtatagacgctataagccctgtagatattatgggtatgaagactatttgaggtgaattggcagtgagagcaaattttggaaacaggagagagaactacttcgtgcctataaaaagctctctcactccttccccaagaaaacaggagtctgaattttggccagctgggtatttgaatcttactgactgttgcagcactggtagtcctggtaaattttttcagtgggcgagcttttctgaaatttgattaaacatattagtcaagggaatctgtgaatagatttagaagtagaatgtttgaggtggttgacaagacatttagaattgtgattaatgttttaataaaatgctaagttagaatgaataatcataattatatagatggaagatatattctaacagttcttaaataattttagattctctaaatttagagtgttttctagcttagagagcaatattaatattttttacctagtctactgaacataatttcagggagttagtatttaggactttttacctagagatgcggtaaaccttttaaatttaaatttgctttcttaaaatacctgttccaacattgctcacctttcttctccctcctttttgccctctccttcagtgggaggagcacatattcagctttctgttaaacactctttggttttcaactgagtaaggcaagcaaggatatatgttagaagagtgggcataatactttatattaaaattatagggactaaaagtctaaatcattgctgtcaataggactttttttgatgatggaaataatttatgtctgtgctgttcaatatggtagccactcgcagaggtgactactgagcatttcacgtgtggcttgtgatacagaggaactaaatttttaattttacttaattactttaaattttaaaagttacacgtggctagtgggtctatcccaactatgaagagaataaagctacagagcatctatctagtctaatgaaacaacagtgaatttgggaattgtaaatctgtcttaagctttttccataaacttttattgatataatttaggcatatacaaatactggtgaaattttattgattgaattattgttgacttttttttcagtatttatatttttaaaaagatatgtttctttataattaacttgtattgtagggtaaccattgtccttaaatgttaagccacttagttaataacaaatagcatttggttttttagcattatttatcatctgaggctttcagaattaatgcaccaaaccttaaatatttttgttgttctctaaaagaatgggtttatgatgcaccaaaaggacattttgagaactgccggagcaacagataccaccatgtaaggagtgaattcccatgtttttcacttatatctagaggcctacttatttaggaggtttcctaagtaagtgtatttagttgtaggaccttagagttgcctaggtccattctattctagcatatactcaacatactgccagagcaaatgtaggttgcagattcaggcaaaacacacacacacacacacacaaaaccctgaagagcacaatgagcattattagcacagccaatttaaaatgatgaggtgttaaccacatttgtataaataatagtttctctaaccctgaatcattatcctgcatttttaatgcaatcggttcataaacatcaaagtgaaaacaccaaatttgtaagaggtcaggaccaactggggctctaaatggagagacagctgagagctgtgtccctatgcgtgggtggccttgcagctgttgattcaccctcaggctaccagacagttgcctctttgcatttgcagaaccagacttcaatcttaggtaaaaatgtatccctcccatggacaggacataaacaatagattgacatcagctctgaaaacagtgcagcagccagactcagcagttgccctgaaatactgagaagtaccaagcataacatcaagactgtttctacacaataatatttgtctttgtacagcaacactgggttctcttaagtatattataaatataaaagctcaaagtccaaaaggttcaatgtgatgatatccttctctacaaatgccaggaacaccagggtagattgcatgagacatgactgccgtatcttggtccttactaggattcccaaatatactccttaataaccagtaaagttatatttacactggacattttaagaaataccagtgttcgttgttagatgagagacagcataattttggaatcacaactgagttcagagttcagttttgagtcctactagttttgtttccttgtgtaagtttcttaacctttgtaaggctagcatgtaaatcagatacaataatatatagttcagggtgtaaagattggattaatgtatgcagtgtctatctagcacagtgcctgttatgtagtagcgtgtcaagagatgttctctcttatgcatttggaggattaggtgctgcacctataggtttccattcatttctcatctatgtaattctgagtcttccttttctagatagaattccccccaacaaaaatttaaagtctaacaggtggtaggtgcttattgaggcccagcaattctacttctggaaaccttcctcaggaaaagattctgatgacagaaaatgctgtgtgaacagtattatatagaattgtttttaatagcaagaaattttttaaaacttacaagttcagtgatatgaggacatttacataaactatcgaaccaccagtcttctgtcaattccttttaaaatgatggttgtgaagactgatgaaaacacagtgtcaatgatatgttaactgaaaaagtaagattaaaaacattatggatagtataagtttcttaaatgccaacaatgcatgaggtgaatagaataagacttttttttaaagaatgtaatttttgacagtctgaaaagacaggccttatatttatattgagaaaaatgatcctgacatttaatgagacactaaaacagtttttattttttgcttacttattctgttctagaatccaaactctacatactgtttaatagagcattattgatattagctgtattagatgactgtatgaagagtcctgtttgctagaatcctactttatcttttaagttttgctaattaccctgcaatgaatgttgaacataaaaaatttgactccctttccatgtgtccactgtttccttgtgccttttgattaataaaactttatttttaagtgagaa

SEQ ID NO: 176988 - DNA, 5090 bp, Homo sapiens
  Payload ID: 14727
  Gene Symbol: RRP1B
  Gene Name: ribosomal RNA processing 1B
  Uniprot ID: Q14684
  ENST ID: ENST00000340648
  CDS Start-End: 118-2394
cgccgccgccttctgtgcagtcgcggcccgggcggacggtggctggctgctccgcagcgctcggctggctgcagcggcaccgcgggttgcgcggccggggatgctccagcgggcgcgatggcccccgccatgcagccggccgagatccaatttgcccagcggctggcgtccagcgagaagggcatccgggaccgagcggtgaagaagctgcgccagtacatcagcgtgaagacgcagagggagacaggaggtttcagtcaggaagaacttctgaaaatctggaaggggctcttctactgcatgtgggtgcaggatgaaccccttctacaggaagagctcgccaacaccattgcacagctagtccatgctgttaacaactcagcggctcaacacctgttcattcagaccttttggcaaaccatgaatcgagaatggaaaggaatagacaggctacgcctggacaaatactatatgctgattcgtctggtcctgaggcagtcctttgaagtcttgaagcgaaatggctgggaagaaagccgaatcaaggttttcttggatgtcctgatgaaggaggtcctgtgtcctgagagtcagtctcctaatggagtgagattccacttcattgatatttacctggatgaactctccaaagtcggggggaaggagcttttagcagatcagaatctcaagtttatcgatccattctgcaaaattgctgcgaagacgaaggaccacaccctggtacagaccatagctcggggtgtcttcgaagctatcgtagatcagtctccttttgtgcctgaagagacgatggaggaacagaagacaaaagtgggtgatggtgacctctctgctgaggagatacctgaaaatgaggtatccttgagaagagctgtcagtaaaaagaagacagcactgggcaaaaaccattccagaaaagatggactcagtgatgaaagaggaagagatgactgtggaacctttgaggacacagggccccttctccagtttgactataaggctgttgctgatcgactcctggaaatgaccagcaggaagaacacgccccacttcaacaggaagcgcctctccaaactcatcaagaaattccaagacctttctgaaggaagcagtatatctcaactcagttttgcggaggacatttctgctgatgaagatgaccaaatcctcagtcaaggaaagcataagaagaaaggaaataaacttttagagaaaactaacttggaaaaggagaaaggaagcagagtcttttgtgtagaggaagaggacagtgaaagcagtcttcaaaagagaagaaggaagaagaagaagaagcaccacctgcagcctgaaaatccaggcccagggggtgcagccccatccctggaacagaaccggggcagggagcccgaggcctctgggctgaaagccctgaaggcacgtgtggccgagccaggtgcagaggccacgtccagcactggggaggagagtggctccgagcatcctccagccgtccccatgcacaataaaaggaaacggccacggaagaagagcccgagggcccacagggaaatgttggaatcagcagtgttgcccccagaggacatgtctcagagtggcccgagtggcagtcatcctcagggacctagagggtccccgacaggtggagcccaactcctaaaaaggaagcggaaacttggagttgtgcccgtcaatggcagtggcctgtccacgccggcctggcctccattgcagcaggaaggccctcccacaggccccgcagagggggcgaacagccacaccacgctgccccagcgcaggaggctgcagaaaaagaaggcagggcccggcagcctggagctctgtggcctgcccagccagaaaacagcaagtttgaaaaagaggaagaaaatgagagtgatgtcaaacttggtggagcacaacggggtgctggagtccgaagctgggcaaccccaggctctgggaagcagtgggacttgcagttccctgaagaagcagaagctgagggcagagagcgactttgtgaagtttgacacccccttcttaccaaagcccctgttcttcagaagagccaagagcagcactgccacccaccctccaggccctgccgtccagctaaacaagacaccatccagctccaagaaagtcacctttgggctgaacagaaacatgactgccgaattcaagaagacagacaagagtatcttggtcagtcccacgggcccttctcgagtggccttcgaccctgaacagaagcccctccacggggtgctgaagacccccaccagctcacctgccagctcacccctggtggccaagaagcccctgaccaccacaccaaggagaaggcccagggctatggatttcttctgaggagcagcagagtcccttgtaaaagactgcttttgtacagaatgcgctataaattatacctttaagaatgtggggccttttttatgattttgtaagttcccataagttgtgtgcacgaggttctgagagtgcccgcaggctgctgcgtcctggcccctctgtagtggctgcgggcgtcttggttgaatcttttgctacaaaccatgtttgcgtttgagctctccaggattttacatttttgggtaacctcagtgattcccattggtgtaggaaatgagaccctctctgaagctgaggagagcacgttgatctgaactttaaatcaatcagtgctgctggcacaatgaaaggtggaactgcacttctgttgagctctcagttctgcggaatttggtactcattaccgtattcgccgtactaagttggtttctgttagtcttaacagtctgttttcttttaaaagcatgtagggcttcattgccatgttctgtgggtgtttggcaggttaccgatggggaagattcttgtcacagaatcagcaataccatagtttttctacatgtgctcagctgggggtgtggacaggtaggggtggggaaagaagaggctctgcgttctgggggctttttcttctcctccccctacccggtttccctccctgttttcctacctctacggcaagcccaaagtgtcttcccgggagcccagcgcagcccccggctcttacccaggaccccgccccgtgctgagccttctgctgaggtccttgcgtggagcacactcattcctccaagcccttgcgctcccgtttctctctctctccgtccacgttccagccgagtcactgcctgaccggctccatggcagctccccatcttccctagaggctgcctgcgcatctggagcctgcgctccggctcagcgacctttcctctcaaatgcggaagcgtgcacttacagttcagaccgttctcctgtaagttcattacaaacacgggcggaaggcactcaggctttcgttggagaaacagaaataaggccttcttttgagcagcgattgctggatcattgatctgtttgaggaagtgtctgacctgggcctgagagctggagaaggtgcagattcaaagtgagcggctcctgaggagagccgccaaggctgctcgccttctccgtggcttccgcagctaccgtctgcacggtgagagggcacgggcacacggttcgggctggcgtgcagctctcccagccagccacgctctgctcaggcctggaagtgaaagccgcctccttcccgttatgccccccatacaggagcctcggtttttcagcaaaacgcggccagtccccttctccactgctgcctcccagcagagggccccaggatctccaaggtcccagctatggctttggacaacgtggcttcggcccctggggttgcagagcttgcattgggtttacctcggtctcattcattcatggagccaagggtggggtttcacctgcgaacatcagactgacttgctggcgtcaagagcagttgactcactgatgaaggccctggtgaggagaaagcactctgttcttcgcctactctgtaatcgttttgtcataatgagccatgaaaaaagtaatgaacttgtgctgttaatcgtcactgtaatgagaagtcttacgtacaacatagctgtggtggcttaatggctgcattagataggatcctcacatcccattcagaaccaaaactgatacagtgaaacaattaaggtgagcaaatagttttaacttttcttttttttttttaagtttcattcttcctagaatatttttctaacaatttttatttcagctttaaagatgggtcatatagccaaacgggccatataatccaacattgttgagatgtcttaggacatctaaggcaaaactggcacatttgttctgcagactattgcaggaatgttttttcctagcatttctatattatctgtccattctgaggaaccagtgaatgtcctataaatgcacctcctgtcaaaaccatgcctgagaggtcccggctgggagtgacagggtgcttcttagattctattggtccttctctcattctccgaacttactcctttttatgggtaagtcaactaggtttacagtcccttatttttaatgcctaagttttgacagcaggaagaaaacaattttttaaaaattctcattacatagacgcacaagaatatgtcacataaagaaaatgtgtttagaatactggttttctatttacgcatgatattttcctaagtaaaattgccaagtggacttggaagtccagaaaggaaaataatttaaattaatgctggtgatcttaacaatattttgtaaaatgatgcttcccccttctccatggtctagtcaattttgtacaattaggtatctgactttacaagtttgttatcctttctaatttttactgaactgaaagcacaaagaagactacacagaaaatctggaaacagttgcaggtgttgggaggaagatgaaatcgagctgtcttttaacttttgtatgtgttttatcagaatttgctggactatgctggcaaggactttgtttacgatcaaattgtactagtgtctgcagggtttgtcagtactcgtcaaagccaagtccaattaaaaaaaaaagtctttgccctccaa

SEQ ID NO: 176989 - DNA, 1159 bp, Homo sapiens
  Payload ID: 14728
  Gene Symbol: RRP36
  Gene Name: ribosomal RNA processing 36
  Uniprot ID: Q96EU6
  ENST ID: ENST00000244496
  CDS Start-End: 11-790
ctgccagctgatgccgggagctaactaccgcgccggggccggggccggggccggggcccgacgtccccgcggggcccgggaccgcgaggaggacggcgggggcctggagcccgcggccgtggcccgcgacctattgaggggcacatctaacatgtcatttgaggagctgttggaattgcagagccaagtggggactaagacgtacaaacaattggtagctggaaatagtcctaagaaacaagcttctagaccacctatccaaaatgcatgtgttgcagataagcacaggcctctggaaatgtcagccaagatccgagtaccatttttacgtcaggttgttcccattagtaaaaaggtagcccgggaccctcgctttgatgatctgtcaggggaatataatcctgaggtgtttgacaaaacataccaattcttgaatgacatccgagcgaaagagaaagagcttgtgaaaaaacagttgaagaagcacctttcaggagaggagcatgagaaactgcagcaactgcttcagcgaatggagcagcaagaaatggcacagcaggaacgaaagcaacagcaggagctgcacctggccctgaagcaagaacgtcgggctcaggcccagcagggccatcggccatacttcctgaaaaaatctgagcagcgccagttggcactagctgagaagttcaaggagctgaaacgcagcaagaaattggagaacttcttgagtcgaaagaggcgacgaaatgcaggcaaggacaggagacatctccctttgagcaaagagtaataaggaactatcctctgctctgccactgccccagggagacatggatctgtgaggacagatttggccacggctggtttccgttcaagggcaaggatcacagctgcccttgaatctcattgcctcagagaagactagagggctcttggactatccctagggctacacaagaatagttcagccttctgccatgccacacagcctcagcttgaatctggttcattgcgtcctcgtgttcttctctcatccttgccttaaaccagggattctgataccgaagaagaggggccaatgaaaaccatggagtctgttcgtgactcccagggctgggacattatgtaggagccacttcataaacattctctttactca

SEQ ID NO: 176990 - DNA, 528 bp, Homo sapiens
  Payload ID: 14728
  Gene Symbol: RRP36
  Gene Name: ribosomal RNA processing 36
  ENST ID: ENST00000607394
  CDS Start-End: 1-90
gaatataatcctgaggtgtttgacaaaacataccaattcttgaatgacatccgagcgaaagagaaagagctaacatttgcagaatgctaaccatgatactcattttccaatgtggagcttgtgaaaaaacagttgaagaagcacctttcaggagaggagcatgagaaactgcagcaactgcttcagcgaatggagcagcaagaaatggcacagcaggaacgaaagcaacagcaggagctgcacctggccctgaagcaagaacgtcgggctcaggcccagcagggccatcggccatacttcctgaaaaaatctgagcagcgccagttggcactagctgagaagttcaaggagctgaaacgcagcaagaaattggagaacttcttgagtcgaaagaggcgacgaaatgcagggaccaaggggagatactggaaacctctgagcttcagctgttggtttttgggttttgtttttgttttattgagatacagttcacttaactatacagtttacccatttaaggtatacagt

SEQ ID NO: 176991 - DNA, 3801 bp, Homo sapiens
  Payload ID: 14729
  Gene Symbol: RRP7A
  Gene Name: ribosomal RNA processing 7 homolog A
  Uniprot ID: Q9Y3A4
  ENST ID: ENST00000323013
  CDS Start-End: 17-859
gctcccgggtggcaagatggtggcgcgcaggaggaagtgcgccgcgcgggacccggaggaccgtatccccagcccactgggctacgcagctattccaatcaagttctctgaaaagcaacaggcttctcactacctctatgtgagagcacacggcgttcgacaaggcaccaagtccacctggcctcagaagaggactctttttgtcctcaatgtgcccccatactgcacagaggagagcctgtcccgcctcctgtccacctgtggcctcgtccagtctgtagagttgcaggagaagccggacctggctgagagcccaaaggagtcaaggtcgaagttttttcatcccaagccagttccgggtttccaggtagcctatgtggtgttccagaagccaagtggggtgtcagcggccttggccctgaagggccccctgctggtgtccacagagagccaccctgtgaagagtggcattcacaagtggatcagtgactacgcagactctgtgcccgaccctgaggccctgagggtggaagtggacacgttcatggaggcatatgaccagaagatcgctgaggaagaagctaaggccaaggaggaggagggggtccctgacgaggagggctgggtgaaggtgacccgccggggccggcggcctgtgctcccccggactgaggcagccagcttgcgggtgctggagagggagagacggaagcgcagccgaaaagagctgctcaacttctacgcctggcagcatcgagagagcaagatggagcatctagcgcagctgcgcaagaagttcgaggaggacaagcagaggatcgagctgctgcgggcccagcgcaaattccgaccgtactgagctgtgagagccgcagtgaatggctggaggtgcagggccaggaggaggcgaggcagggcctgcagcggtctctgagaggccgagctctggccaacgggccccaggttgaaggccaccgcgtccaacagccccatcagagtccacacaggccaggagggaaggaccaggccacccctcgggtcttgtgcttcagcagtcctggggacccaggcgtgccgagaggaggacttgtccttcctgcttcttgcctccacaccctcctctccaggaccctggatgaatccgttctgtgcttccttttccctcaatgcaaaagcccttgctggcaacgaaaaagcctcaaaagcagtgagaatacaagaaccttttattttccatccagttgggcagcagggaaaggctaggtgggcccagcccgcccttccttcctccagctggctggagattattagccaggagacagcagccctggaacccagactctgtctcccccttgaggtcacagatgttgaagttggaatctcgctccttcccctgactaccatcctaggctgggcctcaagactagtgaggcctgtccccaccatccctggccttgttgtggggctcaggaactcagagtcccagtgttgagtctgggagcactaggtcttcatagttccaggcccagagctacagctgggctgggagcgtgtgtgtgcactgtaagaaggagctgatgatactggccacgtgctggggttcgctcatgtggacacagtgattgcctgggacttccacaaactggaaccgctggagaggggagggggtgggtagtgagatgtggccagaggagcctagggagctccatgggccccggggtcagggccctcccacagcattccagctccctgcaggtcaggagcgcctcccacagtgagtttcccccacactcggctccttggagccccgacagtccatagcaccccaggagatgtctaaccttagggacttggaggcctcccaggggtctaggccagctgagttgtgaagttgcatggcagggacagggcagggccgaggccagggttgctgtgattgtatccgaagtagtcctcgtgagaaaagataatgagatgacgtgagcagcctgcagacttgtgtctgccttcaagaagccagacaggaaggccctgcctgccttggctctgacctggcggccagccagccagccacaggtgggcttcttccttttgtggtgacaacgccaagaaaactgcagaggccccagggtcaggtgtaagtgggtaggtgaccataaaacaccaggtgctcccaggaacccgggcaaaggccatccccacctacagccagcatgcccactggcgtgatgggtgcagagggatgaggcagccaggtgttctgctgtggtttgggagcctataaagtgagactaggctgggcatggtggctcccatctgcaaaaccagcactttgggaggccaaggtgggcggatcgcctgaggtcaggagtttgagaccagcctggccaacatggtgaacccccatctcttaaaaatataaaaattagctgggcatggtggcaggtgcctgtaatcccagctactcaggaggctgaggcacgagagtcgcttgaacccgggaggtggaggttacagtaagctgagatcttcccactgcactccagcctgagcgacagagtgagactccatctcaaaaaaaaaaaaaaagtgtgactattagctgggcatgatggcatgcgcctgtagtgccacctactcaggtggctgaggtgggaggatcatttgagcccaggagtttgaggctgcagtgagctatgactgagcctgagcaacagaatgagaccctgtctctcaaaaaatgtgggactgtctctggcagttgggtcacctaattgtgcctggccccaagaaggaggggtgggtacttgaggatggtaaagaacctccccaccaaaggtctctgtttcttaaattctgattacatgtgtccccaggcctctagggactgatcactggagcatgaggcctgatagatcctggtggtcacttgttgggcctgggggcagaccaggggtctttcccagtgcatgagaagagatgggtgaggtgggaccagagtgggcgacagtggctggacaccagctgcctgagccccgccttacctctttgagggtggatttcattgtgtctatcatgaacgacagggactccttgtcagagtaattctctcttggatcaaaatatccgtggactgctctggaaagtgaggagttgggggttgttggggttcatcttagaaccgcctcccagcggtgcccccatcctgccctgggttcaggcctctgaggagaaaccaaagcctgggctaccccaactcccacagctgggtcccttgaccctgggttggatttgaggctcagttaatctcagctcacgctcagctggcacaagccaggcgcaagcaagtgctgaaggcacagccttgctggggcgcagggagttcaggacttggtcacagtcagccctgaacagcagagctgggatctgaacaggcgctggagcccacacttgctctgagagagaatttatgtcttcacaatcctcccattgaaagtctacaatcctggccgggtatggtggctcacgcctgtaatcccagcactttgggaggctgaggcgggtggatcacgaggtcaggagatgagaccatcctggctaacatggtgaaaccctgtctgtactaaaaatacaaaaattagccgggcttggtggtgggtgcctgtagtcccagctactccggaggctgaggcaggagaatggcgtgaacccgggaggcggaccttgcagtgagctgagattgcaccactacactccagcctgggcgacagagccagactccatctcaaaaaaaaaaaaaaa

SEQ ID NO: 176992 - DNA, 687 bp, Homo sapiens
  Payload ID: 14729
  Gene Symbol: RRP7A
  Gene Name: ribosomal RNA processing 7 homolog A
  ENST ID: ENST00000416699
  CDS Start-End: 9-170
gtggcaagatggtggcgcgcaggaggaagtgcgccgcgcgggacccggaggaccgtatccccagcccactgggctacgcagcctccagactgttaagagaagctgtgaaggcacaggcagtgggatctgagctggcaggaggggcggaggtgatgctaaggctctcctgaggaagcgaggtttgagctaaacctgagctattccaatcaagttctctgaaaagcaacaggcttctcactacctctatgtgagagcacacggcgttcgacaaggcaccaagtccacctggcctcagaagaggactctttttgtcctcaatgtgcccccatactgcacagaggagagcctgtcccgcctcctgtccacctgtggcctcgtccagtctgtagagttgcaggagaagccggacctggctgagagcccaaaggagtcaaggtcgaagttttttcatcccaagccagttccgggtttccaggtagcctatgtggtgttccagaagccaagtggggtgtcagcggccttggccctgaagggccccctgctggtgtccacagagagccaccctgtgaagagtggcattcacaagtggatcagtgactacgcagactctgtgcccgaccctgaggccctgagggtggaagtggacacgttcatggaggcatatgaccagaagatcgctgaggtaga

SEQ ID NO: 176993 - DNA, 6560 bp, Homo sapiens
  Payload ID: 14730
  Gene Symbol: RRP8
  Gene Name: ribosomal RNA processing 8, methyltransferase, homolog (yeast)
  Uniprot ID: O43159
  ENST ID: ENST00000254605
  CDS Start-End: 119-1489
ggctgtcacgctttggtttccgggtcggttctggcaggtctgagcgctccgacttccagaggagcgctgtgcacgtggagaagagcggggactcggcgaccctgccctcccgaccctcatgttcgaagagcctgagtgggccgaggcggccccagtagccgcgggccttgggcccgtaatctcacgacctccgcctgcggcctcctcgcaaaacaagggctccaagcgccgccagctcttggccacattacgggccctagaggcagcatctctttcccagcatccccccagcctatgtataagtgactctgaggaggaggaggaggaaaggaagaagaaatgccccaaaaaggcatcatttgccagtgcctctgctgaagtagggaagaaagggaagaagaaatgtcaaaaacagggcccaccttgcagtgactctgaggaagaagtagaaaggaagaagaaatgccacaaacaggctcttgttggcagtgactctgctgaagatgagaaaagaaagaggaaatgccagaaacatgcccctataaattcagcccagcacctggacaatgttgaccaaacaggtcccaaagcctggaagggtagtactacaaatgatccaccaaagcaaagccctgggtccacttcccctaaaccccctcatacattaagccgcaagcagtggcggaaccggcaaaagaacaagagaagatgtaagaacaagtttcagccacctcaggtgccagaccaggccccagctgaggcccccacagagaagacagaggtgtctcctgttcccaggacagacagccatgaggctcgggcaggggctttgcgagcccgcatggcacagcggctggatggggcccgatttcgctacctcaatgaacagttgtactcagggcccagcagtgctgcacagcgtctcttccaggaagaccctgaggcttttcttctctaccaccgcggcttccagagccaagtgaagaagtggccactgcagccagtggaccgcatcgccagggatcttcgccagcggcctgcatccctagtggtggctgacttcggctgtggggattgccgcttggcttcaagtatccggaaccctgtgcattgctttgacttggcttctctggaccctagggtcactgtgtgtgacatggcccaggttcctctggaggatgagtctgtggatgtggctgtgttttgcctttcactgatgggaaccaacatcagggacttcctagaggaggcaaatagagtactgaagccagggggtctcctgaaagtggctgaggtcagcagccgctttgaggatgttcgaacctttctgcgggctgtgaccaagctaggcttcaagattgtctccaaggacctgaccaacagccatttcttcttgtttgatttccaaaagactgggccccctctggtagggcccaaggctcagctttcaggcctgcagcttcagccatgtctctacaagcgcaggtgacctctggatcttccttgaaaggggaggcagatctcaaactccaggctcagaactgtgaagactgtttccagcctggctgtgagccaagacctggttcctggtggaccctgaggacaaagtgtgataaaacctctggctcagacttgctctactgaaggcttcttggttataagatgcataaagtcactggggctagctaaacaataaagagtttattgtgagaacatggggatatctgtctcatgacacttcaggtgttatgaaaactagatggtttggaattcaaggcatctttaggttttgctcttctttccaactaagaagccacatggccttcctgtcctgccatctccactctgctgtcatctgatctgtctacagatcagcttcctctgctcacccatagcttctgctccttcagcttcagtttgcccaggccttcaaggttgcagacaggcagctgttgctgtttgactctgaggcaactggttgtccaccaacatcttggctcaagacatcagtctgagccaccaacttgagactgtttggttgtccccataccgagcatttctagtggtttatctttcccctctcccctcatctccatttttggaaccatatagcatcaagccactcccaacacctattgtcctgtgggactttgggatgtatatagctgagagcacagattttggaatcaggtagacctggatttaattcttggcctgctacccagaggcacttaaagtcatttaatctctgtatatcacattcctcatttggaaaatggtagaatttttgtcttgcagggtggttgtgtgggttaactggagaaatctgtagccagggctgggaacataggaggtgctcagtaaactagctatgactattatgtgttgtaagccttattgttttttgaagatcttccctaggctggttggaggctgaggggtaaagaatggatttgttgactaaggaagcctctgggagaggctagacctttcaacaggcctgcttcataggctatttaatgacttttaatagattctgagcttctgtccttggaggggtagtgagggagctgggtctctgttcataaacaacttgttgatgccatgtgggcttgggggcattgggctgttcattggcggaagagtctgtccactatctctgccttgcagtggactcagatcagcatgtcctgggaaagctataggcaaggtgctgagggaaggtgagtttgaatgatagattctaggcctcccccaaaaggtatctgccatgtgcccaggtataaagatatggcctcttgtacttgtttccaggaatacctgacagtacccattgggagatcataggttctatgccctgagccagttggatgcctctaataaggggatggaggttttgaaacaggctgtagtccagagggcatgtttggaggctgggctgtgaatcattaggcaggcactacacagtgcctctacacgtactgttctttctgctggatattcatcggactggcagtttgctcatctttccgaacagcctagttgtttcctattctactcccaaagcaaaatcagttcttcatctgtactctcaaagtactatgtgaagagtgctacttcagcttctaaatattgcattgtgattcctttgtgcatttggctgctgttttctcaagccatgtttatctttgtattcccggagcttgtcatttgagatatagccagtgtacttattcacctagggagagataaggaatgacagggtccagttgagtgggatagatgagaacaggggtgttatagaaacccaggtactagggcacaagatgagggcactgttgactagtcatgatggaagaagtaggcagacaggagaacttcattaggtagaattggtgggatgttgaggttggtaagagaggaatctgaagtaagttccaggttgctcaactgtgggtaggctggtgatgccattcaaagtgttggattttaggaagtgggacatgcgtgaaatctgtgctgggggtctgggaatcagcagcctagaggtggtaattaaagtcagaatagatgagatattcagggtaagataatgagaagagaaaatggctcagaatagaactgaggagcatgtcatggatgggtaaaggaaaatgaagcagtgaaggtgatggaagaggagaaggttcacccagagatgtaggagtaaaaccaggagagttaatttttttttttttttttttttaagacagagtcttgctctgtggcccaggctggaatgcggtggcgtgatctcaggtcactgaaacctctgcctgctggttcaagcacttctcctgcctcagactcccgagtagctgggaatacaggcacatgccaccacgcccagctaatttttgtatttttagtagtgacggggtttcaccatgttggccaggctggtctcgaactcctgacctcgagtgatcggcctgcctcggcctcccaaagtgctgggattacaggcatgagccactgtgcccagccagtgttttttttttttttttttttatgggaggatgggcaggttgttagctgtcgagtgctattgagatgagagagaactcagaatgcagtggggtaaggattgctgagtaatgtggagggcctgtttgaggtaaatggcagtggtaagaggttgctccattatgaaagccctcttccagagttcctgatagggccccagaagttcatttctgattgctttgattttttttcaggggagcaggaagccagtttatcatttgagagtgagaataggggagaggaaatatcttccaggcccacagtgcatagaaatacccagtcagggcaaaatgatttatctgtttacctctcctcatcacttgggcccagagcaatcagcagtgattaggtagagaggagccgagcagagggaagagcataccaatcactcctccctttcccagtgcaggctcctagacttagctggggcagagctgggagaggaaaaagggatttaaaactgcaacaggtgcagattattgttacacaggattagacattctaattaattgagattatgtttgttccttaaactgatcacaggactatctattaagaacatcacaacctcgctgcagcttttctccatagcagggagagtacctcccagtgaataaaatttggagggtggtaagagacaagaataaaattgggtttggttatccgtgcctcatgcttgttcagcatccctttgagagttctccaaataaatagttactgcttctgcagttattggtgtgctccagcttctgttcccataatatagtccagtcctaagggaacacagttctaaaagaaacaacatgatcttggcagagacaccgctcagctccaaacccaaccatttatgtaactgcacaaaactctctacagcttttcacagagaccagtaattagaacctttcatcccctggtcatcctccttcccaggtgaattctctgaccagccatctggttttaggatacccaactcctgcagtaactgccttactggtggtctaattgcttctactcgtgtccctaaagcaattaattttccacacagccatgtgatctttttaaaatgtaaatcagcttatgtcacttctctgcttaaaatccttcaatggattctcactgcctcgagaacaaaagacaaacttttcaggccccgtgtgatcttgcccaggcctccgtcaccatcaccatctgcatcttaacccactcctcccctttcacaaaactccagccacacagacttgctttttattcctcaagctttccaaactgtttctactgagagtctttgcacatgctccatcttccttgaatactctttccccagtgagctcattttcatcttcctgaattcataccactattacctttgcttctgtggaagaaactggccagatgctcacccaaatgtcctctttctggacacaggtaaactgcatttcccagctccatgcatctaggcctatgtgagtagttctcaacagtggaaaatgagtggaagtgatgtttcaatactagaccaaggcagttaaagggtggctgagccatttccattattctcttcctccttcctcttcaaggtaaccttgaagcacatgttttgacggtgatggagtcatagcatagaagaagtctgaatacctgagttactatttagggcataatagctacttgaccaaaaacatccatattggactttgaacaagaaaataaacttgattacattctgctagtgagttttgagggtgttttagcagttatcattatatacactggatatatcttctatggtatcctgtccaccttactcttgaccacagtaccctctttgtttccttcagggtgtttcagatatttaattatcttgccagatgccagtcaacactttctttttgtcccatgagtttaaaatcaggggaaaacatgtactcccaataggaagttgagatactcttttttttttaaatccgtcattgtgactgtgaccggaaaaacaaatcccactaaagaatgtcctaaacagatgtttttttttgtcatataacctggagttaggtgatttggcattggttctggagctgaaggatgttagggatgaggtctctgtagttttcttgtctcatggtcacgaaatgaagtgttattgattaagcagggatgccctacttagtattagacttcttggaagtctccttaattgccacagcccctatctttttggcttcgtttcaagggtccttctacattgttaatactctggtataaatacgttccattattccctataacatgactgaaaccaatctaaagtattaacattttaaatatgtttttgggccaagtgcagtggctcttatctgtgatcccagctactaggaaggctgaggtgggaggattgcttgagcccaggaatttcaggctgtagtgagctatgattgtgccactgtactccggcctggataactgagatcctgtctcaataaataaataaaacaatt

SEQ ID NO: 176994 - DNA, 956 bp, Homo sapiens
  Payload ID: 14730
  Gene Symbol: RRP8
  Gene Name: ribosomal RNA processing 8, methyltransferase, homolog (yeast)
  ENST ID: ENST00000530762
  CDS Start-End: 96-332
gtcggttctggcaggtctgagcgctccgacttccagaggagcgctgtgcacgtggagaagagcggggactcggcgaccctgccctcccgaccctcatgttcgaagagcctgagtgggccgaggcggccccagtagccgcgggccttgggcccgtaatctcacgacctccgcctgcggcctcctcgcaaaacaaggcctcatccattctctttaggcccactgtcatcccctgttttcctccagggctccaagcgccgccagctcttggccacattacgggccctagaggcagcatctctttcccagcatccccccagcctatgtataagtgactctgaggaggaggaggaggaaaggaagaagaaatgccccaaaaaggcatcatttgccagtgcctctgctgaagtagggaagaaagggaagaagaaatgtcaaaaacagggcccaccttgcagtgactctgaggaagaagtagaaaggaagaagaaatgccacaaacaggctcttgttggcagtgactctgctgaagatgagaaaagaaagaggaaatgccagaaacatgcccctataaattcagcccagcacctggacaatgttgaccaaacaggtcccaaagcctggaagggtagtactacaaatgatccaccaaagcaaagccctgggtccacttcccctaaaccccctcatacattaagccgcaagcagtggcggaaccggcaaaagaacaagagaagatgtaagaacaagtttcagccacctcaggtgccagaccaggccccagctgaggcccccacagagaagacagaggtgtctcctgttcccaggacagacagccatgaggctcgggcaggggctttgcgagcccgcatggcacagcggctggatggggcccgatttcgctacctcaatgaacagttgtactcagggcccagcagtgctgcacagcgtctcttcca

SEQ ID NO: 176995 - DNA, 1989 bp, Homo sapiens
  Payload ID: 14730
  Gene Symbol: RRP8
  Gene Name: ribosomal RNA processing 8, methyltransferase, homolog (yeast)
  ENST ID: ENST00000533907
  CDS Start-End: 103-1023
tttccgggtcggttctggcaggtctgagcgctccgacttccagaggagcgctgtgcacgtggagaagagcggggactcggcgaccctgccctcccgaccctcatgttcgaagagcctgagtgggccgaggcggccccagtagccgcgggccttgggcccgtaatctcacgacctccgcctgcggcctcctcgcaaaacaagggctccaagcgccgccagctcttggccacattacgggccctagaggcagcatctctttcccagcatccccccagcctatgtataagtgactctgaggaggaggaggaggaaaggaagaagaaatgccccaaaaaggcatcatttgccagtgcctctgctgaagtagggaagaaagggaagaagaaatgtcaaaaacagggcccaccttgcagtgactctgaggaagaagtagaaaggaagaagaaatgccacaaacaggctcttgttggcagtgactctgctgaagatgagaaaagaaagaggaaatgccagaaacatgcccctataaattcagcccagcacctggacaatgttgaccaaacaggtcccaaagcctggaagggtagtactacaaatgatccaccaaagcaaagccctgggtccacttcccctaaaccccctcatacattaagccgcaagcagtggcggaaccggcaaaagaacaagagaagatgtaagaacaagtttcagccacctcaggtgccagaccaggccccagctgaggcccccacagagaagacagaggtgtctcctgttcccaggacagacagccatgaggctcgggcaggggctttgcgagcccgcatggcacagcggctggatggggcccgatttcgctacctcaatgaacagttgtactcagggcccagcagtgctgcacagcgtctcttccaggaagaccctgaggcttttcttctctaccaccgcggcttccagagccaagtgaagaagtggccactgcagccagtggaccgcatcgccagggatcttcgccagcggtgaatgggggtcagggactgtgagaagccatgtggtgggtcagtcataggctcagatcagaccaatatgtgacccttgccttccactctcaggcctgcatccctagtggtggctgacttcggctgtggggattgccgcttggcttcaagtatccggaaccctgtgcattgctttgacttggcttctctggaccctagggtcactgtgtgtgacatggcccaggttcctctggaggatgagtctgtggatgtggctgtgttttgcctttcactgatgggaaccaacatcagggacttcctagaggaggcaaatagagtactgaagccagggggtctcctgaaagtggctgaggtcagcagccgctttgaggatgttcgaacctttctgcgggctgtgaccaagctaggcttcaagattgtctccaaggtgagggccccaagacatctgtacctgtttttgtctcatgtggccctattcagggtactggtgttcaggaaggaggctttaggcacaggaacagacattttgctccccaacggaagtgggagccctgggaagctttgtgagcagaggcagtacatagagggaggtgttttaaggagttgggatgaggatttggttctcactgggtcttttctgcccctaggacctgaccaacagccatttcttcttgtttgatttccaaaagactgggccccctctggtagggcccaaggctcagctttcaggcctgcagcttcagccatgtctctacaagcgcaggtgacctctggatcttccttgaaaggggaggcagatctcaaactccaggctcagaactgtgaagactgtttccagcctggctgtgagccaagacctggttcctggtggaccctgaggacaaagtgtgataaaacctctggctcagacttgctctactgaaggcttcttggttataagatgcataaagtcactggggctagctaaaca

SEQ ID NO: 176996 - DNA, 726 bp, Homo sapiens
  Payload ID: 14730
  Gene Symbol: RRP8
  Gene Name: ribosomal RNA processing 8, methyltransferase, homolog (yeast)
  ENST ID: ENST00000534343
  CDS Start-End: 78-500
gagcgctccgacttccagaggagcgctgtgcacgtggagaagagcggggactcggcgaccctgccctcccgaccctcatgttcgaagagcctgagtgggccgaggcggccccagtagccgcgggccttgggcccgtaatctcacgacctccgcctgcggcctcctcgcaaaacaaggttcctctggaggatgagtctgtggatgtggctgtgttttgcctttcactgatgggaaccaacatcagggacttcctagaggaggcaaatagagtactgaagccagggggtctcctgaaagtggctgaggtcagcagccgctttgaggatgttcgaacctttctgcgggctgtgaccaagctaggcttcaagattgtctccaaggacctgaccaacagccatttcttcttgtttgatttccaaaagactgggccccctctggtagggcccaaggctcagctttcaggcctgcagcttcagccatgtctctacaagcgcaggtgacctctggatcttccttgaaaggggaggcagatctcaaactccaggctcagaactgtgaagactgtttccagcctggctgtgagccaagacctggttcctggtggaccctgaggacaaagtgtgataaaacctctggctcagacttgctctactgaaggcttcttggttataagatgcataaagtcactggggctagctaaacaataaagagtttattgtgagaaca

SEQ ID NO: 176997 - DNA, 1578 bp, Homo sapiens
  Payload ID: 14731
  Gene Symbol: RRP9
  Gene Name: ribosomal RNA processing 9, small subunit (SSU) processome component, homolog (yeast)
  Uniprot ID: O43818
  ENST ID: ENST00000232888
  CDS Start-End: 75-1502
aggcggctggggagctgggagggttcagctgccacgtgagttctgcggccgctgctacacgcctggtgggcagcatgtcggcaacagcggctgctcgtaagcggggaaagccggcctctggggccggggctggcgcgggggccggcaagcggcggcgaaaggccgactctgcgggggacaggggcaaatccaagggtggcggcaagatgaatgaggagatctccagcgactctgagagcgagagcctagctccaaggaagcctgaggaggaggaggaggaggagctggaggaaactgcacaggaaaagaagctgcgcttggccaagctctacctagagcagctccgtcagcaagaggaggagaaggctgaggcccgtgcatttgaggaggaccaggtggcggggcgcctgaaggaggatgtgcttgagcagaggggcaggctgcagaagttggtggcaaaagagatccaggccccagcctcagctgacattcgcgttttacgggggcaccagctctctatcacatgtttggtcgtcacccccgatgactcagccatcttctctgctgccaaagactgcagcatcattaagtggagcgtggagagtggacggaagctgcatgtgattcctcgagccaagaagggtgccgagggaaagccccctggccacagcagccacgtcctctgcatggccatctcctccgacggcaagtaccttgcctctggtgaccgcagcaagctcattctcatttgggaggcccagagctgccagcacttgtacaccttcacaggacaccgggatgcagtgtcgggtctggcattccgcagaggcacccaccagctctacagcacatcccacgatcgctccgtgaaggtgtggaatgtggcagagaactcctacgtggagacgctcttcggacaccaggacgctgtggctgcactggatgccttgagccgggagtgctgtgtgacggctgggggccgggatgggactgtacgtgtgtggaagatccccgaggagtcccagcttgtcttctatggccaccagggctccatcgactgcatccacctaatcaatgaggagcacatggtgtccggcgcggacgatggctctgtggccttgtggggtctctccaagaagcgaccacttgccctgcagcgtgaagctcacgggctgcggggagagccaggcctggagcagcccttctggatatcgtcggtggcagccctcctcaacacagaccttgtggccacaggctcccacagctcctgtgtgcggctttggcagtgtggggaaggcttccggcagcttgaccttctctgtgacatccccctggtgggttttatcaacagcctcaagttctccagctctggggacttcctggtggctggggtagggcaggagcacaggcttggccgatggtggagaatcaaagaggctcggaattctgtctgcatcatcccactccgcagggtccctgtacccccagctgctggttcctgacactcttatcctccttatttaagtccttcccaggctatgccccaccctctttgtattaaaagcctcctcttttggg

SEQ ID NO: 176998 - DNA, 1219 bp, Homo sapiens
  Payload ID: 14732
  Gene Symbol: RBFA
  Gene Name: ribosome binding factor A (putative)
  Uniprot ID: Q8N0V3
  ENST ID: ENST00000262197
  CDS Start-End: 31-759
cctgctcgctccgggtcccggcgccgcgccatgtgggctgcggcgggcgggctgtggcgctcccgcgcgggtctccgggccctgttccgtagccgcgatgctgcgctatttccaggctgcgagcggggacttcactgctctgctgtctcctgcaagaactggctcaagaaatttgcctcgaaaaccaaaaaaaaggtttggtatgaaagtccttccttgggttctcactcgacttacaaaccatccaagttggaattcctcatgaggagcacctcaaagaaaaccaggaaggaagaccatgcgcgcctgagggccctgaacggcctcctctataaggcactgacagacctgctgtgtacccctgaagtgagtcaggagctgtatgaccttaacgtggagctctccaaggtttccctgactccagacttctcagcctgccgagcgtactggaagacaacgctctctgctgagcagaacgcacacatggaggctgtcctgcagagaagtgccgcgcacatgagcttgatcagttactggcagtcgcagactttggaccccgggatgaaagagacaactttgtacaaaatgatttcagggaccctgatgccccacaaccctgcggcaccacagagccgaccacaagctccagtctgtgtgggatcgatcatgaggcgctcaacaagcagattatggagtacaaaaggaggaaagataaagggctcgggggcctggtgtggcaggggcaggtggctgagctgacaacgcagatgaaaaagggaaggaagagggccaagccccgcctggagcaggacagctccctcaagagttacctgtcaggcgaggaggttgaagatgacctggacctggttggtgccccggagtacgaatgctatgccccggacacagaggagttggaggcagagagaggaggtggcagaacagaggatggccacagctgcggagcaagcagggagtagatggagaggctctgcccatcccacatttgcagggaaaagcattggcacgcaacgcagcatgtggcttcattgaggcagttgatggagttaaaccatctgctcttctgctacttcaacattttctagcttttccgtgtatctaaacacaatttgctacacaagtcactgtttttttttccatgcactgtgtgtaatttaaaaattaaatggccatcttatcacagattctcacaaaaagaaaa

SEQ ID NO: 176999 - DNA, 1407 bp, Homo sapiens
  Payload ID: 14732
  Gene Symbol: RBFA
  Gene Name: ribosome binding factor A (putative)
  Uniprot ID: Q8N0V3
  ENST ID: ENST00000306735
  CDS Start-End: 139-1170
acacgccgcctgccaggcgtgagtcttcctcccgctctgcgccgtcgccccgcccacacgccgccaccctcgcgtcagttgtcgctccgcgcctgcgcccgttgtctccctgctcgctccgggtcccggcgccgcgccatgtgggctgcggcgggcgggctgtggcgctcccgcgcgggtctccgggccctgttccgtagccgcgatgctgcgctatttccaggctgcgagcggggacttcactgctctgctgtctcctgcaagaactggctcaagaaatttgcctcgaaaaccaaaaaaaaggtttggtatgaaagtccttccttgggttctcactcgacttacaaaccatccaagttggaattcctcatgaggagcacctcaaagaaaaccaggaaggaagaccatgcgcgcctgagggccctgaacggcctcctctataaggcactgacagacctgctgtgtacccctgaagtgagtcaggagctgtatgaccttaacgtggagctctccaaggtttccctgactccagacttctcagcctgccgagcgtactggaagacaacgctctctgctgagcagaacgcacacatggaggctgtcctgcagagaagtgccgcgcacatgaggcaccttttgatgtcccagcagaccctgaggaatgtgccaccgatagtgtttgttcaagacaagggaaatgcagctctagctgagcttgatcagttactggcagtcgcagactttggaccccgggatgaaagagacaactttgtacaaaatgatttcagggaccctgatgccccacaaccctgcggcaccacagagccgaccacaagctccagtctgtgtgggatcgatcatgaggcgctcaacaagcagattatggagtacaaaaggaggaaagataaagggctcgggggcctggtgtggcaggggcaggtggctgagctgacaacgcagatgaaaaagggaaggaagagggccaagccccgcctggagcaggacagctccctcaagagttacctgtcaggcgaggaggttgaagatgacctggacctggttggtgccccggagtacgaatgctatgccccggacacagaggagttggaggcagagagaggaggtggcagaacagaggatggccacagctgcggagcaagcagggagtagatggagaggctctgcccatcccacatttgcagggaaaagcattggcacgcaacgcagcatgtggcttcattgaggcagttgatggagttaaaccatctgctcttctgctacttcaacattttctagcttttccgtgtatctaaacacaatttgctacacaagtcactgtttttttttccatgcactgtgtgtaatttaaaaattaaatggccatcttatcacagattctcacaaaaa

SEQ ID NO: 177000 - DNA, 4737 bp, Homo sapiens
  Payload ID: 14733
  Gene Symbol: RRBP1
  Gene Name: ribosome binding protein 1
  ENST ID: ENST00000246043
  CDS Start-End: 1-4233
atggatatttacgacactcaaaccttgggggttgtggtctttggaggattcatggttgtttctgccattggcatcttcctggtgtcgactttctccatgaaggaaacgtcatatgaagaagccctagccaaccagcgcaaggagatggcgaaaactcaccaccagaaagtcgagaagaaaaagaaggagaaaacagtggagaagaaaggaaagaccaagaaaaaggaagagaaacctaatgggaagatacctgatcatgatccagcccccaatgtgactgtcctccttcgagaaccagtgcgggctcctgctgtggctgtggctccaaccccagtgcagccccccattatcgttgctcctgtcgccacagttccagccatgccccaggagaagctggcctcctcccccaaggacaaaaagaagaaggagaaaaaagtggcaaaagtggaaccagctgtcagctctgtagtgaattccatccaggttctcacttcgaaggctgccatcttggaaactgctcccaaggaggtgccgatggtggtggtgcccccagtgggtgccaagggcaacacaccagccactggcactactcagggcaaaaaggcggaggggactcagaatcaaagcaaaaaggctgaaggagccccaaaccagggcagaaaggcagagggaaccccaaaccagggcaaaaagacagagggaaccccaaaccaagggaaaaaggcagagggaaccccaaaccaaggcaaaaaggcagaaggaaccccaaaccaaggcaaaaaggcggagggggcccagaaccagggtaaaaaggtagatacaaccccaaaccaggggaaaaaggtggagggggccccaacccagggcagaaaggccgagggggctcagaaccaggccaaaaaggtagaaggggcccagaaccagggcaaaaaggcagagggggcccagaatcagggcaaaaagggagagggggcccagaaccagggcaagaaggccgagggggcccagaatcagggcaagaaggccgagggggcccagaatcagggcaagaaggccgagggggcccagaatcagggcaagaaggccgagggggcccagaatcagggcaagaaggctgagggggctcagaaccagggcaaaaaggccgagggggctcagaaccagggcaaaaaagtagaaggggcccagaaccagggcaagaaggctgagggtgcccagaaccagggcaaaaaggccgagggggcccagaatcagggcaaaaaggccgagggggcccagaaccagggcaagaaggccgagggggcccagaaccagggcaagaaggccgagggggcccagaaccagggcaagaaggccgagggggcccagaaccagggcaagaaggccgagggtgctcagaaccagggcaaaaaagtagaaggggcccagaaccagggcaagaaggctgagggggcccagaaccagggcaagaaggccgagggggctcagaaccagggcaaaaaggccgagggagcccagaaccagggccaaaaaggagagggagcccagaatcagggtaaaaagacagaaggggctcagggcaaaaaggcagaaaggagtcccaaccaaggcaaaaaaggagagggagctcccatccagggcaaaaaggcagattcggttgctaatcagggcacaaaggtagagggtattacaaaccaggggaaaaaagcagaagggtcccccagtgaaggcaaaaaggcagaagggtcccccaaccaaggcaaaaaggcagacgcagctgccaatcagggtaaaaagacagagtcagcttctgtccagggcagaaatacagatgtggcccagagcccagaggcaccaaagcaagaggctcctgccaagaagaagtctggttcaaagaaaaaaggtgagcctgggcccccagatgccgacggccctctctacctcccctacaagacgctggtctccacggttgggagcatggtgttcaacgagggcgaggcccagcggctcatcgagatcctgtctgagaaggctggcatcattcaggacacctggcacaaggccactcagaagggtgaccctgtggcgattctgaaacgccagctggaagagaaggaaaaactgctggccacagaacaggaagatgcggctgtcgccaagagcaaactgagggagctcaacaaggagatggcagcagaaaaggccaaagcagcagccggggaggccaaagtgaaaaagcagctggtggcccgggagcaggagatcacggctgtgcaggcacgcatgcaggccagctaccgggagcacgtgaaggaggtgcagcagctgcagggcaagatccggactcttcaggagcagctggagaatggccccaacacgcagctggcccgcctgcagcaggagaactccatcctgcgggatgccttgaaccaggccacgagccaggtggagagcaagcagaacgcagagctggccaagcttcggcaggagctcagcaaggtcagcaaagagctggtggagaagtcagaggctgtgcggcaagatgagcagcagcggaaagctctggaagccaaggcagctgccttcgagaagcaggtcctgcagctgcaggcgtcccacagggagagtgaggaggccctgcagaagcgcctggacgaggtcagccgggagctgtgccacacgcagagcagccacgccagcctccgggcggatgccgagaaggcccaggagcaacagcagcagatggccgagctgcacagcaagttacagtcctccgaggcggaggtgcgcagcaaatgcgaggagctgagtggcctccacgggcagctccaggaggccagggcggagaactcccagctcacagagagaatccgttccattgaggccctgctggaggcgggccaggcgcgggatgcccaggacgtccaggccagccaggcggaggctgaccagcagcagactcgcctcaaggagctggagtcccaggtgtcgggtctggagaaggaggccatcgagctcagggaggccgtcgagcagcagaaagtgaagaacaatgacctccgggagaagaactggaaggccatggaggcactggccacggccgagcaggcctgcaaggagaagctgctctccctgacccaggccaaggaggaatcggagaagcagctctgtctgattgaggcgcagaccatggaggccctgctggctctgctcccagaactctctgtcttggcacaacagaattacaccgagtggctgcaggatctcaaagagaaaggccccacgctgctgaagcacccgccagctcccgcggagccctcctcggacctggcctccaagttgagggaggccgaggagacgcagagcacactgcaggccgagtgtgaccagtaccgcagcatcctggcggagacggagggcatgctcagagacctgcagaagagcgtggaggaggaggagcaggtgtggagggccaaggtgggcgccgcagaggaggagctccagaagtcccgggtcacagtgaagcatctcgaagagattgtagagaagctaaaaggagaacttgaaagttcggaccaggtgagggagcacacgtcgcatttggaggcagagctggaaaagcacatggcggccgccagcgccgagtgccagaactacgccaaggaggtggcagggctgaggcaacttctcctagaatctcaatctcagctcgatgccgccaagagcgaagcccagaaacagagcgatgagcttgccctggtcaggcagcagttgagtgaaatgaagagccacgtagaggatggtgacatagctggggccccagcttcctccccagaggcgcccccagccgagcaggaccccgttcagctgaagacgcagctggagtggacagaagccatcctggaggatgagcagacacagcggcagaagctcacggccgagtttgaggaggctcagacctcggcatgtcggttacaagaagaattggagaagctccgcacagccggccccctagagtcttcagaaacagaggaggcctcacagctgaaggagagactagaaaaagagaagaagttaacaagtgacctggggcgcgccgccacgagactgcaggagcttctgaagacgacccaggagcagctggcaagggagaaggacacggtgaagaagctgcaggaacagctggaaaaggcagaggacggcagcagctcaaaggagggcacctctgtctgagtttcctctttggaaaaagaagttactgttcaacttaccaaaatgccttacacattccttacaaataaaccaaccaacctacacagcgttatccaggcccaacttccggtagctccgagagaagccatgagagacaagtctcttagagccacagaagtagaccttccagagccccagtttgtaaatgaacctgtgtcacatttgataaacactatcctgggcgcagccccgggccaccgccgagtgacgccaaagccctggttgactctgacagccccgtgggtgtgtgggaggccgggcgctctggggtctgtctgtcagtgcaatcgtttagtgttttttcagtggggcggggcgggaagcgggtgggaccgggcagccagttctcaaaggctgtggggccgactggaggccacagcccctcacccctagacgttgccaaccagaactgacgtgtgacctcctgggtgttgatgccattaaaaccaacgttggtgcccggtg

SEQ ID NO: 177001 - DNA, 3727 bp, Homo sapiens
  Payload ID: 14733
  Gene Symbol: RRBP1
  Gene Name: ribosome binding protein 1
  Uniprot ID: Q9P2E9
  ENST ID: ENST00000360807
  CDS Start-End: 290-3223
gaaggcaggaggcggcgatcccggcggagggggccgttcgccagctctgaggcagaaagtgccacgactccacacgcgcgcacgcagccagcgagcggccggagcggacggcagacggggcgggcggcgtcagggtcgcagcgtctacagctgctcgggggcggtttcttggcggaggcttggccggctcctctctcccggctccgcggcggctgcgaaggcggcggctcctgccctctcgctttccctctcgcgtctctggctgcaggtgaaaggaaagcaagccaggatggatatttacgacactcaaaccttgggggttgtggtctttggaggattcatggttgtttctgccattggcatcttcctggtgtcgactttctccatgaaggaaacgtcatatgaagaagccctagccaaccagcgcaaggagatggcgaaaactcaccaccagaaagtcgagaagaaaaagaaggagaaaacagtggagaagaaaggaaagaccaagaaaaaggaagagaaacctaatgggaagatacctgatcatgatccagcccccaatgtgactgtcctccttcgagaaccagtgcgggctcctgctgtggctgtggctccaaccccagtgcagccccccattatcgttgctcctgtcgccacagttccagccatgccccaggagaagctggcctcctcccccaaggacaaaaagaagaaggagaaaaaagtggcaaaagtggaaccagctgtcagctctgtagtgaattccatccaggttctcacttcgaaggctgccatcttggaaactgctcccaaggagggcagaaatacagatgtggcccagagcccagaggcaccaaagcaagaggctcctgccaagaagaagtctggttcaaagaaaaaagggcccccagatgccgacggccctctctacctcccctacaagacgctggtctccacggttgggagcatggtgttcaacgagggcgaggcccagcggctcatcgagatcctgtctgagaaggctggcatcattcaggacacctggcacaaggccactcagaagggtgaccctgtggcgattctgaaacgccagctggaagagaaggaaaaactgctggccacagaacaggaagatgcggctgtcgccaagagcaaactgagggagctcaacaaggagatggcagcagaaaaggccaaagcagcagccggggaggccaaagtgaaaaagcagctggtggcccgggagcaggagatcacggctgtgcaggcacgcatgcaggccagctaccgggagcacgtgaaggaggtgcagcagctgcagggcaagatccggactcttcaggagcagctggagaatggccccaacacgcagctggcccgcctgcagcaggagaactccatcctgcgggatgccttgaaccaggccacgagccaggtggagagcaagcagaacgcagagctggccaagcttcggcaggagctcagcaaggtcagcaaagagctggtggagaagtcagaggctgtgcggcaagatgagcagcagcggaaagctctggaagccaaggcagctgccttcgagaagcaggtcctgcagctgcaggcgtcccacagggagagtgaggaggccctgcagaagcgcctggacgaggtcagccgggagctgtgccacacgcagagcagccacgccagcctccgggcggatgccgagaaggcccaggagcaacagcagcagatggccgagctgcacagcaagttacagtcctccgaggcggaggtgcgcagcaaatgcgaggagctgagtggcctccacgggcagctccaggaggccagggcggagaactcccagctcacagagagaatccgttccattgaggccctgctggaggcgggccaggcgcgggatgcccaggacgtccaggccagccaggcggaggctgaccagcagcagactcgcctcaaggagctggagtcccaggtgtcgggtctggagaaggaggccatcgagctcagggaggccgtcgagcagcagaaagtgaagaacaatgacctccgggagaagaactggaaggccatggaggcactggccacggccgagcaggcctgcaaggagaagctgctctccctgacccaggccaaggaggaatcggagaagcagctctgtctgattgaggcgcagaccatggaggccctgctggctctgctcccagaactctctgtcttggcacaacagaattacaccgagtggctgcaggatctcaaagagaaaggccccacgctgctgaagcacccgccagctcccgcggagccctcctcggacctggcctccaagttgagggaggccgaggagacgcagagcacactgcaggccgagtgtgaccagtaccgcagcatcctggcggagacggagggcatgctcagagacctgcagaagagcgtggaggaggaggagcaggtgtggagggccaaggtgggcgccgcagaggaggagctccagaagtcccgggtcacagtgaagcatctcgaagagattgtagagaagctaaaaggagaacttgaaagttcggaccaggtgagggagcacacgtcgcatttggaggcagagctggaaaagcacatggcggccgccagcgccgagtgccagaactacgccaaggaggtggcagggctgaggcaacttctcctagaatctcaatctcagctcgatgccgccaagagcgaagcccagaaacagagcgatgagcttgccctggtcaggcagcagttgagtgaaatgaagagccacgtagaggatggtgacatagctggggccccagcttcctccccagaggcgcccccagccgagcaggaccccgttcagctgaagacgcagctggagtggacagaagccatcctggaggatgagcagacacagcggcagaagctcacggccgagtttgaggaggctcagacctcggcatgtcggttacaagaagaattggagaagctccgcacagccggccccctagagtcttcagaaacagaggaggcctcacagctgaaggagagactagaaaaagagaagaagttaacaagtgacctggggcgcgccgccacgagactgcaggagcttctgaagacgacccaggagcagctggcaagggagaaggacacggtgaagaagctgcaggaacagctggaaaaggcagaggacggcagcagctcaaaggagggcacctctgtctgagtttcctctttggaaaaagaagttactgttcaacttaccaaaatgccttacacattccttacaaataaaccaaccaacctacacagcgttatccaggcccaacttccggtagctccgagagaagccatgagagacaagtctcttagagccacagaagtagaccttccagagccccagtttgtaaatgaacctgtgtcacatttgataaacactatcctgggcgcagccccgggccaccgccgagtgacgccaaagccctggttgactctgacagccccgtgggtgtgtgggaggccgggcgctctggggtctgtctgtcagtgcaatcgtttagtgttttttcagtggggcggggcgggaagcgggtgggaccgggcagccagttctcaaaggctgtggggccgactggaggccacagcccctcacccctagacgttgccaaccagaactgacgtgtgacctcctgggtgttgatgccattaaaaccaacgttggtgcccggtg

SEQ ID NO: 177002 - DNA, 3792 bp, Homo sapiens
  Payload ID: 14733
  Gene Symbol: RRBP1
  Gene Name: ribosome binding protein 1
  Uniprot ID: Q9P2E9
  ENST ID: ENST00000377807
  CDS Start-End: 355-3288
cggcgatcccggcggagggggccgttcgccagctctgaggcagaaagtgccacgactccacacgcgcgcacgcagccagcgagcggccggagcggacggcagacggggcgggcggcgtcagggtcgcagcgtctacagctgctcgggggcggtttcttggcggaggcttggccggctcctctctcccggctccgcggcggctgcgaaggcggcggctcctgccctctcgctttccctctcgcgtctctggctgcagaaagaagcttccggttctgaggtcctggaggtgccatttccctctctgttgaagcaaaggccggggcagacctcctagtgaaaggaaagcaagccaggatggatatttacgacactcaaaccttgggggttgtggtctttggaggattcatggttgtttctgccattggcatcttcctggtgtcgactttctccatgaaggaaacgtcatatgaagaagccctagccaaccagcgcaaggagatggcgaaaactcaccaccagaaagtcgagaagaaaaagaaggagaaaacagtggagaagaaaggaaagaccaagaaaaaggaagagaaacctaatgggaagatacctgatcatgatccagcccccaatgtgactgtcctccttcgagaaccagtgcgggctcctgctgtggctgtggctccaaccccagtgcagccccccattatcgttgctcctgtcgccacagttccagccatgccccaggagaagctggcctcctcccccaaggacaaaaagaagaaggagaaaaaagtggcaaaagtggaaccagctgtcagctctgtagtgaattccatccaggttctcacttcgaaggctgccatcttggaaactgctcccaaggagggcagaaatacagatgtggcccagagcccagaggcaccaaagcaagaggctcctgccaagaagaagtctggttcaaagaaaaaagggcccccagatgccgacggccctctctacctcccctacaagacgctggtctccacggttgggagcatggtgttcaacgagggcgaggcccagcggctcatcgagatcctgtctgagaaggctggcatcattcaggacacctggcacaaggccactcagaagggtgaccctgtggcgattctgaaacgccagctggaagagaaggaaaaactgctggccacagaacaggaagatgcggctgtcgccaagagcaaactgagggagctcaacaaggagatggcagcagaaaaggccaaagcagcagccggggaggccaaagtgaaaaagcagctggtggcccgggagcaggagatcacggctgtgcaggcacgcatgcaggccagctaccgggagcacgtgaaggaggtgcagcagctgcagggcaagatccggactcttcaggagcagctggagaatggccccaacacgcagctggcccgcctgcagcaggagaactccatcctgcgggatgccttgaaccaggccacgagccaggtggagagcaagcagaacgcagagctggccaagcttcggcaggagctcagcaaggtcagcaaagagctggtggagaagtcagaggctgtgcggcaagatgagcagcagcggaaagctctggaagccaaggcagctgccttcgagaagcaggtcctgcagctgcaggcgtcccacagggagagtgaggaggccctgcagaagcgcctggacgaggtcagccgggagctgtgccacacgcagagcagccacgccagcctccgggcggatgccgagaaggcccaggagcaacagcagcagatggccgagctgcacagcaagttacagtcctccgaggcggaggtgcgcagcaaatgcgaggagctgagtggcctccacgggcagctccaggaggccagggcggagaactcccagctcacagagagaatccgttccattgaggccctgctggaggcgggccaggcgcgggatgcccaggacgtccaggccagccaggcggaggctgaccagcagcagactcgcctcaaggagctggagtcccaggtgtcgggtctggagaaggaggccatcgagctcagggaggccgtcgagcagcagaaagtgaagaacaatgacctccgggagaagaactggaaggccatggaggcactggccacggccgagcaggcctgcaaggagaagctgctctccctgacccaggccaaggaggaatcggagaagcagctctgtctgattgaggcgcagaccatggaggccctgctggctctgctcccagaactctctgtcttggcacaacagaattacaccgagtggctgcaggatctcaaagagaaaggccccacgctgctgaagcacccgccagctcccgcggagccctcctcggacctggcctccaagttgagggaggccgaggagacgcagagcacactgcaggccgagtgtgaccagtaccgcagcatcctggcggagacggagggcatgctcagagacctgcagaagagcgtggaggaggaggagcaggtgtggagggccaaggtgggcgccgcagaggaggagctccagaagtcccgggtcacagtgaagcatctcgaagagattgtagagaagctaaaaggagaacttgaaagttcggaccaggtgagggagcacacgtcgcatttggaggcagagctggaaaagcacatggcggccgccagcgccgagtgccagaactacgccaaggaggtggcagggctgaggcaacttctcctagaatctcaatctcagctcgatgccgccaagagcgaagcccagaaacagagcgatgagcttgccctggtcaggcagcagttgagtgaaatgaagagccacgtagaggatggtgacatagctggggccccagcttcctccccagaggcgcccccagccgagcaggaccccgttcagctgaagacgcagctggagtggacagaagccatcctggaggatgagcagacacagcggcagaagctcacggccgagtttgaggaggctcagacctcggcatgtcggttacaagaagaattggagaagctccgcacagccggccccctagagtcttcagaaacagaggaggcctcacagctgaaggagagactagaaaaagagaagaagttaacaagtgacctggggcgcgccgccacgagactgcaggagcttctgaagacgacccaggagcagctggcaagggagaaggacacggtgaagaagctgcaggaacagctggaaaaggcagaggacggcagcagctcaaaggagggcacctctgtctgagtttcctctttggaaaaagaagttactgttcaacttaccaaaatgccttacacattccttacaaataaaccaaccaacctacacagcgttatccaggcccaacttccggtagctccgagagaagccatgagagacaagtctcttagagccacagaagtagaccttccagagccccagtttgtaaatgaacctgtgtcacatttgataaacactatcctgggcgcagccccgggccaccgccgagtgacgccaaagccctggttgactctgacagccccgtgggtgtgtgggaggccgggcgctctggggtctgtctgtcagtgcaatcgtttagtgttttttcagtggggcggggcgggaagcgggtgggaccgggcagccagttctcaaaggctgtggggccgactggaggccacagcccctcacccctagacgttgccaaccagaactgacgtgtgacctcctgggtgttgatgccattaaaaccaacgttggtgcccggtg

SEQ ID NO: 177003 - DNA, 5041 bp, Homo sapiens
  Payload ID: 14733
  Gene Symbol: RRBP1
  Gene Name: ribosome binding protein 1
  ENST ID: ENST00000377813
  CDS Start-End: 305-4537
cacgactccacacgcgcgcacgcagccagcgagcggccggagcggacggcagacggggcgggcggcgtcagggtcgcagcgtctacagctgctcgggggcggtttcttggcggaggcttggccggctcctctctcccggctccgcggcggctgcgaaggcggcggctcctgccctctcgctttccctctcgcgtctctggctgcagaaagaagcttccggttctgaggtcctggaggtgccatttccctctctgttgaagcaaaggccggggcagacctcctagtgaaaggaaagcaagccaggatggatatttacgacactcaaaccttgggggttgtggtctttggaggattcatggttgtttctgccattggcatcttcctggtgtcgactttctccatgaaggaaacgtcatatgaagaagccctagccaaccagcgcaaggagatggcgaaaactcaccaccagaaagtcgagaagaaaaagaaggagaaaacagtggagaagaaaggaaagaccaagaaaaaggaagagaaacctaatgggaagatacctgatcatgatccagcccccaatgtgactgtcctccttcgagaaccagtgcgggctcctgctgtggctgtggctccaaccccagtgcagccccccattatcgttgctcctgtcgccacagttccagccatgccccaggagaagctggcctcctcccccaaggacaaaaagaagaaggagaaaaaagtggcaaaagtggaaccagctgtcagctctgtagtgaattccatccaggttctcacttcgaaggctgccatcttggaaactgctcccaaggaggtgccgatggtggtggtgcccccagtgggtgccaagggcaacacaccagccactggcactactcagggcaaaaaggcggaggggactcagaatcaaagcaaaaaggctgaaggagccccaaaccagggcagaaaggcagagggaaccccaaaccagggcaaaaagacagagggaaccccaaaccaagggaaaaaggcagagggaaccccaaaccaaggcaaaaaggcagaaggaaccccaaaccaaggcaaaaaggcggagggggcccagaaccagggtaaaaaggtagatacaaccccaaaccaggggaaaaaggtggagggggccccaacccagggcagaaaggccgagggggctcagaaccaggccaaaaaggtagaaggggcccagaaccagggcaaaaaggcagagggggcccagaatcagggcaaaaagggagagggggcccagaaccagggcaagaaggccgagggggcccagaatcagggcaagaaggccgagggggcccagaatcagggcaagaaggccgagggggcccagaatcagggcaagaaggccgagggggcccagaatcagggcaagaaggctgagggggctcagaaccagggcaaaaaggccgagggggctcagaaccagggcaaaaaagtagaaggggcccagaaccagggcaagaaggctgagggtgcccagaaccagggcaaaaaggccgagggggcccagaatcagggcaaaaaggccgagggggcccagaaccagggcaagaaggccgagggggcccagaaccagggcaagaaggccgagggggcccagaaccagggcaagaaggccgagggggcccagaaccagggcaagaaggccgagggtgctcagaaccagggcaaaaaagtagaaggggcccagaaccagggcaagaaggctgagggggcccagaaccagggcaagaaggccgagggggctcagaaccagggcaaaaaggccgagggagcccagaaccagggccaaaaaggagagggagcccagaatcagggtaaaaagacagaaggggctcagggcaaaaaggcagaaaggagtcccaaccaaggcaaaaaaggagagggagctcccatccagggcaaaaaggcagattcggttgctaatcagggcacaaaggtagagggtattacaaaccaggggaaaaaagcagaagggtcccccagtgaaggcaaaaaggcagaagggtcccccaaccaaggcaaaaaggcagacgcagctgccaatcagggtaaaaagacagagtcagcttctgtccagggcagaaatacagatgtggcccagagcccagaggcaccaaagcaagaggctcctgccaagaagaagtctggttcaaagaaaaaaggtgagcctgggcccccagatgccgacggccctctctacctcccctacaagacgctggtctccacggttgggagcatggtgttcaacgagggcgaggcccagcggctcatcgagatcctgtctgagaaggctggcatcattcaggacacctggcacaaggccactcagaagggtgaccctgtggcgattctgaaacgccagctggaagagaaggaaaaactgctggccacagaacaggaagatgcggctgtcgccaagagcaaactgagggagctcaacaaggagatggcagcagaaaaggccaaagcagcagccggggaggccaaagtgaaaaagcagctggtggcccgggagcaggagatcacggctgtgcaggcacgcatgcaggccagctaccgggagcacgtgaaggaggtgcagcagctgcagggcaagatccggactcttcaggagcagctggagaatggccccaacacgcagctggcccgcctgcagcaggagaactccatcctgcgggatgccttgaaccaggccacgagccaggtggagagcaagcagaacgcagagctggccaagcttcggcaggagctcagcaaggtcagcaaagagctggtggagaagtcagaggctgtgcggcaagatgagcagcagcggaaagctctggaagccaaggcagctgccttcgagaagcaggtcctgcagctgcaggcgtcccacagggagagtgaggaggccctgcagaagcgcctggacgaggtcagccgggagctgtgccacacgcagagcagccacgccagcctccgggcggatgccgagaaggcccaggagcaacagcagcagatggccgagctgcacagcaagttacagtcctccgaggcggaggtgcgcagcaaatgcgaggagctgagtggcctccacgggcagctccaggaggccagggcggagaactcccagctcacagagagaatccgttccattgaggccctgctggaggcgggccaggcgcgggatgcccaggacgtccaggccagccaggcggaggctgaccagcagcagactcgcctcaaggagctggagtcccaggtgtcgggtctggagaaggaggccatcgagctcagggaggccgtcgagcagcagaaagtgaagaacaatgacctccgggagaagaactggaaggccatggaggcactggccacggccgagcaggcctgcaaggagaagctgctctccctgacccaggccaaggaggaatcggagaagcagctctgtctgattgaggcgcagaccatggaggccctgctggctctgctcccagaactctctgtcttggcacaacagaattacaccgagtggctgcaggatctcaaagagaaaggccccacgctgctgaagcacccgccagctcccgcggagccctcctcggacctggcctccaagttgagggaggccgaggagacgcagagcacactgcaggccgagtgtgaccagtaccgcagcatcctggcggagacggagggcatgctcagagacctgcagaagagcgtggaggaggaggagcaggtgtggagggccaaggtgggcgccgcagaggaggagctccagaagtcccgggtcacagtgaagcatctcgaagagattgtagagaagctaaaaggagaacttgaaagttcggaccaggtgagggagcacacgtcgcatttggaggcagagctggaaaagcacatggcggccgccagcgccgagtgccagaactacgccaaggaggtggcagggctgaggcaacttctcctagaatctcaatctcagctcgatgccgccaagagcgaagcccagaaacagagcgatgagcttgccctggtcaggcagcagttgagtgaaatgaagagccacgtagaggatggtgacatagctggggccccagcttcctccccagaggcgcccccagccgagcaggaccccgttcagctgaagacgcagctggagtggacagaagccatcctggaggatgagcagacacagcggcagaagctcacggccgagtttgaggaggctcagacctcggcatgtcggttacaagaagaattggagaagctccgcacagccggccccctagagtcttcagaaacagaggaggcctcacagctgaaggagagactagaaaaagagaagaagttaacaagtgacctggggcgcgccgccacgagactgcaggagcttctgaagacgacccaggagcagctggcaagggagaaggacacggtgaagaagctgcaggaacagctggaaaaggcagaggacggcagcagctcaaaggagggcacctctgtctgagtttcctctttggaaaaagaagttactgttcaacttaccaaaatgccttacacattccttacaaataaaccaaccaacctacacagcgttatccaggcccaacttccggtagctccgagagaagccatgagagacaagtctcttagagccacagaagtagaccttccagagccccagtttgtaaatgaacctgtgtcacatttgataaacactatcctgggcgcagccccgggccaccgccgagtgacgccaaagccctggttgactctgacagccccgtgggtgtgtgggaggccgggcgctctggggtctgtctgtcagtgcaatcgtttagtgttttttcagtggggcggggcgggaagcgggtgggaccgggcagccagttctcaaaggctgtggggccgactggaggccacagcccctcacccctagacgttgccaaccagaactgacgtgtgacctcctgggtgttgatgccattaaaaccaacgttggtgcccggtg

SEQ ID NO: 177004 - DNA, 1191 bp, Homo sapiens
  Payload ID: 14733
  Gene Symbol: RRBP1
  Gene Name: ribosome binding protein 1
  ENST ID: ENST00000398782
  CDS Start-End: 290-1191
gaaggcaggaggcggcgatcccggcggagggggccgttcgccagctctgaggcagaaagtgccacgactccacacgcgcgcacgcagccagcgagcggccggagcggacggcagacggggcgggcggcgtcagggtcgcagcgtctacagctgctcgggggcggtttcttggcggaggcttggccggctcctctctcccggctccgcggcggctgcgaaggcggcggctcctgccctctcgctttccctctcgcgtctctggctgcaggtgaaaggaaagcaagccaggatggatatttacgacactcaaaccttgggggttgtggtctttggaggattcatggttgtttctgccattggcatcttcctggtgtcgactttctccatgaaggaaacgtcatatgaagaagccctagccaaccagcgcaaggagatggcgaaaactcaccaccagaaagtcgagaagaaaaagaaggagaaaacagtggagaagaaaggaaagaccaagaaaaaggaagagaaacctaatgggaagatacctgatcatgatccagcccccaatgtgactgtcctccttcgagaaccagtgcgggctcctgctgtggctgtggctccaaccccagtgcagccccccattatcgttgctcctgtcgccacagttccagccatgccccaggagaagctggcctcctcccccaaggacaaaaagaagaaggagaaaaaagtggcaaaagtggaaccagctgtcagctctgtagtgaattccatccaggttctcacttcgaaggctgccatcttggaaactgctcccaaggaggtgccgatggtggtggtgcccccagtgggtgccaagggcaacacaccagccactggcactactcagggcaaaaaggcggaggggactcagaatcaaagcaaaaaggctgaaggagccccaaaccagggcagaaaggcagagggaaccccaaaccagggcaaaaagacagagggaaccccaaaccaagggaaaaaggcagagggaaccccaaaccaaggcaaaaaggcagaaggaaccccaaaccaaggcaaaaaggcggagggggcccagaaccagggtaaaaaggtagatacaaccccaaaccaggggaaaaaggtggagggggccccaacccagggcagaaaggccgagggggctcagaaccaggccaaaaa

SEQ ID NO: 177005 - DNA, 2485 bp, Homo sapiens
  Payload ID: 14733
  Gene Symbol: RRBP1
  Gene Name: ribosome binding protein 1
  ENST ID: ENST00000455029
  CDS Start-End: 176-2431
ctctcgctttccctctcgcgtctctggctgcagaaagaagcttccggttctgaggtcctggaggtgccatttccctctctgttgaagcaaaggccggggcagacctcctaggcccccagatgccgacggccctctctacctcccctacaagacgctggtctccacggttgggagcatggtgttcaacgagggcgaggcccagcggctcatcgagatcctgtctgagaaggctggcatcattcaggacacctggcacaaggccactcagaagggtgaccctgtggcgattctgaaacgccagctggaagagaaggaaaaactgctggccacagaacaggaagatgcggctgtcgccaagagcaaactgagggagctcaacaaggagatggcagcagaaaaggccaaagcagcagccggggaggccaaagtgaaaaagcagctggtggcccgggagcaggagatcacggctgtgcaggcacgcatgcaggccagctaccgggagcacgtgaaggaggtgcagcagctgcagggcaagatccggactcttcaggagcagctggagaatggccccaacacgcagctggcccgcctgcagcaggagaactccatcctgcgggatgccttgaaccaggccacgagccaggtggagagcaagcagaacgcagagctggccaagcttcggcaggagctcagcaaggtcagcaaagagctggtggagaagtcagaggctgtgcggcaagatgagcagcagcggaaagctctggaagccaaggcagctgccttcgagaagcaggtcctgcagctgcaggcgtcccacagggagagtgaggaggccctgcagaagcgcctggacgaggtcagccgggagctgtgccacacgcagagcagccacgccagcctccgggcggatgccgagaaggcccaggagcaacagcagcagatggccgagctgcacagcaagttacagtcctccgaggcggaggtgcgcagcaaatgcgaggagctgagtggcctccacgggcagctccaggaggccagggcggagaactcccagctcacagagagaatccgttccattgaggccctgctggaggcgggccaggcgcgggatgcccaggacgtccaggccagccaggcggaggctgaccagcagcagactcgcctcaaggagctggagtcccaggtgtcgggtctggagaaggaggccatcgagctcagggaggccgtcgagcagcagaaagtgaagaacaatgacctccgggagaagaactggaaggccatggaggcactggccacggccgagcaggcctgcaaggagaagctgctctccctgacccaggccaaggaggaatcggagaagcagctctgtctgattgaggcgcagaccatggaggccctgctggctctgctcccagaactctctgtcttggcacaacagaattacaccgagtggctgcaggatctcaaagagaaaggccccacgctgctgaagcacccgccagctcccgcggagccctcctcggacctggcctccaagttgagggaggccgaggagacgcagagcacactgcaggccgagtgtgaccagtaccgcagcatcctggcggagacggagggcatgctcagagacctgcagaagagcgtggaggaggaggagcaggtgtggagggccaaggtgggcgccgcagaggaggagctccagaagtcccgggtcacagtgaagcatctcgaagagattgtagagaagctaaaaggagaacttgaaagttcggaccaggtgagggagcacacgtcgcatttggaggcagagctggaaaagcacatggcggccgccagcgccgagtgccagaactacgccaaggaggtggcagggctgaggcaacttctcctagaatctcaatctcagctcgatgccgccaagagcgaagcccagaaacagagcgatgagcttgccctggtcaggcagcagttgagtgaaatgaagagccacgtagaggatggtgacatagctggggccccagcttcctccccagaggcgcccccagccgagcaggaccccgttcagctgaagacgcagctggagtggacagaagccatcctggaggatgagcagacacagcggcagaagctcacggccgagtttgaggaggctcagacctcggcatgtcggttacaagaagaattggagaagctccgcacagccggccccctagagtcttcagaaacagaggaggcctcacagctgaaggagagactagaaaaagagaagaagttaacaagtgacctggggcgcgccgccacgagactgcaggagcttctgaagacgacccaggagcagctggcaagggagaaggacacggtgaagaagctgcaggaacagctggaaaaggcagaggacggcagcagctcaaaggagggcacctctgtctgagtttcctctttggaaaaagaagttactgttcaacttaccaaaatgccttacaca

SEQ ID NO: 177006 - DNA, 832 bp, Homo sapiens
  Payload ID: 14733
  Gene Symbol: RRBP1
  Gene Name: ribosome binding protein 1
  ENST ID: ENST00000495501
  CDS Start-End: 1-690
cagggcaaaaaggcagaaaggagtcccaaccaaggcaaaaaaggagagggagctcccatccagggcaaaaaggcagattcggttgctaatcagggcacaaaggtagagggtattacaaaccaggggaaaaaagcagaagggtcccccagtgaaggcaaaaaggcagaagggtcccccaaccaaggcaaaaaggcagacgcagctgccaatcagggtaaaaagacagagtcagcttctgtccagggcagaaatacagatgtggcccagagcccagaggcaccaaagcaagaggctcctgccaagaagaagtctggttcaaagaaaaaaggtgagcctggcagaacgcagagctggccaagcttcggcaggagctcagcaaggtcagcaaagagctggtggagaagtcagaggctgtgcggcaagatgagcagcagcggaaagctctggaagccaaggcagctgccttcgagaagcaggtcctgcagctgcaggcgtcccacagggagagtgaggaggccctgcagaagcgcctggacgaggtcagccgggagctgtgccacacgcagagcagccacgccagcctccgggcggatgccgagaaggcccaggagcaacagcagcagatggccgagctgcacagcaagttacagtcctccgaggcggaggtgcgcagcaaatgcgaggagctgagtggcctccacgggcagctccaggaggccagggcggagaactcccagctcacagagagaatccgttccattgaggccctgctggaggcgggccaggcgcgggatgcccaggacgtccaggccagccaggcggaggctgacca

SEQ ID NO: 177007 - DNA, 2070 bp, Homo sapiens
  Payload ID: 14733
  Gene Symbol: RRBP1
  Gene Name: ribosome binding protein 1
  ENST ID: ENST00000470422
  CDS Start-End: 526-1566
agctttgcggtgattcccaggaagcctgagggttgtatcagatgaggacaactagctagggcaggaggtgaaggatggcctcaggccaccctgtgagagctatagttagactcctagaatcttggccttgtagcccccagtgacctcagagactgtctggctaccatgtggtaaatgaagctgtgaccagagatgtcacctgacttgattgtggtcacacatccagatagaaggtggcctctgggtctccagcttgccttgactcacaactagaggcctcagtggtggtcgtgaggtcaagggtccacatgggtcacgggccctacctgtggataacttggccagccaggaagggcccgcttctcaggtgtgcgtcaggccagagggcgctgcgctcaggctgggtgtccggtggtcagcatccttcatgcacattccaggactctgcttgggggagttaacactccatcagctctgatccaggaggaatcggagaagcagctctgtctgattgaggcgcagaccatggaggccctgctggctctgctcccagaactctctgtcttggcacaacagaattacaccgagtggctgcaggatctcaaagagaaaggccccacgctgctgaagcacccgccagctcccgcggagccctcctcggacctggcctccaagttgagggaggccgaggagacgcagagcacactgcaggccgagtgtgaccagtaccgcagcatcctggcggagacggagggcatgctcagagacctgcagaagagcgtggaggaggaggagcaggtgtggagggccaaggtgggcgccgcagaggaggagctccagaagtcccgggtcacagtgaagcatctcgaagagattgtagagaagctaaaaggagaacttgaaagttcggaccaggtgagggagcacacgtcgcatttggaggcagagctggaaaagcacatggcggccgccagcgccgagtgccagaactacgccaaggaggtggcagggctgaggcaacttctcctagaatctcaatctcagctcgatgccgccaagagcgaagcccagaaacagagcgatgagcttgccctggtcaggcagcagttgagtgaaatgaagagccacgtagaggatggtgacatagctggggccccagcttcctccccagaggcgcccccagccgagcaggaccccgttcagctgaagacgcagctggagtggacagaagccatcctggaggatgagcagacacagcggcagaagctcacggccgagtttgaggaggctcagacctcggcatgtcggttacaagaagaattggagaagctccgcacagccggccccctagagtcttcagaaacagaggaggcctcacagctgaaggagagactagaaaaagagaagaagttaacaagtgacctggggcgcgccgccacgagactgcaggagcttctgaagacgacccaggagcagctggcaagggagaaggacacggtgaagaagctgcaggaacagctggaaaaggaggacggcagcagctcaaaggagggcacctctgtctgagtttcctctttggaaaaagaagttactgttcaacttaccaaaatgccttacacattccttacaaataaaccaaccaacctacacagcgttatccaggcccaacttccggtagctccgagagaagccatgagagacaagtctcttagagccacagaagtagaccttccagagccccagtttgtaaatgaacctgtgtcacatttgataaacactatcctgggcgcagccccgggccaccgccgagtgacgccaaagccctggttgactctgacagccccgtgggtgtgtgggaggccgggcgctctggggtctgtctgtcagtgcaatcgtttagtgttttttcagtggggcggggcgggaagcgggtgggaccgggcagccagttctcaaaggctgtggggccgactggaggccacagcccctcacccctagacgttgccaaccagaactgacgtgtgacctcctgggtgttgatgccattaaaaccaacgttggtgcccggtg

SEQ ID NO: 177008 - DNA, 3309 bp, Homo sapiens
  Payload ID: 14733
  Gene Symbol: RRBP1
  Gene Name: ribosome binding protein 1
  ENST ID: ENST00000610403
  CDS Start-End: 1-2805
atggtggtggtgcccccagtgggtgccaagggcaacacaccagccactggcactactcagggcaaaaaggcggaggggactcagaatcaaagcaaaaaggctgaaggagccccaaaccagggcagaaaggcagagggaaccccaaaccagggcaaaaagacagagggaaccccaaaccaagggaaaaaggcagagggagctcccatccagggcaaaaaggcagattcggttgctaatcagggcacaaaggtagagggtattacaaaccaggggaaaaaagcagaagggtcccccagtgaaggcaaaaaggcagaagggtcccccaaccaaggcaaaaaggcagacgcagctgccaatcagggtaaaaagacagagtcagcttctgtccagggcagaaatacagatgtggcccagagcccagaggcaccaaagcaagaggctcctgccaagaagaagtctggttcaaagaaaaaaggtgagcctgggcccccagatgccgacggccctctctacctcccctacaagacgctggtctccacggttgggagcatggtgttcaacgagggcgaggcccagcggctcatcgagatcctgtctgagaaggctggcatcattcaggacacctggcacaaggccactcagaagggtgaccctgtggcgattctgaaacgccagctggaagagaaggaaaaactgctggccacagaacaggaagatgcggctgtcgccaagagcaaactgagggagctcaacaaggagatggcagcagaaaaggccaaagcagcagccggggaggccaaagtgaaaaagcagctggtggcccgggagcaggagatcacggctgtgcaggcacgcatgcaggccagctaccgggagcacgtgaaggaggtgcagcagctgcagggcaagatccggactcttcaggagcagctggagaatggccccaacacgcagctggcccgcctgcagcaggagaactccatcctgcgggatgccttgaaccaggccacgagccaggtggagagcaagcagaacgcagagctggccaagcttcggcaggagctcagcaaggtcagcaaagagctggtggagaagtcagaggctgtgcggcaagatgagcagcagcggaaagctctggaagccaaggcagctgccttcgagaagcaggtcctgcagctgcaggcgtcccacagggagagtgaggaggccctgcagaagcgcctggacgaggtcagccgggagctgtgccacacgcagagcagccacgccagcctccgggcggatgccgagaaggcccaggagcaacagcagcagatggccgagctgcacagcaagttacagtcctccgaggcggaggtgcgcagcaaatgcgaggagctgagtggcctccacgggcagctccaggaggccagggcggagaactcccagctcacagagagaatccgttccattgaggccctgctggaggcgggccaggcgcgggatgcccaggacgtccaggccagccaggcggaggctgaccagcagcagactcgcctcaaggagctggagtcccaggtgtcgggtctggagaaggaggccatcgagctcagggaggccgtcgagcagcagaaagtgaagaacaatgacctccgggagaagaactggaaggccatggaggcactggccacggccgagcaggcctgcaaggagaagctgctctccctgacccaggccaaggaggaatcggagaagcagctctgtctgattgaggcgcagaccatggaggccctgctggctctgctcccagaactctctgtcttggcacaacagaattacaccgagtggctgcaggatctcaaagagaaaggccccacgctgctgaagcacccgccagctcccgcggagccctcctcggacctggcctccaagttgagggaggccgaggagacgcagagcacactgcaggccgagtgtgaccagtaccgcagcatcctggcggagacggagggcatgctcagagacctgcagaagagcgtggaggaggaggagcaggtgtggagggccaaggtgggcgccgcagaggaggagctccagaagtcccgggtcacagtgaagcatctcgaagagattgtagagaagctaaaaggagaacttgaaagttcggaccaggtgagggagcacacgtcgcatttggaggcagagctggaaaagcacatggcggccgccagcgccgagtgccagaactacgccaaggaggtggcagggctgaggcaacttctcctagaatctcaatctcagctcgatgccgccaagagcgaagcccagaaacagagcgatgagcttgccctggtcaggcagcagttgagtgaaatgaagagccacgtagaggatggtgacatagctggggccccagcttcctccccagaggcgcccccagccgagcaggaccccgttcagctgaagacgcagctggagtggacagaagccatcctggaggatgagcagacacagcggcagaagctcacggccgagtttgaggaggctcagacctcggcatgtcggttacaagaagaattggagaagctccgcacagccggccccctagagtcttcagaaacagaggaggcctcacagctgaaggagagactagaaaaagagaagaagttaacaagtgacctggggcgcgccgccacgagactgcaggagcttctgaagacgacccaggagcagctggcaagggagaaggacacggtgaagaagctgcaggaacagctggaaaaggcagaggacggcagcagctcaaaggagggcacctctgtctgagtttcctctttggaaaaagaagttactgttcaacttaccaaaatgccttacacattccttacaaataaaccaaccaacctacacagcgttatccaggcccaacttccggtagctccgagagaagccatgagagacaagtctcttagagccacagaagtagaccttccagagccccagtttgtaaatgaacctgtgtcacatttgataaacactatcctgggcgcagccccgggccaccgccgagtgacgccaaagccctggttgactctgacagccccgtgggtgtgtgggaggccgggcgctctggggtctgtctgtcagtgcaatcgtttagtgttttttcagtggggcggggcgggaagcgggtgggaccgggcagccagttctcaaaggctgtggggccgactggaggccacagcccctcacccctagacgttgccaaccagaactgacgtgtgacctcctgggtgttgatgccattaaaaccaacgttggtgcccggtg

SEQ ID NO: 177009 - DNA, 1706 bp, Homo sapiens
  Payload ID: 14734
  Gene Symbol: RRS1
  Gene Name: ribosome biogenesis regulator homolog
  Uniprot ID: Q15050
  ENST ID: ENST00000320270
  CDS Start-End: 105-1202
gcatcccggcatctgcacgtggttatgctgccggagtttgggccgccactgtaggaaaagtaacttcagctgcagccccaaagcgagtgagccgagccggagccatggagggccagagcgtggaggagctgctcgcaaaggcagagcaggacgaggcagagaagttgcaacgcatcacggtgcacaaggagctggagctgcagtttgacctgggcaacctgctggcgtcggaccggaaccccccgaccgggctgcggtgcgccggacccacgccggaggccgagctacaggccctggcgcgggacaacacgcaactgctcatcaaccagctgtggcagctgcccacggagcgcgtggaagaggcgatagtggcgcggctgccggagcccaccacacgcctgccgcgagagaagcctctgccccgaccgcggccacttacacgctggcagcagttcgcgcgcctcaagggcatccgtcccaagaagaagaccaacctggtgtgggacgaggtgagtggccagtggcggcggcgctggggctaccagcgcgcccgggacgacaccaaagaatggctgattgaggtgcccggcaatgccgaccccttggaggaccagttcgccaagcggattcaggccaagaaggaaagggtggccaagaacgagctgaaccggctgcgtaacctggcccgcgcgcacaagatgcagctgcccagcgcggccggcttgcaccctaccggacaccagagtaaggaggagctgggccgcgccatgcaagtggccaaggtctccaccgcctctgtggggcgctttcaggagcgcctccccaaggagaaggtgccccggggctccggcaagaaaaggaagtttcaaccccttttcggggactttgcagccgagaaaaagaaccagttggagctgcttcgtgtcatgaacagcaagaagcctcagctggatgtgactagggccaccaataagcagatgagggaggaggaccaggaggaggccgccaagaggaggaaaatgagccagaagggcaagagaaagggaggccggcaggggcctgggggcaagaggaaagggggcccgcccagccagggagggaagaggaaagggggcttgggaggcaagatgaattctgggccgcctggcttgggtggcaagagaaaaggaggacagcgcccaggaggaaagaggaggaagtaatagtttctaactgtcggacccgtctgtaaaccaaggactatgaatactaaatgttaagttctaggcaattatacggggactcagaaggacctggccgctgccttcattgagtttaaagggacaggattgcccttccgtcaagaaagtatgtaagtgttggactgcacaaattaatgtttttcccacaaccgagactttggagattaagaacttatttgaggatttaagaattagggaaataatttggtggaaaccgggaatgagttctattcttaaacagcctttttttttctttttaatgttggatatacggcgaggtagagttggccatatttcagagacttagattgacgtatatgtttctgcattatttttacaacaagtttgtgtatcagagcgggagtgcgggggagggaaagaaaacaaacagtttcagaattgaataggcaagtgactgttttaaagattaagtaataaagatgtcttatctagtgtgacttttaa

SEQ ID NO: 177010 - DNA, 1385 bp, Homo sapiens
  Payload ID: 14735
  Gene Symbol: RPF1
  Gene Name: ribosome production factor 1 homolog
  Uniprot ID: Q9H9Y2
  ENST ID: ENST00000370654
  CDS Start-End: 16-1065
aaaggagccaagaccatggcgaaagccggggataagagcagcagcagcgggaagaaaagtctaaaacggaaagccgctgccgaagaacttcaggaggctgcaggcgctggggatggggcgacggaaaacggggtccaacccccgaaagcggctgcctttccgccaggctttagcatttcggagattaaaaacaaacagcggcgacacttaatgttcacgcggtggaaacagcagcagcggaaggaaaagttggcagctaagaaaaaacttaaaaaagaaagagaggctcttggcgataaggctccaccaaagcctgtacccaagaccattgacaaccagcgagtgtatgatgaaaccacagtagaccctaatgatgaagaggtcgcttatgatgaagctacagatgaatttgcttcttacttcaacaaacagacttctcccaagattctcatcacaacatcagatagacctcatgggagaacagtacgactctgtgaacagctctccacagttataccaaactcacatgtttattacagaagaggactggctctgaaaaaaattattccacagtgcatcgcaagagatttcacagacctgattgttattaatgaagatcgtaaaaccccaaatggacttattttgagtcacttgccaaatggcccaactgctcattttaaaatgagcagtgttcgtcttcgtaaagaaattaagagaagaggcaaggaccccacagaacacatacctgaaataattctgaataattttacaacacggctgggtcattcaattggacgtatgtttgcatctctctttcctcataatcctcaatttatcggaaggcaggttgccacattccacaatcaacgggattacatattcttcagatttcacagatacatattcaggagtgaaaagaaagtgggaattcaggaacttggaccacgttttaccttaaaattaaggtctcttcagaaaggaacctttgattctaaatatggagagtatgaatgggtccataagccccgggaaatggatacaagtagaagaaaattccatttataaagtactgagagaatgatattggattttgctgaacaggcctatcttgaactttggtaaattatttttgacagaatactcttttcaaaatggcatttgctgatttcataaacctttcacgtctggacgaattaccaaatgccatgaattgccactgtgtgtttatgtagaaaatacaaataaaagttattttgatggcttaggtttccttaaacttagttctcttgtttttgggtaactgtgaataattaagttggaatcaagattcagattaactttcctatttgcatagaacacatgagaggaataaaatggttggtaaa

SEQ ID NO: 177011 - DNA, 724 bp, Homo sapiens
  Payload ID: 14735
  Gene Symbol: RPF1
  Gene Name: ribosome production factor 1 homolog
  ENST ID: ENST00000370656
  CDS Start-End: 24-413
acggaagcaaaggagccaagaccatggcgaaagccggggataagagcagcagcagcgggaagaaaagtctaaaacggaaagccgctgccgaagaacttcaggaggctgcaggcgctggggatggggcgacggaaaacggggtccaacccccgaaagcggctgcctttccgccaggctttagcatttcggagattaaaaacaaacagcggcgacacttaatgttcacgcggtggaaacagcagcagcggaaggaaaagttggcagctaagaaaaaacttaaaaaagaaagagaggctcttggcgataaggctccaccaaagcctgtacccaagaccattgacaaccagcgagtgtatgatgaaaccacagtagaccctaatgatgaagaggtaatgttagaagtcttaaattagtttgaatgatcacatataattgataaattatatgtttttttgttgatatttaaagtgctggctggccaagttgcataatggactgattcagctaaaatgttggcatattatcttattatttggtgaagactatttcataattgaatttcccaataatgctatagaaaaattctataaaaattctaggtaaacttttacatttgtcatataatccctgaatggtattttggagggttttgtttttgtttttgtttttgattttgttgagacagagtcttgctctgtcgcccatgctggagtgcagtggtgtg

SEQ ID NO: 177012 - DNA, 873 bp, Homo sapiens
  Payload ID: 14736
  Gene Symbol: RPF2
  Gene Name: ribosome production factor 2 homolog
  ENST ID: ENST00000368864
  CDS Start-End: 93-323
acgcgcagcttccggttccgcctgttccggcgcacgtaatcgccgagggcacgtgcatgccccctggttaagagttgcaggtagcggtagcgatggacactctggatcgagtagtaaagcccaaaacgaaaagagccaagagattccttgagaagagagaaccgaaactcaatgaaaatattaaaaatgccatgctgattaaagggggaaatgcaaatgcaacagtgacaaaagtacttaaagatgtgaatgtgttttgttttgaaagctataaattttgttttacagtatgcactgaaaaaaccatacggtgtactatataaaaagaaaaatattacaagaccttttgaggatcagacatcactggaattcttttcaaagaagtcagattgttctttattcatgtttggctcccataataagaagcggccaaataatctagtaataggtcgtatgtatgactaccatgtgctggatatgattgaattaggtattgagaattttgtctctctaaaagacattaagaacagtaaatgtcctgagggaacaaaacccatgctgatatttgctggcgatgatttcgatgtaacagaagattatagaagactaaaaagtcttcttattgatttcttcagaggccccacagtatcaaatatccgcctggctggattagagtatgttctgcacttcactgcactgaatgggaagatttactttcgaagctataagttgctgttgaagaaatctggttgcagaacaccacggattgaattggaagagatgggaccctcattggatctggttctgaggaggacacacctggcatcggatgacctttataaattatctatgaaaatgccaaaagctctcaag

SEQ ID NO: 177013 - DNA, 1531 bp, Homo sapiens
  Payload ID: 14736
  Gene Symbol: RPF2
  Gene Name: ribosome production factor 2 homolog
  Uniprot ID: Q9H7B2
  ENST ID: ENST00000441448
  CDS Start-End: 93-1013
acgcgcagcttccggttccgcctgttccggcgcacgtaatcgccgagggcacgtgcatgccccctggttaagagttgcaggtagcggtagcgatggacactctggatcgagtagtaaagcccaaaacgaaaagagccaagagattccttgagaagagagaaccgaaactcaatgaaaatattaaaaatgccatgctgattaaagggggaaatgcaaatgcaacagtgacaaaagtacttaaagatgtgtatgcactgaaaaaaccatacggtgtactatataaaaagaaaaatattacaagaccttttgaggatcagacatcactggaattcttttcaaagaagtcagattgttctttattcatgtttggctcccataataagaagcggccaaataatctagtaataggtcgtatgtatgactaccatgtgctggatatgattgaattaggtattgagaattttgtctctctaaaagacattaagaacagtaaatgtcctgagggaacaaaacccatgctgatatttgctggcgatgatttcgatgtaacagaagattatagaagactaaaaagtcttcttattgatttcttcagaggccccacagtatcaaatatccgcctggctggattagagtatgttctgcacttcactgcactgaatgggaagatttactttcgaagctataagttgctgttgaagaaatctggttgcagaacaccacggattgaattggaagagatgggaccctcattggatctggttctgaggaggacacacctggcatcggatgacctttataaattatctatgaaaatgccaaaagctctcaagccaaagaagaagaaaaatatttcccatgatacttttggtacaacttatggaaggattcatatgcagaagcaagacctaagcaaactacaaaccaggaaaatgaaggggttgaagaagcgacctgcagaaaggataacagaagaccacgagaaaaagtcaaaaagaattaaaaaaaattgatggaacttagccagccactactgtttcattgtgttctacttaagagaattatcaagcgtcaatccattcagagtttcttataagatcttattatatatttttataacatgataattttacgatatattattatgaacagtaatatactagtattaagtgtaaagtaagccttttatttgagacattacaccctggtgtgccattttctcttgtgatatcccctgccctccacaaattcttctttctcattgggtggatggatgggtgaggagggatctccataaccattgggatttttttgaatttctggccttagctaaagaaagccacagaaagccggacccgcaggagctgtgtaaacaatctcagtatgaattacctggaaagttaacctcctctcccaacatggatctacattctgatttttattttctacttttattttgcctgaaatcctactcgttgacatttgagattttaagctttgtggctgaaaatatatagatctctgagaggga

SEQ ID NO: 177014 - DNA, 906 bp, Homo sapiens
  Payload ID: 14736
  Gene Symbol: RPF2
  Gene Name: ribosome production factor 2 homolog
  ENST ID: ENST00000425871
  CDS Start-End: 265-906
aagtgggagccgtgggatgggagggatgtgggattgaagcgttggccgcttttatcctagccagttgaaaaacgtctgacttccgaagtatgagacagatggtatagtggggttaggagcacagccctcggaatccgacagatctgagtgacagtctggcgcgtccacttaaagctttgtgactttggaaagcccaaaacgaaaagagccaagagattccttgagaagagagaaccgaaactcaatgaaaatattaaaaatgccatgctgattaaagggggaaatgcaaatgcaacagtgacaaaagtacttaaagatgtgtatgcactgaaaaaaccatacggtgtactatataaaaagaaaaatattacaagaccttttgaggatcagacatcactggaattcttttcaaagaagtcagattgttctttattcatgtttggctcccataataagaagcggccaaataatctagtaataggtcgtatgtatgactaccatgtgctggatatgattgaattaggtattgagaattttgtctctctaaaagacattaagaacagtaaatgtcctgagggaacaaaacccatgctgatatttgctggcgatgatttcgatgtaacagaagattatagaagactaaaaagtcttcttattgatttcttcagaggccccacagtatcaaatatccgcctggctggattagagtatgttctgcacttcactgcactgaatgggaagatttactttcgaagctataagttgctgttgaagaaatctggttgcagaacaccacggattgaattggaagagatgggaccctcattggatctggttctgaggaggacacacctggcatcggatgacctttataaattatctatgaaaatgccaaaagctctcaag

SEQ ID NO: 177015 - DNA, 3621 bp, Homo sapiens
  Payload ID: 14736
  Gene Symbol: RPF2
  Gene Name: ribosome production factor 2 homolog
  ENST ID: ENST00000607388
  CDS Start-End: 58-237
gtaatcgccgagggcacgtgcatgccccctggttaagagttgcaggtagcggtagcgatggacactctggatcgagtagtaaagcccaaaacgaaaagagccaagagattccttgagaagagagaaccgaaactcaatgaaaatattaaaaatgccatgctgattaaagggggaaatgcaaatgcaacagtgacaaaagtacttaaagatgtggaaaaatattacaagaccttttgaggatcagacatcactggaattcttttcaaagaagtcagattgttctttattcatgtttggctcccataataagaagcggccaaataatctagtaataggtcgtatgtatgactaccatgtgctggatatgattgaattaggtattgagaattttgtctctctaaaagacattaagaacagtaaatgtcctgagggaacaaaacccatgctgatatttgctggcgatgatttcgatgtaacagaagattatagaagactaaaaagtcttcttattgatttcttcagaggccccacagtatcaaatatccgcctggctggattagagtatgttctgcacttcactgcactgaatgggaagatttactttcgaagctataagttgctgttgaagaaatctggttgcagaacaccacggattgaattggaagagatgggaccctcattggatctggttctgaggaggacacacctggcatcggatgacctttataaattatctatgaaaatgccaaaagctctcaagccaaagaagaagaaaaatatttcccatgatacttttggtacaacttatggaaggattcatatgcagaagcaagacctaagcaaactacaaaccaggaaaatgaaggggttgaagaagcgacctgcagaaaggataacagaagaccacgagaaaaagtcaaaaagaattaaaaaaaattgatggaacttagccagccactactgtttcattgtgttctacttaagagaattatcaagcgtcaatccattcagagtttcttataagatcttattatatatttttataacatgataattttacgatatattattatgaacagtaatatactagtattaagtgtaaagtaagccttttatttgagacattacaccctggtgtgccattttctcttgtgatatcccctgccctccacaaattcttctttctcattgggtggatggatgggtgaggagggatctccataaccattgggatttttttgaatttctggccttagctaaagaaagccacagaaagccggacccgcaggagctgtgtaaacaatctcagtatgaattacctggaaagttaacctcctctcccaacatggatctacattctgatttttattttctacttttattttgcctgaaatcctactcgttgacatttgagattttaagctttgtggctgaaaatatatagatctctgagagggatgtctgctatctgattattgataaattacactactgttgattgttttaagagactctactactaagtagagcccaccccgcttctctgagacgaaacctgtgttttttggttggtttgtttttaagagatggggtcttgttctgtcacctagggtggagtgcagtggcacaatcacagctcactgcagccctgaactcctgggctcaagtaatcctcctgcctgagcctcttacgtagctgggattacaggcatgagccactgagccctactttttttttttaaagcaatgaggtcttgctgtgttgcccaggctggactcaaattcctgggctcaagtgatcctcccacttcaccttcctgagcagccggaactacagatgttggtccactgcacctggcagaaaagaagttttgataggggcagaaatgaaaaaggagaaaacaggtgagttttaaggtgcagggcactttagggtactgggtagccctaggtagctaaaggttgcatgaaggccctgggcgtttgcagatggtgtagaagccagccaaagcctaactacttgttttgaaagtttcttgaagacaggccttgtgcctaggaaaacagaagctttcttcttccttctactagtattgcatacttgtttttctggaatagggtgttaagttccttgattcagtccttgacaaggaatctcctttatacaagtgccagtaatgttgtaaaggtacagacatacgcaaatcataatttgttacatgaagtaccagtgctttcttttttgttgttttttgagacagagtctcgctctgtcgctcaggctggagtgcagtggcgcgatttcagttcactgcaacctccacctcccaggttcaagcattcttctgcctcagcctcccgagtagctgggattacaggcacccaccaccacgcctggctgattttttgtagagacagggtttcacttcaattccatgttagagagctccgtgcctgtgtatacatgcctttatgtaagcttgctcagctacagatcaacaatgctggcactaagcaaaagttcgagcctcagctttaccttctaccctttcccttctcttttgaatccattccttagctttccctagtcctctccggatagctgttactctcctcttgccagaaaaatgaaggagctggtatcatttatactttttgtttgattatacgtttaaccaaagaccatacagtctcgtacctgaatcagacatttgcactttatatctaaatgagaagaaggggctcagataagtcgtttgctgccatctggaggtagatggacaatagctgagaaggggagccatgaaaagaacatcaggagtgatggacgcatagtccttccccaaagcctcgctcatcactggtaggaggcaaagcagtgggtcctcctcaccagccgcttacgggaccctgccatgcctggacccctctatcaggaagacctaccccagcactactggaaaatcagccaatcttaacccaaagatggccatgatttctgtatgtgagacgtcttaagggtgtttttgtttgttttaatcagccctcttgtttgagatttggcaatacatttctgttttctaggtaatttctgtgtctgatggtagaggatctaataagtattggaatgcttcctatttgctgatagaagtaccaaatagtattattgaagtctaacaaagactttttgttgagaacaccttgtagtgttgtactatctggaactcttgagctgccatttatatcactttttgtggagagcacatcttgattttcagttgtccttactttagaatacaacacacataaattggagactatgtattcatttcaatggaggtggtaaattgcctgttttaagttttacttaatgttgggttttggtagatgaggaaagcattttggttatttgttttgttttaaataccaaatttcttatattttttctggaatattaatactattaccaagctattatttcatggaatttgggtttctttttttttgtttttttaaaattaagtgctgtttgttttcttggttattgaacataatccaaagtagagatgttattactcaattcaagaaaagaaagggctaataaaacttaacttcaagtca

SEQ ID NO: 177016 - DNA, 3165 bp, Homo sapiens
  Payload ID: 14737
  Gene Symbol: RPE
  Gene Name: ribulose-5-phosphate-3-epimerase
  Uniprot ID: Q96AT9
  ENST ID: ENST00000354506
  CDS Start-End: 98-697
acggagaaggggcggggccaaaactgcgcgcccaatcggggtgacgctctagccttgccggggactcgtgggtaacttgcttttgggagccagcggtatggcgtcgggctgcaagattggcccgtccatcctcaacagcgacctggccaatttaggggccgagtgcctccggatgctagactctggggccgattatctgcacctggacgtaatggacgggcattttgttcccaacatcacctttggtcaccctgtggtagaaagccttcgaaagcagctaggccaggaccctttctttgacatgcacatgatggtgtccaagccagaacagtgggtaaagccaatggctgtagcaggagccaatcagtacacctttcatctcgaggctactgagaacccaggggctttgattaaagacattcgggagaatgggatgaaggttggccttgccatcaaaccaggaacctcagttgagtatttggcaccatgggctaatcagatagatatggccttggttatgacagtggaaccggggtttggagggcagaaattcatggaagatatgatgccaaaggcaggagctaacatgattgtgtctggcagtgctattatgaggagtgaagaccccagatctgtgatcaatctattaagaaatgtttgctcagaagctgctcagaaacgttctcttgatcggtgaaaccataaggagcccagtgttcctgttcatgaaatctcccttttactggaaaacaggaatattgactaccaaatcacaatgcaattgaagccgtactgcttttttgagcagttattcattccagtgattaaaactgattgtgcagaatattctaagaggtcagaaattggtgtgtataactacatttttagtgatgcaatttattgattagtgagtaagatactgtttttattgagagatttgatttttataaagtaaaaatacggctgcattagggttacaaacagaaaagtgtcttaatgtctaaggagggcatattagctacactacaaaaacaaattttgtctgtacttctgaaaagaattttgttgtttctcagctgttttccaaaagcaaaggaagtctttatggtttttttctatttcatgttattgtgatttgtttataagtttgggtggggtgcataccatattcttggttcttaaaatctatcacttttcaccttacacttgatgtgtgaaaactataaaaacaatgtgtgaaacccaggggttctaaaatacaagcatagattttatcagggtgttttgtcaaagcaggttattcagtgattcctccccaccattcttaagaacgttaaataatgctgttgtgttagctctgagtagaaaggaaaaagtaaaacctctgtttggaggtaatattgggttgaattctgactgcccctttctagctggacctttaacaaatcacccaatcttttttgtgtttctctaaagtcatttatacattaaatgtaattatagcaactgtggggttctgttgagaattaagagctaacactatatatgtaaagtttccagtactagtcccagaatttagaatatgctcaacacaaagtaaacagcattatataagtttatatttttgtgagttataaagtactttgatatattctcattaaatctgtaaatcacctctataagtaagtggtaataataaagcagatatttttgtccccatttaaaaaatgaagaaattaatgcttaatagggtggtaccctggaaaggatctgggaagtggtagaatttctggtctgtacttttacaaatggagcccttgggaggtgggttaggtaaaagaagctttttacttaacgttgtcttatttccagtctaattttacgctgtagcagaaccagatggctgagaaaattctggaactatggatcttgaccccaaggatatattattttattccaagaaagatcaggtaggcgaaaagatgacaggatacagagtcaatccataaactaaatatttataactgttctgaattatacagagtctaaaaatatgtgtcagctacttcattcctgtaaatactcttgctgtgttataaatatggcaagaaataaacatgaccaatatcaatagacttcttgaggctactataagttttgagaaataaggttcaaaaaataagaatgctaacacttaagcacagactagagcttgcttgggtttcttcctgcattacaaggtaaaaatttgttaatgtttgtttttattcagcttgggaaagctttgtgccatgaatacgtcgcatttaataacaagcaacacacggcatatagaaataactttaattaaaaaacttacatagaagattataatatcagacgtgacaaagatttgagtttatttgcctggacaacttgggtttgtctggcttttgttttctttttctttaaaaataaatgtacagtaaaactacaagcaaaagtttgtcagtattgaattgaattttttaccccttaaaaggactagtataatttccaatctctaacaaaaacttagtgtcaaatctcacagataaggccaaatggccaatattttcagttatgtgggtagtacaacttgagtaaccttttttacatgacaaaaagtgagttatataaattgtcctcaactttcacataggaaaaaaatggtttaatagcttcaaaaggaattttctttcatgtatactcttcagtatccaatattgaagctttgttctttgaaaaattttaatttccaatctaggatgcaagcaagaatatatgtttatttgaatagagtaagctatggcaaagaatgaccaaattagctagaaatagaaatcagccagaattaactaatttcttgctaatctagaaatacaatcatcttttttttttttttcaaattttatactgatagggctttactgtttgtggctcattttaaaactggtgtcttctcttcatgagacacattaattggtaaaactcaaattgagttttcaaagatgtgatagtattaaagtgcaccaatatttgactcaaatttgcttgctttattttgttaggagtaaacagaaagtagcctgtgtttagtcccaaagatagcagtgattttgaataaaggagttttgtgttgcctgg

SEQ ID NO: 177017 - DNA, 2569 bp, Homo sapiens
  Payload ID: 14737
  Gene Symbol: RPE
  Gene Name: ribulose-5-phosphate-3-epimerase
  Uniprot ID: Q96AT9
  ENST ID: ENST00000359429
  CDS Start-End: 98-784
acggagaaggggcggggccaaaactgcgcgcccaatcggggtgacgctctagccttgccggggactcgtgggtaacttgcttttgggagccagcggtatggcgtcgggctgcaagattggcccgtccatcctcaacagcgacctggccaatttaggggccgagtgcctccggatgctagactctggggccgattatctgcacctggacgtaatggacgggcattttgttcccaacatcacctttggtcaccctgtggtagaaagccttcgaaagcagctaggccaggaccctttctttgacatgcacatgatggtgtccaagccagaacagtgggtaaagccaatggctgtagcaggagccaatcagtacacctttcatctcgaggctactgagaacccaggggctttgattaaagacattcgggagaatgggatgaaggttggccttgccatcaaaccaggaacctcagttgagtatttggcaccatgggctaatcagatagatatggccttggttatgacagtggaaccggggtttggagggcagaaattcatggaagatatgatgccaaaggttcactggttgaggacccagttcccatctttggatatagaggtcgatggtggagtaggtcctgacactgtccataaatgtgcagaggcaggagctaacatgattgtgtctggcagtgctattatgaggagtgaagaccccagatctgtgatcaatctattaagaaatgtttgctcagaagctgctcagaaacgttctcttgatcggtgaaaccataaggagcccagtgttcctgttcatgaaatctcccttttactggaaaacaggaatattgactaccaaatcacaatgcaattgaagccgtactgcttttttgagcagttattcattccagtgattaaaactgattgtgcagaatattctaagaggtcagaaattggtgtgtataactacatttttagtgatgcaatttattgattagtgagtaagatactgtttttattgagagatttgatttttataaagtaaaaatacggctgcattagggttacaaacagaaaagtgtcttaatgtctaaggagggcatattagctacactacaaaaacaaattttgtctgtacttctgaaaagaattttgttgtttctcagctgttttccaaaagcaaaggaagtctttatggtttttttctatttcatgttattgtgatttgtttataagtttgggtggggtgcataccatattcttggttcttaaaatctatcacttttcaccttacacttgatgtgtgaaaactataaaaacaatgtgtgaaacccaggggttctaaaatacaagcatagattttatcagggtgttttgtcaaagcaggttattcagtgattcctccccaccattcttaagaacgttaaataatgctgttgtgttagctctgagtagaaaggaaaaagtaaaacctctgtttggaggtaatattgggttgaattctgactgcccctttctagctggacctttaacaaatcacccaatcttttttgtgtttctctaaagtcatttatacattaaatgtaattatagcaactgtggggttctgttgagaattaagagctaacactatatatgtaaagtttccagtactagtcccagaatttagaatatgctcaacacaaagtaaacagcattatataagtttatatttttgtgagttataaagtactttgatatattctcattaaatctgtaaatcacctctataagtaagtggtaataataaagcagatatttttgtccccatttaaaaaatgaagaaattaatgcttaatagggtggtaccctggaaaggatctgggaagtggtagaatttctggtctgtacttttacaaatggagcccttgggaggtgggttaggtaaaagaagctttttacttaacgttgtcttatttccagtctaattttacgctgtagcagaaccagatggctgagaaaattctggaactatggatcttgaccccaaggatatattattttattccaagaaagatcaggtaggcgaaaagatgacaggatacagagtcaatccataaactaaatatttataactgttctgaattatacagagtctaaaaatatgtgtcagctacttcattcctgtaaatactcttgctgtgttataaatatggcaagaaataaacatgaccaatatcaatagacttcttgaggctactataagttttgagaaataaggttcaaaaaataagaatgctaacacttaagcacagactagagcttgcttgggtttcttcctgcattacaaggtaaaaatttgttaatgtttgtttttattcagcttgggaaagctttgtgccatgaatacgtcgcatttaataacaagcaacacacggcatatagaaataactttaattaaaaaacttacatagaagattataatatcagacgtgacaaagatttgagtttatttgcctggacaacttgggtttgtctggcttttgttttctttttctttaaaaataaatgtacagtaaaactacaagcaaaa

SEQ ID NO: 177018 - DNA, 737 bp, Homo sapiens
  Payload ID: 14737
  Gene Symbol: RPE
  Gene Name: ribulose-5-phosphate-3-epimerase
  ENST ID: ENST00000408981
  CDS Start-End: 261-737
ggggactcgtgggtaacttgcttttgggagccagcggtatggcgtcgggctgcaagattggcccgtccatcctcaacagcgacctggccaatttaggggccgagtgcctccggatgctagactctggggccgattatctgcacctggacgtaatggacggattttgtttgtcttgtaggcattttgttcccaacatcacctttggtcaccctgtggtagaaagccttcgaaagcagctaggccaggaccctttctttgacatgcacatgatggtgtccaagccagaacagtgggtaaagccaatggctgtagcaggagccaatcagtacacctttcatctcgaggctactgagaacccaggggctttgattaaagacattcgggagaatgggatgaaggttggccttgccatcaaaccaggaacctcagttgagtatttggcaccatgggctaatcagatagatatggccttggttatgacagtggaaccggggtttggagggcagaaattcatggaagatatgatgccaaaggttcactggttgaggacccagttcccatctttggatatagaggtcgatggtggagtaggtcctgacactgtccataaatgtgcagaggcaggagctaacatgattgtgtctggcagtgctattatgaggagtgaagaccccagatctgtgatcaatctattaagaaatgtttgctcagaagctgctcagaaacgttctcttgat

SEQ ID NO: 177019 - DNA, 792 bp, Homo sapiens
  Payload ID: 14737
  Gene Symbol: RPE
  Gene Name: ribulose-5-phosphate-3-epimerase
  Uniprot ID: Q96AT9
  ENST ID: ENST00000411934
  CDS Start-End: 140-622
agcggtatggcgtcgggctgcaagattggcccgtccatcctcaacagcgacctggccaatttaggggccgagtgcctccggatgctagactctggggccgattatctgcacctggacgcaccctgctcttcagggagacatgcacatgatggtgtccaagccagaacagtgggtaaagccaatggctgtagcaggagccaatcagtacacctttcatctcgaggctactgagaacccaggggctttgattaaagacattcgggagaatgggatgaaggttggccttgccatcaaaccaggaacctcagttgagtatttggcaccatgggctaatcagatagatatggccttggttatgacagtggaaccggggtttggagggcagaaattcatggaagatatgatgccaaaggttcactggttgaggacccagttcccatctttggatatagaggtcgatggtggagtaggtcctgacactgtccataaatgtgcagaggcaggagctaacatgattgtgtctggcagtgctattatgaggagtgaagaccccagatctgtgatcaatctattaagaaatgtttgctcagaagctgctcagaaacgttctcttgatcggtgaaaccataaggagcccagtgttcctgttcatgaaatctcccttttactggaaaacaggaatattgactaccaaatcacaatgcaattgaagccgtactgcttttttgagcagttattcattccagtgattaaaactgattgtgcagaatattctaagaggtcagaaattgg

SEQ ID NO: 177020 - DNA, 925 bp, Homo sapiens
  Payload ID: 14737
  Gene Symbol: RPE
  Gene Name: ribulose-5-phosphate-3-epimerase
  ENST ID: ENST00000429907
  CDS Start-End: 225-650
tgcttttgggagccagcggtatggcgtcgggctgcaagattggcccgtccatcctcaacagcgacctggccaatttaggggccgagtgcctccggatgctagactctggggccgattatctgcacctggacgtaatggacgggcattttgttcccaacatcacctttggtcaccctgtggtagaaagccttcgaaagcagctaggccaggaccctttctttgacatgcacatgatggtgtccaagccagaacagtgggtaaagccaatggctgtagcaggagccaatcagtacacctttcatctcgaggctactgagaacccaggggctttgattaaagacattcgggagaatgggatgaaggttggccttgccatcaaaccaggaacctcagttgagtatttggcaccatgggctaatcagatagatatggccttggttatgacagtggaaccggggtttggagggcagaaattcatggaagatatgatgccaaaggttcactggttgaggacccagttcccatctttggatatagaggtcgatggtggagtaggtcctgacactgtccataaatgtgcagagccctttggaagatcattaagtttcacggccttggaagtgagaaatttttccaaaatacggaattaaaaggcaggagctaacatgattgtgtctggcagtgctattatgaggagtgaagaccccagatctgtgatcaatctattaagaaatgtttgctcagaagctgctcagaaacgttctcttgatcggtgaaaccataaggagcccagtgttcctgttcatgaaatctcccttttactggaaaacaggaatattgactaccaaatcacaatgcaattgaagccgtactgcttttttgagcagttattcattccagtgattaaaactgattgtgcagaata

SEQ ID NO: 177021 - DNA, 2130 bp, Homo sapiens
  Payload ID: 14737
  Gene Symbol: RPE
  Gene Name: ribulose-5-phosphate-3-epimerase
  Uniprot ID: Q96AT9
  ENST ID: ENST00000454822
  CDS Start-End: 159-695
actcgtgggtaacttgcttttgggagccagcggtatggcgtcgggctgcaagattggcccgtccatcctcaacagcgacctggccaatttaggggccgagtgcctccggatgctagactctggggccgattatctgcacctggacgtaatggacggacatgcacatgatggtgtccaagccagaacagtgggtaaagccaatggctgtagcaggagccaatcagtacacctttcatctcgaggctactgagaacccaggggctttgattaaagacattcgggagaatgggatgaagtcttgctctgtcacccaggctgaagtgcagtggcacagtcagggcccattgcaggttggccttgccatcaaaccaggaacctcagttgagtatttggcaccatgggctaatcagatagatatggccttggttatgacagtggaaccggggtttggagggcagaaattcatggaagatatgatgccaaaggttcactggttgaggacccagttcccatctttggatatagaggtcgatggtggagtaggtcctgacactgtccataaatgtgcagaggcaggagctaacatgattgtgtctggcagtgctattatgaggagtgaagaccccagatctgtgatcaatctattaagaaatgtttgctcagaagctgctcagaaacgttctcttgatcggtgaaaccataaggagcccagtgttcctgttcatgaaatctcccttttactggaaaacaggaatattgactaccaaatcacaatgcaattgaagccgtactgcttttttgagcagttattcattccagtgattaaaactgattgtgcagaatattctaagaggtcagaaattggtgtgtataactacatttttagtgatgcaatttattgattagtgagtaagatactgtttttattgagagatttgatttttataaagtaaaaatacggctgcattagggttacaaacagaaaagtgtcttaatgtctaaggagggcatattagctacactacaaaaacaaattttgtctgtacttctgaaaagaattttgttgtttctcagctgttttccaaaagcaaaggaagtctttatggtttttttctatttcatgttattgtgatttgtttataagtttgggtggggtgcataccatattcttggttcttaaaatctatcacttttcaccttacacttgatgtgtgaaaactataaaaacaatgtgtgaaacccaggggttctaaaatacaagcatagattttatcagggtgttttgtcaaagcaggttattcagtgattcctccccaccattcttaagaacgttaaataatgctgttgtgttagctctgagtagaaaggaaaaagtaaaacctctgtttggaggtaatattgggttgaattctgactgcccctttctagctggacctttaacaaatcacccaatcttttttgtgtttctctaaagtcatttatacattaaatgtaattatagcaactgtggggttctgttgagaattaagagctaacactatatatgtaaagtttccagtactagtcccagaatttagaatatgctcaacacaaagtaaacagcattatataagtttatatttttgtgagttataaagtactttgatatattctcattaaatctgtaaatcacctctataagtaagtggtaataataaagcagatatttttgtccccatttaaaaaatgaagaaattaatgcttaatagggtggtaccctggaaaggatctgggaagtggtagaatttctggtctgtacttttacaaatggagcccttgggaggtgggttaggtaaaagaagctttttacttaacgttgtcttatttccagtctaattttacgctgtagcagaaccagatggctgagaaaattctggaactatggatcttgaccccaaggatatattattttattccaagaaagatcaggtaggcgaaaagatgacaggatacagagtcaatccataaactaaatatttataactgttctgaattatacagagtctaaaaatatgtgtcagctacttcattcctgtaaatactcttgctgtgttataaatatggcaagaaataaacatgaccaatatcaat

SEQ ID NO: 177022 - DNA, 668 bp, Homo sapiens
  Payload ID: 14737
  Gene Symbol: RPE
  Gene Name: ribulose-5-phosphate-3-epimerase
  ENST ID: ENST00000438265
  CDS Start-End: 228-668
acttgcttttgggagccagcggtatggcgtcgggctgcaagattggcccgtccatcctcaacagcgacctggccaatttaggggccgagtgcctccggatgctagactctggggccgattatctgcacctggacgtaatggacgggcattttgttcccaacatcacctttggtcaccctgtggtagaaagccttcgaaagcagctaggccaggaccctttctttgacatgcacatgatggtgtccaagccagaacagtgggtaaagccaatggctgtagcaggagccaatcagtacacctttcatctcgaggctactgagaacccaggggctttgattaaagacattcgggagaatgggatgaagtcttgctctgtcacccaggctgaagtgcagtggcacagtcagggcccattgcaggttggccttgccatcaaaccaggaacctcagttgagtatttggcaccatgggctaatcagatagatatggccttggttatgacagtggaaccggggtttggagggcagaaattcatggaagatatgatgccaaaggttcactggttgaggacccagttcccatctttggatatagaggtcgatggtggagtaggtcctgacactgtccataaatgtgcagagattggagtgcagtggcgtgatctctgc

SEQ ID NO: 177023 - DNA, 779 bp, Homo sapiens
  Payload ID: 14737
  Gene Symbol: RPE
  Gene Name: ribulose-5-phosphate-3-epimerase
  ENST ID: ENST00000452025
  CDS Start-End: 20-697
gcttttgggagccagcggtatggcgtcgggctgcaagattggcccgtccatcctcaacagcgacctggccaatttaggggccgagtgcctccggatgctagactctggggccgattatctgcacctggacgtaatggacgggcattttgttcccaacatcacctttggtcaccctgtggtagaaagccttcgaaagcagctaggccaggaccctttctttgacatgcacatgatggtgtccaagccagaacagtgggtaaagccaatggctgtagcaggagccaatcagtacacctttcatctcgaggctactgagaacccaggggctttgattaaagacattcgggagaatgggatgaaggttggccttgccatcaaaccaggaacctcagttgagtatttggcaccatgggctaatcagatagatatggccttggttatgacagtggaaccggggtttggagggcagaaattcatggaagatatgatgccaaaggttcactggttgaggacccagttcccatctttggatatagaggtcgatggtggagtaggtcctgacactgtccataaatgtgcagagattggagtgcagtggcgtgatctctgctcactgcaatctctgcctgccgggttcaagcgattctcctgcctcagcctcctgagtagctgggattacaggcaggagctaacatgattgtgtctggcagtgctattatgaggagtgaagaccccagatctgtgatcaatctattaagaaatgtttgctcagaagctgc

SEQ ID NO: 177024 - DNA, 2511 bp, Homo sapiens
  Payload ID: 14737
  Gene Symbol: RPE
  Gene Name: ribulose-5-phosphate-3-epimerase
  Uniprot ID: Q96AT9
  ENST ID: ENST00000429921
  CDS Start-End: 190-726
actcgtgggtaacttgcttttgggagccagcggtatggcgtcgggctgcaagattggcccgtccatcctcaacagcgacctggccaatttaggggccgagtgcctccggatgctagactctggggccgattatctgcacctggacgtaatggacgggcaccctgctcttcagggaggtcagttttttacatgcacatgatggtgtccaagccagaacagtgggtaaagccaatggctgtagcaggagccaatcagtacacctttcatctcgaggctactgagaacccaggggctttgattaaagacattcgggagaatgggatgaagtcttgctctgtcacccaggctgaagtgcagtggcacagtcagggcccattgcaggttggccttgccatcaaaccaggaacctcagttgagtatttggcaccatgggctaatcagatagatatggccttggttatgacagtggaaccggggtttggagggcagaaattcatggaagatatgatgccaaaggttcactggttgaggacccagttcccatctttggatatagaggtcgatggtggagtaggtcctgacactgtccataaatgtgcagaggcaggagctaacatgattgtgtctggcagtgctattatgaggagtgaagaccccagatctgtgatcaatctattaagaaatgtttgctcagaagctgctcagaaacgttctcttgatcggtgaaaccataaggagcccagtgttcctgttcatgaaatctcccttttactggaaaacaggaatattgactaccaaatcacaatgcaattgaagccgtactgcttttttgagcagttattcattccagtgattaaaactgattgtgcagaatattctaagaggtcagaaattggtgtgtataactacatttttagtgatgcaatttattgattagtgagtaagatactgtttttattgagagatttgatttttataaagtaaaaatacggctgcattagggttacaaacagaaaagtgtcttaatgtctaaggagggcatattagctacactacaaaaacaaattttgtctgtacttctgaaaagaattttgttgtttctcagctgttttccaaaagcaaaggaagtctttatggtttttttctatttcatgttattgtgatttgtttataagtttgggtggggtgcataccatattcttggttcttaaaatctatcacttttcaccttacacttgatgtgtgaaaactataaaaacaatgtgtgaaacccaggggttctaaaatacaagcatagattttatcagggtgttttgtcaaagcaggttattcagtgattcctccccaccattcttaagaacgttaaataatgctgttgtgttagctctgagtagaaaggaaaaagtaaaacctctgtttggaggtaatattgggttgaattctgactgcccctttctagctggacctttaacaaatcacccaatcttttttgtgtttctctaaagtcatttatacattaaatgtaattatagcaactgtggggttctgttgagaattaagagctaacactatatatgtaaagtttccagtactagtcccagaatttagaatatgctcaacacaaagtaaacagcattatataagtttatatttttgtgagttataaagtactttgatatattctcattaaatctgtaaatcacctctataagtaagtggtaataataaagcagatatttttgtccccatttaaaaaatgaagaaattaatgcttaatagggtggtaccctggaaaggatctgggaagtggtagaatttctggtctgtacttttacaaatggagcccttgggaggtgggttaggtaaaagaagctttttacttaacgttgtcttatttccagtctaattttacgctgtagcagaaccagatggctgagaaaattctggaactatggatcttgaccccaaggatatattattttattccaagaaagatcaggtaggcgaaaagatgacaggatacagagtcaatccataaactaaatatttataactgttctgaattatacagagtctaaaaatatgtgtcagctacttcattcctgtaaatactcttgctgtgttataaatatggcaagaaataaacatgaccaatatcaatagacttcttgaggctactataagttttgagaaataaggttcaaaaaataagaatgctaacacttaagcacagactagagcttgcttgggtttcttcctgcattacaaggtaaaaatttgttaatgtttgtttttattcagcttgggaaagctttgtgccatgaatacgtcgcatttaataacaagcaacacacggcatatagaaataactttaattaaaaaacttacatagaagattataatatcagacgtgacaaagatttgagtttatttgcctggacaacttgggtttgtctggcttttgttttctttttctttaaaaataaatgtacagtaaaactacaagcaaaa

SEQ ID NO: 177025 - DNA, 796 bp, Homo sapiens
  Payload ID: 14737
  Gene Symbol: RPE
  Gene Name: ribulose-5-phosphate-3-epimerase
  Uniprot ID: Q96AT9
  ENST ID: ENST00000438204
  CDS Start-End: 144-626
gcttttgggagccagcggtatggcgtcgggctgcaagattggcccgtccatcctcaacagcgacctggccaatttaggggccgagtgcctccggatgctagactctggggccgattatctgcacctggacgtaatggacggacatgcacatgatggtgtccaagccagaacagtgggtaaagccaatggctgtagcaggagccaatcagtacacctttcatctcgaggctactgagaacccaggggctttgattaaagacattcgggagaatgggatgaaggttggccttgccatcaaaccaggaacctcagttgagtatttggcaccatgggctaatcagatagatatggccttggttatgacagtggaaccggggtttggagggcagaaattcatggaagatatgatgccaaaggttcactggttgaggacccagttcccatctttggatatagaggtcgatggtggagtaggtcctgacactgtccataaatgtgcagaggcaggagctaacatgattgtgtctggcagtgctattatgaggagtgaagaccccagatctgtgatcaatctattaagaaatgtttgctcagaagctgctcagaaacgttctcttgatcggtgaaaccataaggagcccagtgttcctgttcatgaaatctcccttttactggaaaacaggaatattgactaccaaatcacaatgcaattgaagccgtactgcttttttgagcagttattcattccagtgattaaaactgattgtgcagaatattctaagaggtcagaaattgg

SEQ ID NO: 177026 - DNA, 1128 bp, Homo sapiens
  Payload ID: 14737
  Gene Symbol: RPE
  Gene Name: ribulose-5-phosphate-3-epimerase
  Uniprot ID: Q96AT9
  ENST ID: ENST00000436630
  CDS Start-End: 283-819
aaaactgcgcgcccaatcggggtgacgctctagccttgccggggactcgtgggtaacttgcttttgggagccagcggtatggcgtcgggctgcaagattggcccgtccatcctcaacagcgacctggccaatttaggggccgagtgcctccggatgctagactctggggccgattatctgcacctggacgtaatggacgggcattttgttcccaacatcacctttggtcaccctgtggtagaaagccttcgaaagcagctaggccaggaccctttctttgacatgcacatgatggtgtccaagccagaacagtgggtaaagccaatggctgtagcaggagccaatcagtacacctttcatctcgaggctactgagaacccaggggctttgattaaagacattcgggagaatgggatgaagtcttgctctgtcacccaggctgaagtgcagtggcacagtcagggcccattgcaggttggccttgccatcaaaccaggaacctcagttgagtatttggcaccatgggctaatcagatagatatggccttggttatgacagtggaaccggggtttggagggcagaaattcatggaagatatgatgccaaaggttcactggttgaggacccagttcccatctttggatatagaggtcgatggtggagtaggtcctgacactgtccataaatgtgcagaggcaggagctaacatgattgtgtctggcagtgctattatgaggagtgaagaccccagatctgtgatcaatctattaagaaatgtttgctcagaagctgctcagaaacgttctcttgatcggtgaaaccataaggagcccagtgttcctgttcatgaaatctcccttttactggaaaacaggaatattgactaccaaatcacaatgcaattgaagccgtactgcttttttgagcagttattcattccagtgattaaaactgattgtgcagaatattctaagaggtcagaaattggtgtgtataactacatttttagtgatgcaatttattgattagtgagtaagatactgtttttattgagagatttgatttttataaagtaaaaatacggctgcattagggttacaaacagaaaagtgtcttaatgtctaagg

SEQ ID NO: 177027 - DNA, 668 bp, Homo sapiens
  Payload ID: 14737
  Gene Symbol: RPE
  Gene Name: ribulose-5-phosphate-3-epimerase
  ENST ID: ENST00000445268
  CDS Start-End: 144-617
gcttttgggagccagcggtatggcgtcgggctgcaagattggcccgtccatcctcaacagcgacctggccaatttaggggccgagtgcctccggatgctagactctggggccgattatctgcacctggacgtaatggacggacatgcacatgatggtgtccaagccagaacagtgggtaaagccaatggctgtagcaggagccaatcagtacacctttcatctcgaggctactgagaacccaggggctttgattaaagacattcgggagaatgggatgaaggttggccttgccatcaaaccaggaacctcagttgagtatttggcaccatgggctaatcagatagatatggccttggttatgacagtggaaccggggtttggagggcagaaattcatggaagatatgatgccaaaggttcactggttgaggacccagttcccatctttggatatagaggtcgatggtggagtaggtcctgacactgtccataaatgtgcagagattggagtgcagtggcgtgatctctgctcactgcaatctctgcctgccgggttcaagcgattctcctgcctcagcctcctgagtagctgggattacaggcaggagctaacatgattgtgtctggcagtgctattatgaggagtgaagaccccagatctgtgatca

SEQ ID NO: 177028 - DNA, 858 bp, Homo sapiens
  Payload ID: 14737
  Gene Symbol: RPE
  Gene Name: ribulose-5-phosphate-3-epimerase
  ENST ID: ENST00000435437
  CDS Start-End: 6-581
gcggtatggcgtcgggctgcaagattggcccgtccatcctcaacagcgacctggccaatttaggggccgagtgcctccggatgctagactctggggccgattatctgcacctggacgtaatggacgggcattttgttcccaacatcacctttggtcaccctgtggtagaaagccttcgaaagcagctaggccaggaccctttctttgacatgcacatgatggtgtccaagccagaacagtgggtaaagccaatggctgtagcaggagccaatcagtacacctttcatctcgaggctactgagaacccaggggctttgattaaagacattcgggagaatgggatgaaggttggccttgccatcaaaccaggaacctcagttgagtatttggcaccatgggctaatcagatagatatggccttggttatgacagtggaaccggggtttggagggcagaaattcatggaagatatgatgccaaaggttcactggttgaggacccagttcccatctttggatatagaggtcgatggtggagtaggtcctgacactgtccataaatgtgcagaggagctaacatgattgtgtctggcagtgctattatgaggagtgaagaccccagatctgtgatcaatctattaagaaatgtttgctcagaagctgctcagaaacgttctcttgatcggtgaaaccataaggagcccagtgttcctgttcatgaaatctcccttttactggaaaacaggaatattgactaccaaatcacaatgcaattgaagccgtactgcttttttgagcagttattcattccagtgattaaaactgattgtgcagaatattctaagaggtcagaaattgg

SEQ ID NO: 177029 - DNA, 426 bp, Homo sapiens
  Payload ID: 14737
  Gene Symbol: RPE
  Gene Name: ribulose-5-phosphate-3-epimerase
  ENST ID: ENST00000438191
  CDS Start-End: 13-195
ggagccagcggtatggcgtcgggctgcaagattggcccgtccatcctcaacagcgacctggccaatttaggggccgagtgcctccggatgctagactctggggccgattatctgcacctggacgcaccctgctcttcagggaggtcagttttttgcattttgttcccaacatcacctttggtcaccctgtggtagaaagccttcgaaagcagctaggccaggaccctttctttgacatgcacatgatggtgtccaagccagaacagtgggtaaagccaatggctgtagcaggagccaatcagtacacctttcatctcgaggctactgagaacccaggggctttgattaaagacattcgggagaatgggatgaaggttggccttgccatcaaaccaggaacctcagttgagtatttggcaccatggg

SEQ ID NO: 177030 - DNA, 546 bp, Homo sapiens
  Payload ID: 14737
  Gene Symbol: RPE
  Gene Name: ribulose-5-phosphate-3-epimerase
  ENST ID: ENST00000453724
  CDS Start-End: 264-546
gggtaacttgcttttgggagccagcggtatggcgtcgggctgcaagattggcccgtccatcctcaacagcgacctggccaatttaggggccgagtgcctccggatgctagactctggggccgattatctgcacctggacgtaatggacgggcaccctgctcttcagggaggtcagttttttgcattttgttcccaacatcacctttggtcaccctgtggtagaaagccttcgaaagcagctaggccaggaccctttctttgacatgcacatgatggtgtccaagccagaacagtgggtaaagccaatggctgtagcaggagccaatcagtacacctttcatctcgaggctactgagaacccaggggctttgattaaagacattcgggagaatgggatgaagtcttgctctgtcacccaggctgaagtgcagtggcacagtcagggcccattgcaggttggccttgccatcaaaccaggaacctcagttgagtatttggcaccatgggctaatcagatagatatggccttggttatgacagtggaac

SEQ ID NO: 177031 - DNA, 496 bp, Homo sapiens
  Payload ID: 14737
  Gene Symbol: RPE
  Gene Name: ribulose-5-phosphate-3-epimerase
  ENST ID: ENST00000441588
  CDS Start-End: 175-496
gcttttgggagccagcggtatggcgtcgggctgcaagattggcccgtccatcctcaacagcgacctggccaatttaggggccgagtgcctccggatgctagactctggggccgattatctgcacctggacgtaatggacgggcaccctgctcttcagggaggtcagttttttacatgcacatgatggtgtccaagccagaacagtgggtaaagccaatggctgtagcaggagccaatcagtacacctttcatctcgaggctactgagaacccaggggctttgattaaagacattcgggagaatgggatgaaggttggccttgccatcaaaccaggaacctcagttgagtatttggcaccatgggctaatcagatagatatggccttggttatgacagtggaaccggggtttggagggcagaaattcatggaagatatgatgccaaaggttcactggttgaggacccagttcccatctttggatatagaggtcgatg

SEQ ID NO: 177032 - DNA, 2130 bp, Homo sapiens
  Payload ID: 14738
  Gene Symbol: RPEL1
  Gene Name: ribulose-5-phosphate-3-epimerase-like 1
  Uniprot ID: Q2QD12
  ENST ID: ENST00000441178
  CDS Start-End: 111-797
ctggccaaactgtggttctttggtagaatttcctggttttaaaaaaaaaaaaagtgggctctagtcttgccggggactcgtggggtaacttgttcttgggagccagcggtatggcgtcgggctgcaagattggcccgtccatcctcaacagcgacctggccaatttaggggccaagtgcctccagatgctagactctggggccgattatctgcatctggatgtaatggatgggcattttgttcccaacatcacctttggtcaccctgtggtagaaagccttcgaaagcagctaggccaggaccctttctttgacatgcacatgatggtgtccaagccagaacagtgggtaaagccaatggctgtagcagaagccaatcagtacacctttcatctcgaggctactgagaacccagggactttgattaaagacattcgggagaatgggatgaaggttggccttgccatcaaaccaggaacctcagttgagtatttggcaccatgggctaatcaaatagatatggccttggttatgacagtggaaccggggtttggagagcagaaattcatggaagatatgatgccaaaggttcactggttgaggacccagttcccatctttggatatagagggcgatggtggagtaggttctgacactgtccataagtgtgcagaggcaggagctaacatgactgtatctggcagtgctattatgaggagtgaagaccccagatctgtgatcaacctattaagaaatatttgctcagaagctgctcagaaacgttctcttgatcgatgaaaccataaggagcccaatgtttctgttcatgaaatctcccttttactggaaaacaggaatattgactaccaaatcatcatgaaattgaagctgtactgcttttttgagcagttattcattccagtgattaaaactgattgtgcagaatattctaagaggtcagaaattggtgtgtataactacatttttagtgatgcaatttaatgattagtgagtaagatactgtttttattgagagacttgatttttataaagagtaaaaatacggctgcattaaggttacaaacagaaaagtgtcttaatgcctaaggagggcatattagctacactacaaaaacaaattttgtctgtacttctgaaaagaattttgttgtttctcagctgttttccaaaagcaaaggaagtctttatggcttttttctatttcatgttatttgtgatttgtttataagtttgggtgggatggcataccatattcttggttcttaaaatctatcacttttcaccttacacttaatgtgtaaaaactataaaaacaatgcgtgaaacccaggggttctaaaatacaagcatagattttatcagggtgtttttgtcaaagcaggttattcagtgattcctccccaccattcttaaggacgttaaataatgctgttgtgttagctctgagtagaaaggaaaaagtaaaaacctctgtatggaagtaatattgggttgaattctgactgcccttttctagctggacctttaacaaatcacccagtcttttttgtgtttctctgaagtcatttatacattaaatgtaattataacaactgtggggttgtgttgagaattaagaggtaacactatatatgtaaagtttctagtactagtcccagaatttagaatatgctcaatacaaagtagatagcattatataagtttatatttttgtgagttataaagtactttgatatattctcattaaatctgtaaatcacctctataagtaagtggtaataataaagcagatatttttgtccccatttaaaaaaaaaaaaaagtgttccctaacagtttccagagcacgagctgaagggattgacgggctcctcaaaggctatacacttttcatggccttgtctcttccaggtacagtgctggctacttttacatatatgttgtcaacaaatcctcaggataattctaaggcaattctactgcaaatgagatactatcttaatttacagttgacaaaaactgagtctcaggaaggttgcctgacctgctcaaggtcatatagctagtaagggtgcagtataggttcgaacccacctgcctgattacgtct

SEQ ID NO: 177033 - DNA, 4127 bp, Homo sapiens
  Payload ID: 14739
  Gene Symbol: RIC1
  Gene Name: RIC1 homolog, RAB6A GEF complex partner 1
  Uniprot ID: Q4ADV7
  ENST ID: ENST00000251879
  CDS Start-End: 286-3783
gaggaaggggcggggtcggggcgggcctccgcgctcctcccgccctctctgtgtccctactctccctccccttccctcccccacactcggccccgtcagcttgggggtgccttcgtcgcgcagccttgcgtcggcccggcccggccaggccagcgggcagatgccccgagctgccgccgccgccgccgccgactcggccggtggcggtgtgggaggtgggcgaccagcccggggccgctgagtgtgacggacgcaactgggggcgccgggggctccgcacggaccatgtattttctgagcggctggcccaagaggctgctgtgccctctggggagcccggccgaggcgcctttccacgttcagtccgacccgcagagggctttcttcgccgtgctggccgcggcccgcctcagcatctggtacagccgacctagtgtgttaattgtaacctacaaggagcctgcaaaatcatctactcagtttggatcctacaagcaagctgaatggaggccagatagtaccatgatagctgtatcaacggcaaatggatacatcttgttttttcatattacatctacaagaggggacaagtacctttatgaaccagtgtatcccaaaggaagtccacaaatgaaggggacaccccattttaaggaagaacagtgtgctccagcattaaatttggagatgaggaaaatactggatttacaagcacccatcatgagtttgcagtctgtgttggaagatctcctggttgctacttctgatggacttcttcatcttattcactgggaaggaatgacaaatggaaggaaagccattaatctttgcacagtacccttttcagtagacctgcagtcatctagagtaggttcattcctgggcttcacagacgtacacatcagagacatggaatactgtgccacacttgatgggtttgctgttgtatttaatgatggtaaagttggatttattacaccagtgtcaagtagatttactgcagagcagcttcatggagtttggccacaagatgttgttgacggaacgtgtgtagcagtaaataacaagtatcgactaatggcatttggctgtgtgagtggttctgtgcaggtctatacaatagataacagcactggagccatgctgctatctcataaattagagctaacagcaaaacagtatcctgacatttggaataaaacaggagctgttaaattgatgagatggtctcctgacaatagtgttgtaatagtgacctgggaatacggaggcctttctttatggagtgtttttggagcacagctgatttgtacacttggaggagattttgcttataggtctgatggcaccaaaaaagatccccttaagatcaactctatgagctggggtgcagaaggctatcacctatgggtaatcagcggatttggttctcaaaacactgaaattgagtctgacctcaggagtgtagttaaacagcccagcatcctgttatttcagtttattaagagtgtactcactgtaaacccttgtatgagtaaccaagagcaggtgttgcttcagggtgaggatcgcttgtacttgaactgtggagaggcttcacaaacccagaatcccaggagttcttcaacacactctgagcataagcccagtcgagaaaagagcccatttgcagatggaggtttagagtctcagggattaagcactttacttggacatcggcattggcatgttgtacagatttccagcacctatctagagagcaattggcctatacggttttcagctattgataagcttggacagaatattgctgtggttggcaagtttggttttgcacattactctttactcaccaaaaaatggaaactttttggaaacattacccaggagcaaaatatgatcgtgacaggtggcttagcctggtggaatgattttatggtccttgcgtgttataacataaatgaccgtcaagaagagcttagagtatacttgcgaacatcaaatctggacaatgcctttgctcatgtcaccaaagcacaagcagaaacattactgcttagtgtcttccaggacatggtaatagtatttagagcagactgttcaatatgcctttacagtattgaaagaaaatctgatggtccaaatactactgctggtattcaagttcttcaggaggtttccatgtcacgctacattcctcaccctttcctggtggtatctgtcactctgacatcagtgagtacagagaatggaatcaccttgaaaatgccacagcaggctcgtggtgcagagagcattatgttaaacctggcaggacagctcatcatgatgcagagggacaggtcaggcccacagatccgggagaaggacagtaaccctaataaccaaaggaaacttctgccattctgtcctcctgttgtactagcccagtctgttgaaaatgtctggacaacgtgtcgagcaaataaacagaaacgtcaccttctggaggccctctggctgagctgtggtggtgcagggatgaaagtttggctccctctcttccctagggatcaccgcaagccccattccttcttgtcccagcggatcatgctgcctttccacatcaacatttacccgctagctgttctgtttgaagatgctttagtccttggtgctgtcaatgacactttgctctatgattctttatatactcggaacaatgctagagaacagctggaggtgctcttccctttctgtgttgtggagagaacctctcagatctacctccaccacattctacgtcaacttctggtcagaaaccttggggagcaagccttgctcttggcccagtcctgtgccacattaccttacttccctcatgtgctggagctcatgctccatgaagtactggaagaagaagctacctcacgggagcccattcccgaccctctgcttcccactgtggcaaaatttatcactgagttccccctcttcctgcagacagttgtccattgtgccaggaagaccgaatatgccctgtggaattacctttttgcagctgttggaaaccctaaggacttgtttgaggagtgtttgatggctcaggatttggacacagctgcctcttaccttattatcttacagaatatggaagtccctgcagtaagtaggcaacatgctacccttctattcaacacagcactagaacaaggcaagtgggacctttgtcgacacatgattcgatttcttaaagccattggctctggagaatctgagacacctccatccacacccacagctcaggaacccagttcaagtggtggatttgagttcttcaggaatcgaagcatcagtttatcccagtcagctgaaaatgttcctgccagtaaattcagtttacagaaaacactaagtatgccatctggtccctctggaaaaagatggagcaaagacagtgactgtgctgagaacatgtatattgacatgatgctctggagacatgctcggcgcctcttagaagatgtgaggttaaaggaccttggctgctttgcagcccagctgggctttgaactaattagttggctatgcaaggaacgtacccgagccgcccgggtagacaactttgtaatagccctgaagagactccacaaagatttcctgtggccacttccaatcatcccagcctcttctatcagttctcctttcaaaaatggaaaataccgaactggtaatgtagacttcatgtcacttgtacaaggagaattgtattttactccgtgtatttacacattttgctattagttgatattcaaggaattattttcattccaaacttaggaatggataaaagccaactttttgtacatgagttggaatgcccactgtttgaccaaagatgtaaataaagtagaacctatgtctctaagtcttgtgaccttgaagtctaattcaaaaatctaatcatacttggattataaagaagttgagaactgcctgaatataaaagctaccatgcttatgttattgtgggaaggagttctggaatcagatagacatggacctcaaagtaagctgacagaactcattccaggggaacagtaaggccaccttctaaactaggagaggacaaactgaaagtgtatatt

SEQ ID NO: 177034 - DNA, 6658 bp, Homo sapiens
  Payload ID: 14739
  Gene Symbol: RIC1
  Gene Name: RIC1 homolog, RAB6A GEF complex partner 1
  Uniprot ID: Q4ADV7
  ENST ID: ENST00000418622
  CDS Start-End: 192-4352
gtcagcttgggggtgccttcgtcgcgcagccttgcgtcggcccggcccggccaggccagcgggcagatgccccgagctgccgccgccgccgccgccgactcggccggtggcggtgtgggaggtgggcgaccagcccggggccgctgagtgtgacggacgcaactgggggcgccgggggctccgcacggaccatgtattttctgagcggctggcccaagaggctgctgtgccctctggggagcccggccgaggcgcctttccacgttcagtccgacccgcagagggctttcttcgccgtgctggccgcggcccgcctcagcatctggtacagccgacctagtgtgttaattgtaacctacaaggagcctgcaaaatcatctactcagtttggatcctacaagcaagctgaatggaggccagatagtaccatgatagctgtatcaacggcaaatggatacatcttgttttttcatattacatctacaagaggggacaagtacctttatgaaccagtgtatcccaaaggaagtccacaaatgaaggggacaccccattttaaggaagaacagtgtgctccagcattaaatttggagatgaggaaaatactggatttacaagcacccatcatgagtttgcagtctgtgttggaagatctcctggttgctacttctgatggacttcttcatcttattcactgggaaggaatgacaaatggaaggaaagccattaatctttgcacagtacccttttcagtagacctgcagtcatctagagtaggttcattcctgggcttcacagacgtacacatcagagacatggaatactgtgccacacttgatgggtttgctgttgtatttaatgatggtaaagttggatttattacaccagtgtcaagtagatttactgcagagcagcttcatggagtttggccacaagatgttgttgacggaacgtgtgtagcagtaaataacaagtatcgactaatggcatttggctgtgtgagtggttctgtgcaggtctatacaatagataacagcactggagccatgctgctatctcataaattagagctaacagcaaaacagtatcctgacatttggaataaaacaggagctgttaaattgatgagatggtctcctgacaatagtgttgtaatagtgacctgggaatacggaggcctttctttatggagtgtttttggagcacagctgatttgtacacttggaggagattttgcttataggtctgatggcaccaaaaaagatccccttaagatcaactctatgagctggggtgcagaaggctatcacctatgggtaatcagcggatttggttctcaaaacactgaaattgagtctgacctcaggagtgtagttaaacagcccagcatcctgttatttcagtttattaagagtgtactcactgtaaacccttgtatgagtaaccaagagcaggtgttgcttcagggtgaggatcgcttgtacttgaactgtggagaggcttcacaaacccagaatcccaggagttcttcaacacactctgagcataagcccagtcgagaaaagagcccatttgcagatggaggtttagagtctcagggattaagcactttacttggacatcggcattggcatgttgtacagatttccagcacctatctagagagcaattggcctatacgggagcaaaatatgatcgtgacaggtggcttagcctggtggaatgattttatggtccttgcgtgttataacataaatgaccgtcaagaagagcttagagtatacttgcgaacatcaaatctggacaatgcctttgctcatgtcaccaaagcacaagcagaaacattactgcttagtgtcttccaggacatggtaatagtatttagagcagactgttcaatatgcctttacagtattgaaagaaaatctgatggtccaaatactactgctggtattcaagttcttcaggaggtttccatgtcacgctacattcctcaccctttcctggtggtatctgtcactctgacatcagtgagtacagagaatggaatcaccttgaaaatgccacagcaggctcgtggtgcagagagcattatgttaaacctggcaggacagctcatcatgatgcagagggacaggtcaggcccacagatccgggagaaggacagtaaccctaataaccaaaggaaacttctgccattctgtcctcctgttgtactagcccagtctgttgaaaatgtctggacaacgtgtcgagcaaataaacagaaacgtcaccttctggaggccctctggctgagctgtggtggtgcagggatgaaagtttggctccctctcttccctagggatcaccgcaagccccattccttcttgtcccagcggatcatgctgcctttccacatcaacatttacccgctagctgttctgtttgaagatgctttagtccttggtgctgtcaatgacactttgctctatgattctttatatactcggaacaatgctagagaacagctggaggtgctcttccctttctgtgttgtggagagaacctctcagatctacctccaccacattctacgtcaacttctggtcagaaaccttggggagcaagccttgctcttggcccagtcctgtgccacattaccttacttccctcatgtgctggagctcatgctccatgaagtactggaagaagaagctacctcacgggagcccattcccgaccctctgcttcccactgtggcaaaatttatcactgagttccccctcttcctgcagacagttgtccattgtgccaggaagaccgaatatgccctgtggaattacctttttgcagctgttggaaaccctaaggacttgtttgaggagtgtttgatggctcaggatttggacacagctgcctcttaccttattatcttacagaatatggaagtccctgcagtaagtaggcaacatgctacccttctattcaacacagcactagaacaaggcaagtgggacctttgtcgacacatgattcgatttcttaaagccattggctctggagaatctgagacacctccatccacacccacagctcaggaacccagttcaagtggtggatttgagttcttcaggaatcgaagcatcagtttatcccagtcagctgaaaatgttcctgccagtaaattcagtttacagaaaacactaagtatgccatctggtccctctggaaaaagatggagcaaagacagtgactgtgctgagaacatgtatattgacatgatgctctggagacatgctcggcgcctcttagaagatgtgaggttaaaggaccttggctgctttgcagcccagctgggctttgaactaattagttggctatgcaaggaacgtacccgagccgcccgggtagacaactttgtaatagccctgaagagactccacaaagatttcctgtggccacttccaatcatcccagcctcttctatcagttctcctttcaaaaatggaaaataccgaactgtgggagagcagctgttaaagtctcaatcagctgacccatttttgaaccttgagatggatgctggcatctccaacatccagcgaagtcagagctggctcagcaacattggccccacccatcatgagatagacacagcttcatcccatggaccacaaatgcaagatgccttcttgtcacctttatctaataaaggtgatgaatgcagtattggttcagccacagacttgactgaaagtagctccatggtggatggcgactggacaatggtggatgaaaatttctctacactcagtttaactcagtcagagctggagcacatttccatggagttggccagtaaagggcctcataaatcccaggtccagcttcggtatttgctacacattttcatggaggcagggtgcctagactggtgcatcgttataggcctgattcttagagaatcctcaataatcaatcagattttggttattacacagtcttcagaggtagatggagagatgttacagaacataaagacagggctccatgcagtggaccgatgggcctctacagactgtcctggatataagccatttttaaacatcattaagccacaactgcagaagctcagtgagataacagaagagcaggtccagccagatgccttccaaccaataactatgggtaagactccagaacagactagcccccgggcagaggagagcaggggctcctccagccatggaagcatcccccagggtgaagttggaagcagcaatatggtcagccggaaagaggaggacacagcccaagcagaggaggaagaaccttttcaggatgggacttacgactgttctgtgtcctaacagtgaggttccatcacaaaggggcagtattaattagcagcagcgtgcagctcagtacgttgtaacatagttggatgatttaacaggagaactcagttcagagactcttcggtaagtattagtagattttaactaattctttcttgtctaagaaatctttttgactccataaaaatgtgatataaagcatctttcataaaaaaattttaagctgcagtgaaaagtaaatattgtacagatgtacatgagaatattttggttttactcaaaggttggtagctcttaaaccacaggaattgttttgccccaggtgagcttactttttcactacttacatcttctcacatttcccggttctgcattatgtccagattgctttttaaaaaataaatgctaaggtgcttgctatagtctgtcaggtacttgagctacctgtttgctcccttggatacagctggactctttaatcagtcctcctgaatagattgctaccctggggcacaatatgtgccagtgtgatggaaacattctccttggctttactagccagtcaaatcccagtccagaattgatggaagctatttacctgtgagttaatgtgcttgttttagcaagcttgattcccattagaccaatgtgggcagaggtctgagggggttcttctcaattttgctgttagataccactaaactattttgtattaaagaacagtatctttttgtgaatactcttgtgtaaatatattcaaaggcactgttcatattttagggcttgtattataatttgcaaggttttaatgctggattctgcatgtctacacatacaaagacagggcttgctcctctgcaaaactgaggaagacaggtttattggcttggtcatgaagtaacagaaatggtcacactgatcatgaaatgcagcaagttttgtgcaaattaacatagtctcttatttattgcttttgtaaattgaataaagatggacttctatgtaaatagactgctgaatcctgtattaccacggctactaaaaattagtgtgtaaagaatgcattcttcattgtaaacttaaagtattttatgtacttctagaaatgacttaaatttgttttcatacattatgaaaacaactgcatactccttaattgctttaaacacccatccactgtatgtaattctaattaccttataacagtattaagacagcttgtttgtactgtgcaatttgaacaaggaatgcaatgttattttttacaaaaaacaaacttgtttatttttataataacgatgtatttgatgtggaccaaattcgtaccactatctaaaatagcctcttttctcatagtgcagttgtagtttagaaacaaaacttggtcctctctccttgctttttaaagtaaatggctagatttagttgtcttagccaggtttcctttgaagagaaactcaaaaccattttgaaactgcttagttcagaatacatcgaagtatttaaaattactgagttgggtaatttactatcatttactttttacattacaagtgcaataatatttcacaaaatgaaactcccgaatgggtggagtatgtgattattggtacctggtccttctggtgctatttttatttaagtctttgtttcaaaccacctttccctgaatcttaaagataatgttttgcatgtgagtacatgcagcccagcaagaaactaaactgaactctcttctcctatcctagtccattaaggagaagaaccagcattgcttttgtgtttggtgtgaatattcagtcaataaaaatgatttaccattataaagagctgtgatcttttcaagtatctgaaataaaacactgtgctgctgagttcatctcaaacattcttgaaagcagggcaccagtataagttaactgtattcctgtgggttaggccgtgaatgaatcatttcttttatacaatattcttttacaactaatagagataggaggcccccaggcaagaagtttggcaggtttacagaaaatttggtaatttatttgttatataccttaatttttaaaaacccatttttattgtggtgtttggttcacatatcaactgtttaagccataattttagccaatgaatttaaatattcagtataactatttgaggtttactagatgcatttattaataaattatttgctgaaaccaaaacaagtcattgggggtgtgggaataaaatcaacctttgcttgtaattaaagttgctgctatttctgtaatgtgtatttttctccccttggtaaagggcaataaaaccattac

SEQ ID NO: 177035 - DNA, 6774 bp, Homo sapiens
  Payload ID: 14739
  Gene Symbol: RIC1
  Gene Name: RIC1 homolog, RAB6A GEF complex partner 1
  Uniprot ID: Q4ADV7
  ENST ID: ENST00000414202
  CDS Start-End: 192-4463
gtcagcttgggggtgccttcgtcgcgcagccttgcgtcggcccggcccggccaggccagcgggcagatgccccgagctgccgccgccgccgccgccgactcggccggtggcggtgtgggaggtgggcgaccagcccggggccgctgagtgtgacggacgcaactgggggcgccgggggctccgcacggaccatgtattttctgagcggctggcccaagaggctgctgtgccctctggggagcccggccgaggcgcctttccacgttcagtccgacccgcagagggctttcttcgccgtgctggccgcggcccgcctcagcatctggtacagccgacctagtgtgttaattgtaacctacaaggagcctgcaaaatcatctactcagtttggatcctacaagcaagctgaatggaggccagatagtaccatgatagctgtatcaacggcaaatggatacatcttgttttttcatattacatctacaagaggggacaagtacctttatgaaccagtgtatcccaaaggaagtccacaaatgaaggggacaccccattttaaggaagaacagtgtgctccagcattaaatttggagatgaggaaaatactggatttacaagcacccatcatgagtttgcagtctgtgttggaagatctcctggttgctacttctgatggacttcttcatcttattcactgggaaggaatgacaaatggaaggaaagccattaatctttgcacagtacccttttcagtagacctgcagtcatctagagtaggttcattcctgggcttcacagacgtacacatcagagacatggaatactgtgccacacttgatgggtttgctgttgtatttaatgatggtaaagttggatttattacaccagtgtcaagtagatttactgcagagcagcttcatggagtttggccacaagatgttgttgacggaacgtgtgtagcagtaaataacaagtatcgactaatggcatttggctgtgtgagtggttctgtgcaggtctatacaatagataacagcactggagccatgctgctatctcataaattagagctaacagcaaaacagtatcctgacatttggaataaaacaggagctgttaaattgatgagatggtctcctgacaatagtgttgtaatagtgacctgggaatacggaggcctttctttatggagtgtttttggagcacagctgatttgtacacttggaggagattttgcttataggtctgatggcaccaaaaaagatccccttaagatcaactctatgagctggggtgcagaaggctatcacctatgggtaatcagcggatttggttctcaaaacactgaaattgagtctgacctcaggagtgtagttaaacagcccagcatcctgttatttcagtttattaagagtgtactcactgtaaacccttgtatgagtaaccaagagcaggtgttgcttcagggtgaggatcgcttgtacttgaactgtggagaggcttcacaaacccagaatcccaggagttcttcaacacactctgagcataagcccagtcgagaaaagagcccatttgcagatggaggtttagagtctcagggattaagcactttacttggacatcggcattggcatgttgtacagatttccagcacctatctagagagcaattggcctatacggttttcagctattgataagcttggacagaatattgctgtggttggcaagtttggttttgcacattactctttactcaccaaaaaatggaaactttttggaaacattacccaggagcaaaatatgatcgtgacaggtggcttagcctggtggaatgattttatggtccttgcgtgttataacataaatgaccgtcaagaagagcttagagtatacttgcgaacatcaaatctggacaatgcctttgctcatgtcaccaaagcacaagcagaaacattactgcttagtgtcttccaggacatggtaatagtatttagagcagactgttcaatatgcctttacagtattgaaagaaaatctgatggtccaaatactactgctggtattcaagttcttcaggaggtttccatgtcacgctacattcctcaccctttcctggtggtatctgtcactctgacatcagtgagtacagagaatggaatcaccttgaaaatgccacagcaggctcgtggtgcagagagcattatgttaaacctggcaggacagctcatcatgatgcagagggacaggtcaggcccacagatccgggagaaggacagtaaccctaataaccaaaggaaacttctgccattctgtcctcctgttgtactagcccagtctgttgaaaatgtctggacaacgtgtcgagcaaataaacagaaacgtcaccttctggaggccctctggctgagctgtggtggtgcagggatgaaagtttggctccctctcttccctagggatcaccgcaagccccattccttcttgtcccagcggatcatgctgcctttccacatcaacatttacccgctagctgttctgtttgaagatgctttagtccttggtgctgtcaatgacactttgctctatgattctttatatactcggaacaatgctagagaacagctggaggtgctcttccctttctgtgttgtggagagaacctctcagatctacctccaccacattctacgtcaacttctggtcagaaaccttggggagcaagccttgctcttggcccagtcctgtgccacattaccttacttccctcatgtgctggagctcatgctccatgaagtactggaagaagaagctacctcacgggagcccattcccgaccctctgcttcccactgtggcaaaatttatcactgagttccccctcttcctgcagacagttgtccattgtgccaggaagaccgaatatgccctgtggaattacctttttgcagctgttggaaaccctaaggacttgtttgaggagtgtttgatggctcaggatttggacacagctgcctcttaccttattatcttacagaatatggaagtccctgcagtaagtaggcaacatgctacccttctattcaacacagcactagaacaaggcaagtgggacctttgtcgacacatgattcgatttcttaaagccattggctctggagaatctgagacacctccatccacacccacagctcaggaacccagttcaagtggtggatttgagttcttcaggaatcgaagcatcagtttatcccagtcagctgaaaatgttcctgccagtaaattcagtttacagaaaacactaagtatgccatctggtccctctggaaaaagatggagcaaagacagtgactgtgctgagaacatgtatattgacatgatgctctggagacatgctcggcgcctcttagaagatgtgaggttaaaggaccttggctgctttgcagcccagctgggctttgaactaattagttggctatgcaaggaacgtacccgagccgcccgggtagacaactttgtaatagccctgaagagactccacaaagatttcctgtggccacttccaatcatcccagcctcttctatcagttctcctttcaaaaatggaaaataccgaactgtgggagagcagctgttaaagtctcaatcagctgacccatttttgaaccttgagatggatgctggcatctccaacatccagcgaagtcagagctggctcagcaacattggccccacccatcatgagatagacacagcttcatcccatggaccacaaatgcaagatgccttcttgtcacctttatctaataaaggtgatgaatgcagtattggttcagccacagacttgactgaaagtagctccatggtggatggcgactggacaatggtggatgaaaatttctctacactcagtttaactcagtcagagctggagcacatttccatggagttggccagtaaagggcctcataaatcccaggtccagcttcggtatttgctacacattttcatggaggcagggtgcctagactggtgcatcgttataggcctgattcttagagaatcctcaataatcaatcagattttggttattacacagtcttcagaggtagatggagagatgttacagaacataaagacagggctccatgcagtggaccgatgggcctctacagactgtcctggatataagccatttttaaacatcattaagccacaactgcagaagctcagtgagataacagaagagcaggtccagccagatgccttccaaccaataactatgggtaagactccagaacagactagcccccgggcagaggagagcaggggctcctccagccatggaagcatcccccagggtgaagttggaagcagcaatatggtcagccggaaagaggaggacacagcccaagcagaggaggaagaaccttttcaggatgggacttacgactgttctgtgtcctaacagtgaggttccatcacaaaggggcagtattaattagcagcagcgtgcagctcagtacgttgtaacatagttggatgatttaacaggagaactcagttcagagactcttcggtaagtattagtagattttaactaattctttcttgtctaagaaatctttttgactccataaaaatgtgatataaagcatctttcataaaaaaattttaagctgcagtgaaaagtaaatattgtacagatgtacatgagaatattttggttttactcaaaggttggtagctcttaaaccacaggaattgttttgccccaggtgagcttactttttcactacttacatcttctcacatttcccggttctgcattatgtccagattgctttttaaaaaataaatgctaaggtgcttgctatagtctgtcaggtacttgagctacctgtttgctcccttggatacagctggactctttaatcagtcctcctgaatagattgctaccctggggcacaatatgtgccagtgtgatggaaacattctccttggctttactagccagtcaaatcccagtccagaattgatggaagctatttacctgtgagttaatgtgcttgttttagcaagcttgattcccattagaccaatgtgggcagaggtctgagggggttcttctcaattttgctgttagataccactaaactattttgtattaaagaacagtatctttttgtgaatactcttgtgtaaatatattcaaaggcactgttcatattttagggcttgtattataatttgcaaggttttaatgctggattctgcatgtctacacatacaaagacagggcttgctcctctgcaaaactgaggaagacaggtttattggcttggtcatgaagtaacagaaatggtcacactgatcatgaaatgcagcaagttttgtgcaaattaacatagtctcttatttattgcttttgtaaattgaataaagatggacttctatgtaaatagactgctgaatcctgtattaccacggctactaaaaattagtgtgtaaagaatgcattcttcattgtaaacttaaagtattttatgtacttctagaaatgacttaaatttgttttcatacattatgaaaacaactgcatactccttaattgctttaaacacccatccactgtatgtaattctaattaccttataacagtattaagacagcttgtttgtactgtgcaatttgaacaaggaatgcaatgttattttttacaaaaaacaaacttgtttatttttataataacgatgtatttgatgtggaccaaattcgtaccactatctaaaatagcctcttttctcatagtgcagttgtagtttagaaacaaaacttggtcctctctccttgctttttaaagtaaatggctagatttagttgtcttagccaggtttcctttgaagagaaactcaaaaccattttgaaactgcttagttcagaatacatcgaagtatttaaaattactgagttgggtaatttactatcatttactttttacattacaagtgcaataatatttcacaaaatgaaactcccgaatgggtggagtatgtgattattggtacctggtccttctggtgctatttttatttaagtctttgtttcaaaccacctttccctgaatcttaaagataatgttttgcatgtgagtacatgcagcccagcaagaaactaaactgaactctcttctcctatcctagtccattaaggagaagaaccagcattgcttttgtgtttggtgtgaatattcagtcaataaaaatgatttaccattataaagagctgtgatcttttcaagtatctgaaataaaacactgtgctgctgagttcatctcaaacattcttgaaagcagggcaccagtataagttaactgtattcctgtgggttaggccgtgaatgaatcatttcttttatacaatattcttttacaactaatagagataggaggcccccaggcaagaagtttggcaggtttacagaaaatttggtaatttatttgttatataccttaatttttaaaaacccatttttattgtggtgtttggttcacatatcaactgtttaagccataattttagccaatgaatttaaatattcagtataactatttgaggtttactagatgcatttattaataaattatttgctgaaaccaaaacaagtcattgggggtgtgggaataaaatcaacctttgcttgtaattaaagttgctgctatttctgtaatgtgtatttttctccccttggtaaagggcaataaaaccattacacaaa

SEQ ID NO: 177036 - DNA, 564 bp, Homo sapiens
  Payload ID: 14739
  Gene Symbol: RIC1
  Gene Name: RIC1 homolog, RAB6A GEF complex partner 1
  ENST ID: ENST00000490816
  CDS Start-End: 1-444
catgagatagacacagcttcatcccatggaccacaaatgcaagatgccttcttgtcacctttatctaataaaggtgatgaatgcagtattggttcagccacagacttgactgaaagtagctccatggtggatggcgactggacaatggtggatgaaaatttctctacactcagtttaactcagtcagagctggagcacatttccatggagttggccagtaaagggcctcataaatcccaggtccagcttcggtatttgctacacattttcatggaggcagggtgcctagactggtgcatcgttataggcctgattcttagagaatcctcaataatcaatcagattttggttattacacagtcttcagaggtagatggagagatgttacagaacataaagacagggctccatgcagtggaccgatgggcctctacagactggtaagtgctgctttccttaggcttggtgtccttccatgtcttttggtgaatcctgtcctttcacattaaggcctagttatggttcatgtgttacattttatttatttattatatattatttatt

SEQ ID NO: 177037 - DNA, 3998 bp, Homo sapiens
  Payload ID: 14739
  Gene Symbol: RIC1
  Gene Name: RIC1 homolog, RAB6A GEF complex partner 1
  ENST ID: ENST00000545641
  CDS Start-End: 1-3946
tgaatggaggccagatagtaccatgatagctgtatcaacggcaaatggatacatcttgttttttcatattacatctacaagaggggacaagtacctttatgaaccagtgtatcccaaaggaagtccacaaatgaaggggacaccccattttaaggaagaacagtgtgctccagcattaaatttggagatgaggaaaatactggatttacaagcacccatcatgagtttgcagtctgtgttggaagatctcctggttgctacttctgatggacttcttcatcttattcactgggaaggaatgacaaatggaaggaaagccattaatctttgcacagtacccttttcagtagacctgcagtcatctagagtaggttcattcctgggcttcacagacgtacacatcagagacatggaatactgtgccacacttgatgggtttgctgttgtatttaatgatggtaaagttggatttattacaccagtgtcaagtagatttactgcagagcagcttcatggagtttggccacaagatgttgttgacggaacgtgtgtagcagtaaataacaagtatcgactaatggcatttggctgtgtgagtggttctgtgcaggtctatacaatagataacagcactggagccatgctgctatctcataaattagagctaacagcaaaacagtatcctgacatttggaataaaacaggagctgttaaattgatgagatggtctcctgacaatagtgttgtaatagtgacctgggaatacggaggcctttctttatggagtgtttttggagcacagctgatttgtacacttggaggagattttgcttataggtctgatggcaccaaaaaagatccccttaagatcaactctatgagctggggtgcagaaggctatcacctatgggtaatcagcggatttggttctcaaaacactgaaattgagtctgacctcaggagtgtagttaaacagcccagcatcctgttatttcagtttattaagagtgtactcactgtaaacccttgtatgagtaaccaagagcaggtgttgcttcagggtgaggatcgcttgtacttgaactgtggagaggcttcacaaacccagaatcccaggagttcttcaacacactctgagcataagcccagtcgagaaaagagcccatttgcagatggaggtttagagtctcagggattaagcactttacttggacatcggcattggcatgttgtacagatttccagcacctatctagagagcaattggcctatacgggagcaaaatatgatcgtgacaggtggcttagcctggtggaatgattttatggtccttgcgtgttataacataaatgaccgtcaagaagagcttagagtatacttgcgaacatcaaatctggacaatgcctttgctcatgtcaccaaagcacaagcagaaacattactgcttagtgtcttccaggacatggtaatagtatttagagcagactgttcaatatgcctttacagtattgaaagaaaatctgatggtccaaatactactgctggtattcaagttcttcaggaggtttccatgtcacgctacattcctcaccctttcctggtggtatctgtcactctgacatcagtgagtacagagaatggaatcaccttgaaaatgccacagcaggctcgtggtgcagagagcattatgttaaacctggcaggacagctcatcatgatgcagagggacaggtcaggcccacagatccgggagaaggacagtaaccctaataaccaaaggaaacttctgccattctgtcctcctgttgtactagcccagtctgttgaaaatgtctggacaacgtgtcgagcaaataaacagaaacgtcaccttctggaggccctctggctgagctgtggtggtgcagggatgaaagtttggctccctctcttccctagggatcaccgcaagccccattccttcttgtcccagcggatcatgctgcctttccacatcaacatttacccgctagctgttctgtttgaagatgctttagtccttggtgctgtcaatgacactttgctctatgattctttatatactcggaacaatgctagagaacagctggaggtgctcttccctttctgtgttgtggagagaacctctcagatctacctccaccacattctacgtcaacttctggtcagaaaccttggggagcaagccttgctcttggcccagtcctgtgccacattaccttacttccctcatgtgctggagctcatgctccatgaagtactggaagaagaagctacctcacgggagcccattcccgaccctctgcttcccactgtggcaaaatttatcactgagttccccctcttcctgcagacagttgtccattgtgccaggaagaccgaatatgccctgtggaattacctttttgcagctgttggaaaccctaaggacttgtttgaggagtgtttgatggctcaggatttggacacagctgcctcttaccttattatcttacagaatatggaagtccctgcagtaagtaggcaacatgctacccttctattcaacacagcactagaacaaggcaagtgggacctttgtcgacacatgattcgatttcttaaagccattggctctggagaatctgagacacctccatccacacccacagctcaggaacccagttcaagtggtggatttgagttcttcaggaatcgaagcatcagtttatcccagtcagctgaaaatgttcctgccagtaaattcagtttacagaaaacactaagtatgccatctggtccctctggaaaaagatggagcaaagacagtgactgtgctgagaacatgtatattgacatgatgctctggagacatgctcggcgcctcttagaagatgtgaggttaaaggaccttggctgctttgcagcccagctgggctttgaactaattagttggctatgcaaggaacgtacccgagccgcccgggtagacaactttgtaatagccctgaagagactccacaaagatttcctgtggccacttccaatcatcccagcctcttctatcagttctcctttcaaaaatggaaaataccgaactgtgggagagcagctgttaaagtctcaatcagctgacccatttttgaaccttgagatggatgctggcatctccaacatccagcgaagtcagagctggctcagcaacattggccccacccatcatgagatagacacagcttcatcccatggaccacaaatgcaagatgccttcttgtcacctttatctaataaaggtgatgaatgcagtattggttcagccacagacttgactgaaagtagctccatggtggatggcgactggacaatggtggatgaaaatttctctacactcagtttaactcagtcagagctggagcacatttccatggagttggccagtaaagggcctcataaatcccaggtccagcttcggtatttgctacacattttcatggaggcagggtgcctagactggtgcatcgttataggcctgattcttagagaatcctcaataatcaatcagattttggttattacacagtcttcagaggtagatggagagatgttacagaacataaagacagggctccatgcagtggaccgatgggcctctacagactgtcctggatataagccatttttaaacatcattaagccacaactgcagaagctcagtgagataacagaagagcaggtccagccagatgccttccaaccaataactatgggtaagactccagaacagactagcccccgggcagaggagagcaggggctcctccagccatggaagcatcccccagggtgaagttggaagcagcaatatggtcagccggaaagaggaggacacagcccaagcagaggaggaagaaccttttcaggatgggacttacgactgttctgtgtcctaacagtgaggttccatcacaaaggggcagtattaattagcagcagcgtgcagct

SEQ ID NO: 177038 - DNA, 2599 bp, Homo sapiens
  Payload ID: 14739
  Gene Symbol: RIC1
  Gene Name: RIC1 homolog, RAB6A GEF complex partner 1
  ENST ID: ENST00000545243
  CDS Start-End: 1-490
tgctgtcaatgacactttgctctatgattctttatatactcggaacaatgctagagaacagctggaggtgctcttccctttctgtgttgtggagagaacctctcagatctacctccaccacattctacgtcaacttctggtcagaaaccttggggagcaagccttgctcttggcccagtcctgtgccacattaccttacttccctcatgtgctggagctcatgctccatgaagtactggaagaagaagctacctcacgggagcccattcccgaccctctgcttcccactgtggcaaaatttatcactgagttccccctcttcctgcagacagttgtccattgtgccaggaagaccgaatatgccctgtggaattacctttttgcagctgttggaaaccctaaggacttgtttgaggagtgtttgatggctcaggatttggacacagctgcctcttaccttattatcttacagatggagcaaagacagtgactgtgctgagaacatgtatattgacatgatgctctggagacatgctcggcgcctcttagaagatgtgaggttaaaggaccttggctgctttgcagcccagctgggctttgaactaattagttggctatgcaaggaacgtacccgagccgcccgggtagacaactttgtaatagccctgaagagactccacaaagatttcctgtggccacttccaatcatcccagcctcttctatcagttctcctttcaaaaatggaaaataccgaactgtgggagagcagctgttaaagtctcaatcagctgacccatttttgaaccttgagatggatgctggcatctccaacatccagcgaagtcagagctggctcagcaacattggccccacccatcatgagatagacacagcttcatcccatggaccacaaatgcaagatgccttcttgtcacctttatctaataaaggtgatgaatgcagtattggttcagccacagacttgactgaaagtagctccatggtggatggcgactggacaatggtggatgaaaatttctctacactcagtttaactcagtcagagctggagcacatttccatggagttggccagtaaagggcctcataaatcccaggtccagcttcggtatttgctacacattttcatggaggcagggtgcctagactggtgcatcgttataggcctgattcttagagaatcctcaataatcaatcagattttggttattacacagtcttcagaggtagatggagagatgttacagaacataaagacagggctccatgcagtggaccgatgggcctctacagactgtcctggatataagccatttttaaacatcattaagccacaactgcagaagctcagtgagataacagaagagcaggtccagccagatgccttccaaccaataactatgggtaagactccagaacagactagcccccgggcagaggagagcaggggctcctccagccatggaagcatcccccagggtgaagttggaagcagcaatatggtcagccggaaagaggaggacacagcccaagcagaggaggaagaaccttttcaggatgggacttacgactgttctgtgtcctaacagtgaggttccatcacaaaggggcagtattaattagcagcagcgtgcagctcagtacgttgtaacatagttggatgatttaacaggagaactcagttcagagactcttcggtaagtattagtagattttaactaattctttcttgtctaagaaatctttttgactccataaaaatgtgatataaagcatctttcataaaaaaattttaagctgcagtgaaaagtaaatattgtacagatgtacatgagaatattttggttttactcaaaggttggtagctcttaaaccacaggaattgttttgccccaggtgagcttactttttcactacttacatcttctcacatttcccggttctgcattatgtccagattgctttttaaaaaataaatgctaaggtgcttgctatagtctgtcaggtacttgagctacctgtttgctcccttggatacagctggactctttaatcagtcctcctgaatagattgctaccctggggcacaatatgtgccagtgtgatggaaacattctccttggctttactagccagtcaaatcccagtccagaattgatggaagctatttacctgtgagttaatgtgcttgttttagcaagcttgattcccattagaccaatgtgggcagaggtctgagggggttcttctcaattttgctgttagataccactaaactattttgtattaaagaacagtatctttttgtgaatactcttgtgtaaatatattcaaaggcactgttcatattttagggcttgtattataatttgcaaggttttaatgctggattctgcatgtctacacatacaaagacagggcttgctcctctgcaaaactgaggaagacaggtttattggcttggtcatgaagtaacagaaatggtcacactgatcatgaaatgcagcaagttttgtgcaaattaacatagtctcttatttattgcttttgtaaattgaataaagatggacttctatgt

SEQ ID NO: 177039 - DNA, 2859 bp, Homo sapiens
  Payload ID: 14740
  Gene Symbol: RIC3
  Gene Name: RIC3 acetylcholine receptor chaperone
  Uniprot ID: Q7Z5B4
  ENST ID: ENST00000309737
  CDS Start-End: 1-1110
atggcgtactccacagtgcagagagtcgctctggcttctgggcttgtcctggctctgtcgctgctgctgcccaaggccttcctgtcccgcgggaagcggcaggagccgccgccgacacctgaaggaaaattgggccgatttccacctatgatgcatcatcaccaggcaccctcagatggccagactcctggggctcgtttccagaggtctcaccttgccgaggcatttgcaaaggccaaaggatcaggtggaggtgctggaggaggaggtagtggaagaggtctgatggggcagattattccaatctacggttttgggatttttttatatatactgtacattctatttaagctctcaaaggggaaaacaactgcagaggatgggaaatgctatactgccatgcctggaaacacccacaggaaaattaccagttttgagcttgctcaactgcaagaaaaactgaaggagacagaagcagccatggaaaaattaatcaacagagtgggacctaatggtgagagcagagcacagactgtgacttctgaccaagagaaacggttgctacatcagctccgagaaatcaccagggtcatgaaagaaggaaaattcattgacagattttctccagagaaagaagctgaggaggccccttacatggaggactgggaaggttaccctgaagagacttacccaatttatgacctttcagactgtatcaagcgtaggcaagaaacaatcttggtggattaccctgacccaaaagaactttctgctgaagaaatagctgaaagaatgggaatgatagaagaggaagaatcagatcatttgggttgggaaagtctgcccactgaccccagagcccaggaagataattctgttacctcgtgtgatccaaagccagaaacatgttcctgctgttttcatgaagacgaggatcctgctgtcttggcagagaatgctggattcagtgcagatagctaccctgagcaagaggaaaccaccaaagaagagtggtcccaagactttaaagatgaagggttgggcatcagcaccgataaagcatatacaggcagcatgctgaggaagcgtaacccccagggtttagagtgaaaacagccagtctgaagtatccattactcaagtcccaaggtgacctctctctcctcagatttccttcttggccctgtgccctgcactttcttcactgtgttcaagtgtcatagctatcaggccactatcatggatatcatgtatccttcctggtgctcacacacctgtcaccttgtaaaacacggacattagtgtgaacacaggacagcttcgctctttctcttcctgcctttcctctatcagagaagttgatccattaagtaattatgtttggtctattgtaattacagatgggaccactcaggggcaaaggtctgactcttcctggtaggtgtaacagatagttcacctgtgaacgaacatcagcttacagatgatgaggacttaaggttgcaagaatgaagatttcagactccaagatcccttattctttgggccttgagcaggttagtagtcccctggtgagaagagaacattttgtttgtggggctaatgggcccagaggagggtaagactctgctgtctaagctgaagcctcttcctcgcagcgagggtcttcctaggaacattgatgctgcctcagacatcctcttttctccagagtagggaagactcccactgatctgagaatgagcccagaggcttgtttggggactgttttactctgatactacctggatatctagcttcctttacccctgttctgcttaacagaactgccaagcccagaagtacctttgcactcctggttttcagtggacagaggaagctttagatagagactttagaccctgccctgcagagtcaagacttgaggccattgaagctgcaggaagccctgcccagggatggtcctgccatgaggaggctgcaaccctataagagggctcaagattgtgaattctgctcctgccatgaggagctcagaaggccaggaagccagcaataggggagagaatctgtgtgcttatggacagtccttacctaaagctgtttctgaatgttgcaccctttgagaaatttcttctcagaaccataaattgaaacaaatgaggactgatcttgtatacaaagtgccaactcaagagggaagttggagtatgtctgttgcagagaaccaatatagcagtgcccaggggtagagaccatgtgttccatactcggatatttgggtctttttgagagagctggggaaagtagcagcaactagattaagactgggaggattttgaccaaactaaaggccttttctccttactgcatctgacgtgtgtcttcttgagacaagatagcacccatgaattacatcatgaggtatgtgtgaattcagtttacatgtaagacctgagagttcgaagagggcacattcccaaagacattcccagtcatgaaatgtagaagactggaaaattaagacattatgtaaaggtagatatggcttttagagttacattatgcttggcatgaataaggtgccaggaaaacagtttaaaattatacatcagcatacagactgctgttagaaggtatgggatcatattaagataatctgtcagctactactaggcatttattgttaattgagttacagaaagtcattcaagactgagtttatagaaagcatattgcatctatctctgtgtagaacatttgattcacattgtgaagaatgcagtttaaaatatactgaatgcaatctagatgtattgtacacgaaaggtgaaaaataacaggtgctctttactgttt

SEQ ID NO: 177040 - DNA, 5223 bp, Homo sapiens
  Payload ID: 14740
  Gene Symbol: RIC3
  Gene Name: RIC3 acetylcholine receptor chaperone
  Uniprot ID: Q7Z5B4
  ENST ID: ENST00000335425
  CDS Start-End: 55-618
ggttccggttccggttccggctggcgtctgcacctgcgaccaccgtgagcagtcatggcgtactccacagtgcagagagtcgctctggcttctgggcttgtcctggctctgtcgctgctgctgcccaaggccttcctgtcccgcgggaagcggcaggagccgccgccgacacctgaaggttaccctgaagagacttacccaatttatgacctttcagactgtatcaagcgtaggcaagaaacaatcttggtggattaccctgacccaaaagaactttctgctgaagaaatagctgaaagaatgggaatgatagaagaggaagaatcagatcatttgggttgggaaagtctgcccactgaccccagagcccaggaagataattctgttacctcgtgtgatccaaagccagaaacatgttcctgctgttttcatgaagacgaggatcctgctgtcttggcagagaatgctggattcagtgcagatagctaccctgagcaagaggaaaccaccaaagaagagtggtcccaagactttaaagatgaagggttgggcatcagcaccgataaagcatatacaggcagcatgctgaggaagcgtaacccccagggtttagagtgaaaacagccagtctgaagtatccattactcaagtcccaaggtgacctctctctcctcagatttccttcttggccctgtgccctgcactttcttcactgtgttcaagtgtcatagctatcaggccactatcatggatatcatgtatccttcctggtgctcacacacctgtcaccttgtaaaacacggacattagtgtgaacacaggacagcttcgctctttctcttcctgcctttcctctatcagagaagttgatccattaagtaattatgtttggtctattgtaattacagatgggaccactcaggggcaaaggtctgactcttcctggtaggtgtaacagatagttcacctgtgaacgaacatcagcttacagatgatgaggacttaaggttgcaagaatgaagatttcagactccaagatcccttattctttgggccttgagcaggttagtagtcccctggtgagaagagaacattttgtttgtggggctaatgggcccagaggagggtaagactctgctgtctaagctgaagcctcttcctcgcagcgagggtcttcctaggaacattgatgctgcctcagacatcctcttttctccagagtagggaagactcccactgatctgagaatgagcccagaggcttgtttggggactgttttactctgatactacctggatatctagcttcctttacccctgttctgcttaacagaactgccaagcccagaagtacctttgcactcctggttttcagtggacagaggaagctttagatagagactttagaccctgccctgcagagtcaagacttgaggccattgaagctgcaggaagccctgcccagggatggtcctgccatgaggaggctgcaaccctataagagggctcaagattgtgaattctgctcctgccatgaggagctcagaaggccaggaagccagcaataggggagagaatctgtgtgcttatggacagtccttacctaaagctgtttctgaatgttgcaccctttgagaaatttcttctcagaaccataaattgaaacaaatgaggactgatcttgtatacaaagtgccaactcaagagggaagttggagtatgtctgttgcagagaaccaatatagcagtgcccaggggtagagaccatgtgttccatactcggatatttgggtctttttgagagagctggggaaagtagcagcaactagattaagactgggaggattttgaccaaactaaaggccttttctccttactgcatctgacgtgtgtcttcttgagacaagatagcacccatgaattacatcatgaggtatgtgtgaattcagtttacatgtaagacctgagagttcgaagagggcacattcccaaagacattcccagtcatgaaatgtagaagactggaaaattaagacattatgtaaaggtagatatggcttttagagttacattatgcttggcatgaataaggtgccaggaaaacagtttaaaattatacatcagcatacagactgctgttagaaggtatgggatcatattaagataatctgtcagctactactaggcatttattgttaattgagttacagaaagtcattcaagactgagtttatagaaagcatattgcatctatctctgtgtagaacatttgattcacattgtgaagaatgcagtttaaaatatactgaatgcaatctagatgtattgtacacgaaaggtgaaaaataacaggtgctctttactgtttagataaattgttttctgtgttatttcccttcgttcactgtgaggggttgattcatgaggagagccctgggttcctggctcaggtttacttttggccttaggataggattcccttattagagataaatactgctgttctcttctagctcattcattcatttagcagtcaattgctcagtgccaggtgctaggaacagaggctcaatctctaccctcagaaaactcagtgtgacgagagagagcctgacagataaaatgaactatgaccctgtaagagggctcaggatcgtgaatcctgcaggcagagaaacatgagccataatctgtccctgcattttctagctgtggaatcttgggtcagctccttaactggtctgagctttggcttcagggtagtaaagggaggggtattaaaggtcctggttaaatgaaatcatcagtgtgtgtaaaacagcattggttctagctcatacatgataaccactcattaagtggtaattatgtttttattataagggctatgctgtaattcagacatgggcccaaaactacaggaaagataaattgtttttgctaaagtattgccaagaaacttcacagtttcttgggaggtgggccttgaggcatgcaaagaacttcttcaggtaggcaaagaagagaggacactcttggcagaaagagttgttgaaaaaagcagtagggtgtgaaaatacatggatgttcaagtattttggtgaggctgttatgtaaagtgttgttggtctttggggaaaattggcttatggaaattcctgccagaagtactaagcccttatggtggttcttcctgccctagctcttggttggtttatatataaggaatatatttgtgtatttatatatcagacatttggatgtacctttcagttatttaggatttagaaaattctttttggattttccagaattattttatccttcggggatgacagttatatgtgtatatacaacccaggatgacaaaatcatgggtccggtttttgttgccagggctgctgtctcttttcttgcggtcttcatttctcacgagggtgctgggaacttgatcagtcccctggccttttggcactgtggcagagtacacaagtcatacctttatggacagttagctcacaaaacaactgcataatctgggatcactcttggtaaatcaggtgggtggtgcagccaggagatcccctttcctggtcacaacaggagcacaaagaaaccattatctccatgactagctccagaagctgggcccagggagtcgtgatgaggagtggaggtgtatttggcctgtagaatcaacggcctttgagaaccatacaatgcaccttatatggcttgggtgatcaaataacttaaggtccaaattcaaacactttggaaaaagggagctttaatataattatgccaaggtgataggcataaactaagactgtcctggacgtagggtcacccctgtctatagccatttaagatttttgaacctgatgactaaacaaacaaaaccctctttcctttttagaatatcctgtatgcgctatttcccaccagaggcagaggccacaggagataggccatggttcaggtaggaaatgctcttggtcacatcagaactctagatctgggggaataaacaaacccgaattattaccacactctcaaagttctcttcaatctggactatttgtattccaaagaaaaatttagtgctttagctattcagcaatattgagaaaaaacatgaacacatttatgactttgccttgaccattgacttttctaaaatgtgcttccttttcctttatttccctttttttatacaaagaaaatagcccaaatttctcctcttaggtcattccttaacctctcagagaaccagtttccccatgaattgggaataatgctctatttacagggctgtttggattaaataagatgctgtttataaagtgtctgtgccagggcaaagcatgtggtaggtgcttggtgacagcatgatccctgtcaccactctgtcaagtccagtgttgctgagatgtcacacctgacaccctctaaggctaccctgattgccaggagtggcccagggcccttctgcagtctccgggtgcctttagttataacctcttgtctgggtcagaccattagctttcatgtctgcttctagctacaactgtagcctcccttccttttgccttcaaatctgccacagctgcccggcaacaaaaaaagattcctaagcatctcgaggtcctgtttaaatgggttagggtccaagcaagccctgagacatcaagtggttgggtcttttatacctttttcatctctacagccctgttctcttcctaaggccaggcccacaggggatactgaggaaccaccagccccttcaggcggcacagcagaccctgaagagaactgctctaacttaagtaccttctgacttcaccatttttccagcctctgggtgtggttctgatgaaccttaaacttgaaaggcacaggccagaggaaggacagtgttgacccacatgtcattggtgaggttatgatctctttgctattatcacctacttacccacctgaggctcctaggaaacaatgaatgaaaggtatagaaaaaaattaggaagtaaacagggcttttttcccctttatgaaaaaagtacacagaagtgttgaaacgattcaagtttaatttgttgatatatgtgtgtacttagacaaacactaaattctacaacatacataatgtcaacatgggaaaataccaagtttgtcattgcacataccaataaataaatacatttgctccagaataccaaag

SEQ ID NO: 177041 - DNA, 2929 bp, Homo sapiens
  Payload ID: 14740
  Gene Symbol: RIC3
  Gene Name: RIC3 acetylcholine receptor chaperone
  Uniprot ID: Q7Z5B4
  ENST ID: ENST00000343202
  CDS Start-End: 67-1173
agcccgtgctccggttccggttccggttccggctggcgtctgcacctgcgaccaccgtgagcagtcatggcgtactccacagtgcagagagtcgctctggcttctgggcttgtcctggctctgtcgctgctgctgcccaaggccttcctgtcccgcgggaagcggcaggagccgccgccgacacctgaaggaaaattgggccgatttccacctatgatgcatcatcaccaggcaccctcagatggccagactcctggggctcgtttccagaggtctcaccttgccgaggcatttgcaaaggccaaaggatcaggtggaggtgctggaggaggaggtagtggaagaggtctgatggggcagattattccaatctacggttttgggatttttttatatatactgtacattctatttaagctctcaaaggggaaaacaactgcagaggatgggaaatgctatactgccatgcctggaaacacccacaggaaaattaccagttttgagcttgctcaactgcaagaaaaactgaaggagacagaagcagccatggaaaaattaatcaacagagtgggacctaatggtgagagagcacagactgtgacttctgaccaagagaaacggttgctacatcagctccgagaaatcaccagggtcatgaaagaaggaaaattcattgacagattttctccagagaaagaagctgaggaggccccttacatggaggactgggaaggttaccctgaagagacttacccaatttatgacctttcagactgtatcaagcgtaggcaagaaacaatcttggtggattaccctgacccaaaagaactttctgctgaagaaatagctgaaagaatgggaatgatagaagaggaagaatcagatcatttgggttgggaaagtctgcccactgaccccagagcccaggaagataattctgttacctcgtgtgatccaaagccagaaacatgttcctgctgttttcatgaagacgaggatcctgctgtcttggcagagaatgctggattcagtgcagatagctaccctgagcaagaggaaaccaccaaagaagagtggtcccaagactttaaagatgaagggttgggcatcagcaccgataaagcatatacaggcagcatgctgaggaagcgtaacccccagggtttagagtgaaaacagccagtctgaagtatccattactcaagtcccaaggtgacctctctctcctcagatttccttcttggccctgtgccctgcactttcttcactgtgttcaagtgtcatagctatcaggccactatcatggatatcatgtatccttcctggtgctcacacacctgtcaccttgtaaaacacggacattagtgtgaacacaggacagcttcgctctttctcttcctgcctttcctctatcagagaagttgatccattaagtaattatgtttggtctattgtaattacagatgggaccactcaggggcaaaggtctgactcttcctggtaggtgtaacagatagttcacctgtgaacgaacatcagcttacagatgatgaggacttaaggttgcaagaatgaagatttcagactccaagatcccttattctttgggccttgagcaggttagtagtcccctggtgagaagagaacattttgtttgtggggctaatgggcccagaggagggtaagactctgctgtctaagctgaagcctcttcctcgcagcgagggtcttcctaggaacattgatgctgcctcagacatcctcttttctccagagtagggaagactcccactgatctgagaatgagcccagaggcttgtttggggactgttttactctgatactacctggatatctagcttcctttacccctgttctgcttaacagaactgccaagcccagaagtacctttgcactcctggttttcagtggacagaggaagctttagatagagactttagaccctgccctgcagagtcaagacttgaggccattgaagctgcaggaagccctgcccagggatggtcctgccatgaggaggctgcaaccctataagagggctcaagattgtgaattctgctcctgccatgaggagctcagaaggccaggaagccagcaataggggagagaatctgtgtgcttatggacagtccttacctaaagctgtttctgaatgttgcaccctttgagaaatttcttctcagaaccataaattgaaacaaatgaggactgatcttgtatacaaagtgccaactcaagagggaagttggagtatgtctgttgcagagaaccaatatagcagtgcccaggggtagagaccatgtgttccatactcggatatttgggtctttttgagagagctggggaaagtagcagcaactagattaagactgggaggattttgaccaaactaaaggccttttctccttactgcatctgacgtgtgtcttcttgagacaagatagcacccatgaattacatcatgaggtatgtgtgaattcagtttacatgtaagacctgagagttcgaagagggcacattcccaaagacattcccagtcatgaaatgtagaagactggaaaattaagacattatgtaaaggtagatatggcttttagagttacattatgcttggcatgaataaggtgccaggaaaacagtttaaaattatacatcagcatacagactgctgttagaaggtatgggatcatattaagataatctgtcagctactactaggcatttattgttaattgagttacagaaagtcattcaagactgagtttatagaaagcatattgcatctatctctgtgtagaacatttgattcacattgtgaagaatgcagtttaaaatatactgaatgcaatctagatgtattgtacacgaaaggtgaaaaataacaggtgctctttactgtttagataaa

SEQ ID NO: 177042 - DNA, 867 bp, Homo sapiens
  Payload ID: 14740
  Gene Symbol: RIC3
  Gene Name: RIC3 acetylcholine receptor chaperone
  Uniprot ID: Q7Z5B4
  ENST ID: ENST00000425599
  CDS Start-End: 1-867
atggcgtactccacagtgcagagagtcgctctggcttctgggcttgtcctggctctgtcgctgctgctgcccaaggccttcctgtcccgcgggaagcggcaggagccgccgccgacacctgaaggaaaattgggccgatttccacctatgatgcatcatcaccaggcaccctcagatggccagactcctggggctcgtttccagaggtctcaccttgccgaggcatttgcaaaggccaaaggatcaggtggaggtgctggaggaggaggtagtggaagaggtctgatggggcagattattccaatctacggttttgggatttttttatatatactgtacattctatttaagctctcaaaggggaaaacaactgcagaggatgggaaatgctatactgccatgcctggaaacacccacaggaaaattagttaccctgaagagacttacccaatttatgacctttcagactgtatcaagcgtaggcaagaaacaatcttggtggattaccctgacccaaaagaactttctgctgaagaaatagctgaaagaatgggaatgatagaagaggaagaatcagatcatttgggttgggaaagtctgcccactgaccccagagcccaggaagataattctgttacctcgtgtgatccaaagccagaaacatgttcctgctgttttcatgaagacgaggatcctgctgtcttggcagagaatgctggattcagtgcagatagctaccctgagcaagaggaaaccaccaaagaagagtggtcccaagactttaaagatgaagggttgggcatcagcaccgataaagcatatacaggcagcatgctgaggaagcgtaacccccagggtttagagtga

SEQ ID NO: 177043 - DNA, 1300 bp, Homo sapiens
  Payload ID: 14740
  Gene Symbol: RIC3
  Gene Name: RIC3 acetylcholine receptor chaperone
  Uniprot ID: Q7Z5B4
  ENST ID: ENST00000419822
  CDS Start-End: 37-423
ggctggcgtctgcacctgcgaccaccgtgagcagtcatggcgtactccacagtgcagagagtcgctctggcttctgggcttgtcctggctctgtcgctgctgctgcccaaggccttcctgtcccgcgggaagcggcaggagccgccgccgacacctgaaggaaaattgggccgatttccacctatgatgcatcatcaccaggcaccctcagatggccagactcctggggctcgtttccagaggtctcaccttgccgaggcatttgcaaaggccaaaggatcaggtggaggtgctggaggaggaggtagtggaagaggtctgatggggcagattattccaatctacggttttgggatttttttatatatactgtacattctatttaaggtaagtagaatcatcctaatcatattacatcaatgaaaatctaatatggcaataaaaatcattgtctacattaaaacttcttatagttcataaaattatttcaaatccatcatctctttaaatcctgcctcctcttcatgaggtacttaggatagccattatttcagtttcacataagaaatgtttactcaatgtttaagtgttttgccccaaaattcacaactaacaaggcagaactaggacttgaacatggatcttttggttcttaatccagtgagtgatacaattcaatgcactcccctgccaaaaaaaaaaaaaaaaaaaaaaaaattaacatctttacaggccgaaaaggaataaagattttctaagaagagcttttattattgggattggcacagtgatttccaaatagccattgtaaggccaaataatgacaccactttatcctgcttgtttctccacaggaatttgagatgctgtttttaatattatctccaataattctcctgagacagaactgtccctcctgaaattaagcctgatatttcctagctctggggagacatgggtgtaggttctttaaagcagacccccagttgagttccacctccaggcaggcctttgcaggcccctggcccctgtactgtgaattagaggcagaagactcactttgccctcctgtctagagtaagcttaaataagatgagttctttctcgcccaggaattctgcaggcagtctgagttgagtctgtaagaatgcccatagggtgccacacatcccttttagatgagcatgagcaaggaagatgacctgtagggagattttttttcccttgtgttagaaatgcttgttctctggtgccataaagaagcagcacttggacgtacatttaatttcctcagcaaggc

SEQ ID NO: 177044 - DNA, 1017 bp, Homo sapiens
  Payload ID: 14740
  Gene Symbol: RIC3
  Gene Name: RIC3 acetylcholine receptor chaperone
  ENST ID: ENST00000531450
  CDS Start-End: 33-1017
ggcgtctgcacctgcgaccaccgtgagcagtcatggcgtactccacagtgcagagagtcgctctggcttctgggcttgtcctggctctgtcgctgctgctgcccaaggccttcctgtcccgcgggaagcggcaggagccgccgccgacacctgaaggaaaattgggccgatttccacctatgatgcatcatcaccaggcaccctcagatggccagactcctggggctcgtttccagaggtctcaccttgccgaggcatttgcaaaggccaaaggatcaggtggaggtgctggaggaggaggtagtggaagaggtctgatggggcagattattccaatctacggttttgggatttttttatatatactgtacattctatttaagctctcaaaggggaaaacaactgcagaggatgggaaatgctatactgccatgcctggaaacacccacaggaaaattaccagttttgagcttgctcaactgcaagaaaaactgaaggagacagaagcagccatggaaaaattaatcaacagagtgggacctaatggtgagagtacccagacagaccatagtgatgtttacgtccattgcctaggagtatttaccactaaatggttggattgtctgatatttctaagcagagcacagactgtgacttctgaccaagagaaacggttgctacatcagctccgagaaatcaccagggtcatgaaagaaggaaaattcattgacagattttctccagagaaagaagctgaggaggccccttacatggaggactgggaaggttaccctgaagagacttacccaatttatgacctttcagactgtatcaagcgtaggcaagaaacaatcttggtggattaccctgacccaaaagaactttctgctgaagaaatagctgaaagaatgggaatgatagaagaggaagaatcagatcatttgggttgggaaagtctgcccactgaccccagagcccaggaagataattctgttacctcgtgtgatccaaagccag

SEQ ID NO: 177045 - DNA, 2023 bp, Homo sapiens
  Payload ID: 14740
  Gene Symbol: RIC3
  Gene Name: RIC3 acetylcholine receptor chaperone
  ENST ID: ENST00000526962
  CDS Start-End: 52-189
tccggttccggttccggctggcgtctgcacctgcgaccaccgtgagcagtcatggcgtactccacagtgcagagagtcgctctggcttctgggcttgtcctggctctgtcgctgctgctgcccaaggccttcctgtcccgcgggaagcggcaggagccgccgccgacacctgaagagcacagactgtgacttctgaccaagagaaacggttgctacatcagctccgagaaatcaccagggtcatgaaagaaggaaaattcattgacagattttctccagagaaagaagctgaggaggccccttacatggaggactgggaaggttaccctgaagagacttacccaatttatgacctttcagactgtatcaagcgtaggcaagaaacaatcttggtggattaccctgacccaaaagaactttctgctgaagaaatagctgaaagaatgggaatgatagaagaggaagaatcagatcatttgggttgggaaagtctgcccactgaccccagagcccaggaagataattctgttacctcgtgtgatccaaagccagaaacatgttcctgctgttttcatgaagacgaggatcctgctgtcttggcagagaatgctggattcagtgcagatagctaccctgagcaagaggaaaccaccaaagaagagtggtcccaagactttaaagatgaagggttgggcatcagcaccgataaagcatatacaggcagcatgctgaggaagcgtaacccccagggtttagagtgaaaacagccagtctgaagtatccattactcaagtcccaaggtgacctctctctcctcagatttccttcttggccctgtgccctgcactttcttcactgtgttcaagtgtcatagctatcaggccactatcatggatatcatgtatccttcctggtgctcacacacctgtcaccttgtaaaacacggacattagtgtgaacacaggacagcttcgctctttctcttcctgcctttcctctatcagagaagttgatccattaagtaattatgtttggtctattgtaattacagatgggaccactcaggggcaaaggtctgactcttcctggtaggtgtaacagatagttcacctgtgaacgaacatcagcttacagatgatgaggacttaaggttgcaagaatgaagatttcagactccaagatcccttattctttgggccttgagcaggttagtagtcccctggtgagaagagaacattttgtttgtggggctaatgggcccagaggagggtaagactctgctgtctaagctgaagcctcttcctcgcagcgagggtcttcctaggaacattgatgctgcctcagacatcctcttttctccagagtagggaagactcccactgatctgagaatgagcccagaggcttgtttggggactgttttactctgatactacctggatatctagcttcctttacccctgttctgcttaacagaactgccaagcccagaagtacctttgcactcctggttttcagtggacagaggaagctttagatagagactttagaccctgccctgcagagtcaagacttgaggccattgaagctgcaggaagccctgcccagggatggtcctgccatgaggaggctgcaaccctataagagggctcaagattgtgaattctgctcctgccatgaggagctcagaaggccaggaagccagcaataggggagagaatctgtgtgcttatggacagtccttacctaaagctgtttctgaatgttgcaccctttgagaaatttcttctcagaaccataaattgaaacaaatgaggactgatcttgtatacaaagtgccaactcaagagggaagttggagtatgtctgttgcagagaaccaatatagcagtgcccaggggtagagaccatgtgttccatactcggatatttgggtctttttgagagagctggggaaagtagcagcaactagattaagactgggaggattttgaccaaactaaaggccttttctccttactgca

SEQ ID NO: 177046 - DNA, 1211 bp, Homo sapiens
  Payload ID: 14740
  Gene Symbol: RIC3
  Gene Name: RIC3 acetylcholine receptor chaperone
  ENST ID: ENST00000528463
  CDS Start-End: 20-151
gcgaccaccgtgagcagtcatggcgtactccacagtgcagagagtcgctctggcttctgggcttgtcctggctctgtcgctgctgctgcccaaggccttcctgtcccgcgggaagcggcaggagccgccgccgacacctgaagaaaactaagagtgagaactgacaaaaagccattggatttgacggttaaggaaaattgggccgatttccacctatgatgcatcatcaccaggcaccctcagatggccagactcctggggctcgtttccagaggtctcaccttgccgaggcatttgcaaaggccaaaggatcaggtggaggtgctggaggaggaggtagtggaagaggtctgatggggcagattattccaatctacggttttgggatttttttatatatactgtacattctatttaagctctcaaaggggaaaacaactgcagaggatgggaaatgctatactgccatgcctggaaacacccacaggaaaattaccagttttgagcttgctcaactgcaagaaaaactgaaggagacagaagcagccatggaaaaattaatcaacagagtgggacctaatggtgagagcagagcacagactgtgacttctgaccaagagaaacggttgctacatcagctccgagaaatcaccagggtcatgaaagaaggaaaattcattgacagattttctccagagaaagaagctgaggaggccccttacatggaggactgggaaggttaccctgaagagacttacccaatttatgacctttcagactgtatcaagcgtaggcaagaaacaatcttggtggattaccctgacccaaaagaactttctgctgaagaaatagctgaaagaatgggaatgatagaagaggaagaatcagatcatttgggttgggaaagtctgcccactgaccccagagcccaggaagataattctgttacctcgtgtgatccaaagccagaaacatgttcctgctgttttcatgaagacgaggatcctgctgtcttggcagagaatgctggattcagtgcagatagctaccctgagcaagaggaaaccaccaaagaagagtggtcccaagactttaaagatgaagggttgggcatcagcaccgataaagcatatacaggcagcatgctgaggaagcgtaacccccagggtttagagtgaaaacagccagtctgaagtatccattactcaagt

SEQ ID NO: 177047 - DNA, 2702 bp, Homo sapiens
  Payload ID: 14741
  Gene Symbol: RIC8A
  Gene Name: RIC8 guanine nucleotide exchange factor A
  Uniprot ID: Q9NPQ8
  ENST ID: ENST00000325207
  CDS Start-End: 326-1939
gcagggcacggtgggggctgagatcgtttcctgttggaacttctggcccaagaagcgcgggtcacaaggagaggggtcagttcggttcagagcgactcagcccctcgactcgggtcttaaaacctccgagccgccagttctgcctcaggccgcgcccccttaaagcgccaccagacgctgcgccccgttaaagcgccaccagacgccgcgccccgtcccggcctcccccgcgcgctggcgcggggctttctgggccagggcggggccggcgaactgcggcccggaacggctgaggaagggcccgtcccgccttccccggcgcgccatggagccccgggcggttgcagaagccgtggagacgggtgaggaggatgtgattatggaagctctgcggtcatacaaccaggagcactcccagagcttcacgtttgatgatgcccaacaggaggaccggaagagactggcggagctgctggtctccgtcctggaacagggcttgccaccctcccaccgtgtcatctggctgcagagtgtccgaatcctgtcccgggaccgcaactgcctggacccgttcaccagccgccagagcctgcaggcactagcctgctatgctgacatctctgtctctgaggggtccgtcccagagtccgcagacatggatgttgtactggagtccctcaagtgcctgtgcaacctcgtgctcagcagccctgtggcacagatgctggcagcagaggcccgcctagtggtgaagctcacagagcgtgtggggctgtaccgtgagaggagcttcccccacgatgtccagttctttgacttgcggctcctcttcctgctaacggcactccgcaccgatgtgcgccagcagctgtttcaggagctgaaaggagtgcgcctgctaactgacacactggagctgacgctgggggtgactcctgaagggaaccccccacccacgctccttccttcccaagagactgagcgggccatggagatcctcaaagtgctcttcaacatcaccctggactccatcaagggggaggtggacgaggaagacgctgccctttaccgacacctggggacccttctccggcactgtgtgatgatcgctactgctggagaccgcacagaggagttccacggccacgcagtgaacctcctggggaacttgcccctcaagtgtctggatgttctcctcaccctggagccacatggagactccacggagttcatgggagtgaatatggatgtgattcgtgccctcctcatcttcctagagaagcgtttgcacaagacacacaggctgaaggagagtgtagctcccgtgctgagcgtgctgactgaatgtgcccggatgcaccgcccagccaggaagttcctgaaggcccagggatggccacctccccaggtgctgccccctctgcgggatgtgaggacacggcctgaggttggggagatgctgcggaacaagcttgtccgcctcatgacacacctggacacagatgtgaagagggtggctgccgagttcttgtttgtcctgtgctctgagagtgtgccccgattcatcaagtacacaggctatgggaatgctgctggccttctggctgccaggggcctcatggcaggaggccggcccgagggccagtactcagaggatgaggacacagacacagatgagtacaaggaagccaaagccagcataaaccctgtgaccgggagggtggaggagaagccgcctaaccctatggagggcatgacagaggagcagaaggagcacgaggccatgaagctggtgaccatgtttgacaagctctccaggaacagagtcatccagccaatggggatgagtccccggggtcatcttacgtccctgcaggatgccatgtgcgagactatggagcagcagctctcctcggaccctgactcggaccctgactgaggatggcagctcttctgctcccccatcaggactggtgctgcttccagagacttccttggggttgcaacctggggaagccacatcccactggatccacacccgcccccacttctccatcttagaaaccccttctcttgactcccgttctgttcatgatttgcctctggtccagtttctcatctctggactgcaacggtcttcttgtgctagaactcaggctcagcctcgaattccacagacgaagtactttcttttgtctgcgccaagaggaatgtgttcagaagctgctgcctgagggcagggcctacctgggcacacagaagagcatatgggagggcaggggtttgggtgtgggtgcacacaaagcaagcaccatctgggattggcacactggcagagccagtgtgttggggtatgtgctgcacttcccagggagaaaacctgtcagaactttccatacgagtatatcagaacacacccttccaaggtatgtatgctctgttgttcctgtcctgtcttcactgagcgcagggctggaggcctcttagacattctccttggtcctcgttcagctgcccactgtagtatccacagtgcccgagttctcgctggttttggcaattaaacctccttcctactggtttagactacacttacaacaaggaaaatgcccctcgtgtgaccatagattgagatttataccacataccacacatagccacagaaacatcatcttgaaataaagaagagttttggacaaaaa

SEQ ID NO: 177048 - DNA, 440 bp, Homo sapiens
  Payload ID: 14741
  Gene Symbol: RIC8A
  Gene Name: RIC8 guanine nucleotide exchange factor A
  ENST ID: ENST00000529275
  CDS Start-End: 1-440
atgctgctggccttctggctgccaggggcctcatggcaggaggccggcccgagggccagtactcagaggatgaggacacagacacagatgagtacaaggaagccaaagccagcataaaccctgtgaccgggagggtggaggagaagccgcctaaccctatggagggcatgacagaggagcagaaggagcacgaggccatgaagctggtgaccatgtttgacaagctctccaggatgccatgtgcgagactatggagcagcagctctcctcggaccctgactcggaccctgactgaggatggcagctcttctgctcccccatcaggactggtgctgcttccagagacttccttggggttgcaacctggggaagccacatcccactggatccacacccgcccccacttctccatcttagaaaccccttctcttgactcccgt

SEQ ID NO: 177049 - DNA, 3703 bp, Homo sapiens
  Payload ID: 14741
  Gene Symbol: RIC8A
  Gene Name: RIC8 guanine nucleotide exchange factor A
  Uniprot ID: Q9NPQ8
  ENST ID: ENST00000526104
  CDS Start-End: 1345-2940
gggtggggaactgccgggcgcggaagcgatgggcatatctgtggcttattttcagcactgtcgcgcagacagtggcgcgatctcagctcactgcagcccccgcctgccgggctcccaaggtgctgggattacagcagcaccgcggatgtgacgtttggtgttcctgtgaacgtggggcggggcggggccgtttgcttgctcagtgcctagacgatggtggtggaaagacgcttctgtgggttaggtcctaacggttaggaaggattcacaggcgggtcatgaggaaggagcagacccctcgggcagaagcccgcgaggagcactgggtgtggtgggggcaggggtgcctcctctgtcaagtggagatcggcgcctcgctcgtgcctgcgagtgcgcgccgcgtcgaatacagccgtacagaacgcactacaggaaagtgaagccgggagagagactgggaggcggcgcggggactgggggccgtagacgcctttgctcccgggcacttgttagaagagcgagtggatcgcgcttcctgtgcgtcactgaatcctcatgacggccactgaaacggacacgcaggatctttgcttttcaagagggaactgagtccaggccagactgggttgctcccctttctctcggcccctccacctttgcaagtgctgctccttctgcctggagtggctcctccagtcttttcccggctcacttcccaccgtccggtgtcagcaaaaacagcacttcctcacagcccgttgcagcccagcagtcgccttttgcttcttttgaagcacagccctgtgaccgcctcgtgtccttttgtttttccttgtcccccttcccctctggaacataagctccacaaaggcagggacctgggaatcccgttcgcctgcattccccagcaaacgcctaacgaacccaatggcccaggactgaaaattcctttccacttcggctttcccctctacatcccatcggttctgtggagctcgaggggcgtcactgtgtgtgtggcagggcacggtgggggctgagatcgtttcctgttggaacttctggcccaagaagcgcgggtcacaaggagaggggtcagttcggttcagagcgactcagcccctcgactcgggtcttaaaacctccgagccgccagttctgcctcaggccgcgcccccttaaagcgccaccagacgctgcgccccgttaaagcgccaccagacgccgcgccccgtcccggcctcccccgcgcgctggcgcggggctttctgggccagggcggggccggcgaactgcggcccggaacggctgaggaagggcccgtcccgccttccccggcgcgccatggagccccgggcggttgcagaagccgtggagacgggtgaggaggatgtgattatggaagctctgcggtcatacaaccaggagcactcccagagcttcacgtttgatgatgcccaacaggaggaccggaagagactggcggagctgctggtctccgtcctggaacagggcttgccaccctcccaccgtgtcatctggctgcagagtgtccgaatcctgtcccgggaccgcaactgcctggacccgttcaccagccgccagagcctgcaggcactagcctgctatgctgacatctctgtctctgaggggtccgtcccagagtccgcagacatggatgttgtactggagtccctcaagtgcctgtgcaacctcgtgctcagcagccctgtggcacagatgctggcagcagaggcccgcctagtggtgaagctcacagagcgtgtggggctgtaccgtgagaggagcttcccccacgatgtccagttctttgacttgcggctcctcttcctgctaacggcactccgcaccgatgtgcgccagcagctgtttcaggagctgaaaggagtgcgcctgctaactgacacactggagctgacgctgggggtgactcctgaagggaaccccccacccacgctccttccttcccaagagactgagcgggccatggagatcctcaaagtgctcttcaacatcaccctggactccatcaagggggaggtggacgaggaagacgctgccctttaccgacacctggggacccttctccggcactgtgtgatgatcgctactgctggagaccgcacagaggagttccacggccacgcagtgaacctcctggggaacttgcccctcaagtgtctggatgttctcctcaccctggagccacatggagactccacggagttcatgggagtgaatatggatgtgattcgtgccctcctcatcttcctagagaagcgtttgcacaagacacacaggctgaaggagagtgtagctcccgtgctgagcgtgctgactgaatgtgcccggatgcaccgcccagccaggaagttcctgaaggcccaggtgctgccccctctgcgggatgtgaggacacggcctgaggttggggagatgctgcggaacaagcttgtccgcctcatgacacacctggacacagatgtgaagagggtggctgccgagttcttgtttgtcctgtgctctgagagtgtgccccgattcatcaagtacacaggctatgggaatgctgctggccttctggctgccaggggcctcatggcaggaggccggcccgagggccagtactcagaggatgaggacacagacacagatgagtacaaggaagccaaagccagcataaaccctgtgaccgggagggtggaggagaagccgcctaaccctatggagggcatgacagaggagcagaaggagcacgaggccatgaagctggtgaccatgtttgacaagctctccaggaacagagtcatccagccaatggggatgagtccccggggtcatcttacgtccctgcaggatgccatgtgcgagactatggagcagcagctctcctcggaccctgactcggaccctgactgaggatggcagctcttctgctcccccatcaggactggtgctgcttccagagacttccttggggttgcaacctggggaagccacatcccactggatccacacccgcccccacttctccatcttagaaaccccttctcttgactcccgttctgttcatgatttgcctctggtccagtttctcatctctggactgcaacggtcttcttgtgctagaactcaggctcagcctcgaattccacagacgaagtactttcttttgtctgcgccaagaggaatgtgttcagaagctgctgcctgagggcagggcctacctgggcacacagaagagcatatgggagggcaggggtttgggtgtgggtgcacacaaagcaagcaccatctgggattggcacactggcagagccagtgtgttggggtatgtgctgcacttcccagggagaaaacctgtcagaactttccatacgagtatatcagaacacacccttccaaggtatgtatgctctgttgttcctgtcctgtcttcactgagcgcagggctggaggcctcttagacattctccttggtcctcgttcagctgcccactgtagtatccacagtgcccgagttctcgctggttttggcaattaaacctccttcctactggtttagactacacttacaacaaggaaaatgcccctcgtgtgaccatagattgagatttataccacataccacacatagccacagaaacatcatcttgaaataaagaagagttttggacaaaaa

SEQ ID NO: 177050 - DNA, 571 bp, Homo sapiens
  Payload ID: 14741
  Gene Symbol: RIC8A
  Gene Name: RIC8 guanine nucleotide exchange factor A
  ENST ID: ENST00000527468
  CDS Start-End: 438-571
gatgcagtgttgcggggagagtgggggtgcacccgttgggtggcaggcgtgtagggatgggggcgagtgccgaccctgccatccgttctgagcagtggctgctgcctgagttagaggccaataggccgcccgcatcagcggacgcggatcctacccctctgtggatttgaattcactagttctctctgcagcactcccagagcttcacgtttgatgatgcccaacaggaggaccggaagagactggcggagctgctggtctccgtcctggaacagggcttgccaccctcccaccgtgtcatctggctgcagagtgtccgaatcctgtcccgggaccgcaactgcctggacccgttcaccagccgccagagcctgcaggcactagcctgctatgctgacatctctgtctctgaggggtccgtcccagagtccgcagacatggatgttgtactggagtccctcaagtgcctgtgcaacctcgtgctcagcagccctgtggcacagatgctggcagcagaggcccgcctagtggtgaagctcacagagcgtgtggggctgtaccgtgagaggag

SEQ ID NO: 177051 - DNA, 563 bp, Homo sapiens
  Payload ID: 14741
  Gene Symbol: RIC8A
  Gene Name: RIC8 guanine nucleotide exchange factor A
  ENST ID: ENST00000530889
  CDS Start-End: 15-563
ttccccggcgcgccatggagccccgggcggttgcagaagccgtggagacgggtgaggaggatgtgattatggaagctctgcggtcatacaaccaggagttctctctgcagcactcccagagcttcacgtttgatgatgcccaacaggaggaccggaagagactggcggagctgctggtctccgtcctggaacagggcttgccaccctcccaccgtgtcatctggctgcagagtgtccgaatcctgtcccgggaccgcaactgcctggacccgttcaccagccgccagagcctgcaggcactagcctgctatgctgacatctctgtctctgaggggtccgtcccagagtccgcagacatggatgttgtactggagtccctcaagtgcctgtgcaacctcgtgctcagcagccctgtggcacagatgctggcagcagaggcccgcctagtggtgaagctcacagagcgtgtggggctgtaccgtgagaggagcttcccccacgatgtccagttctttgacttgcggctcctcttcctgctaacggcactccgcaccgatgtgcgc

SEQ ID NO: 177052 - DNA, 2565 bp, Homo sapiens
  Payload ID: 14741
  Gene Symbol: RIC8A
  Gene Name: RIC8 guanine nucleotide exchange factor A
  Uniprot ID: Q9NPQ8
  ENST ID: ENST00000527696
  CDS Start-End: 225-1802
ggcaggtctgggatgcagtgttgcggggagagtgggggtgcacccgttgggtggcaggcgtgtagggatgggggcgagtgccgaccctgccatccgttctgagcagtggctgctgcctgagttagaggccaataggccgcccgcatcagcggacgcggatcctacccctctgtggatttgaattcactagttctctctgcagcactcccagagcttcacgtttgatgatgcccaacaggaggaccggaaggtgggtgctggcccaaggggtaaaggggcagggacgggtggccccaggaagaagggcctggtggagccgctcttctccctgcccacagagactggcggagctgctggtctccgtcctggaacagggcttgccaccctcccaccgtgtcatctggctgcagagtgtccgaatcctgtcccgggaccgcaactgcctggacccgttcaccagccgccagagcctgcaggcactagcctgctatgctgacatctctgtctctgaggggtccgtcccagagtccgcagacatggatgttgtactggagtccctcaagtgcctgtgcaacctcgtgctcagcagccctgtggcacagatgctggcagcagaggcccgcctagtggtgaagctcacagagcgtgtggggctgtaccgtgagaggagcttcccccacgatgtccagttctttgacttgcggctcctcttcctgctaacggcactccgcaccgatgtgcgccagcagctgtttcaggagctgaaaggagtgcgcctgctaactgacacactggagctgacgctgggggtgactcctgaagggaaccccccacccacgctccttccttcccaagagactgagcgggccatggagatcctcaaagtgctcttcaacatcaccctggactccatcaagggggaggtggacgaggaagacgctgccctttaccgacacctggggacccttctccggcactgtgtgatgatcgctactgctggagaccgcacagaggagttccacggccacgcagtgaacctcctggggaacttgcccctcaagtgtctggatgttctcctcaccctggagccacatggagactccacggagttcatgggagtgaatatggatgtgattcgtgccctcctcatcttcctagagaagcgtttgcacaagacacacaggctgaaggagagtgtagctcccgtgctgagcgtgctgactgaatgtgcccggatgcaccgcccagccaggaagttcctgaaggcccaggtgctgccccctctgcgggatgtgaggacacggcctgaggttggggagatgctgcggaacaagcttgtccgcctcatgacacacctggacacagatgtgaagagggtggctgccgagttcttgtttgtcctgtgctctgagagtgtgccccgattcatcaagtacacaggctatgggaatgctgctggccttctggctgccaggggcctcatggcaggaggccggcccgagggccagtactcagaggatgaggacacagacacagatgagtacaaggaagccaaagccagcataaaccctgtgaccgggagggtggaggagaagccgcctaaccctatggagggcatgacagaggagcagaaggagcacgaggccatgaagctggtgaccatgtttgacaagctctccaggaacagagtcatccagccaatggggatgagtccccggggtcatcttacgtccctgcaggatgccatgtgcgagactatggagcagcagctctcctcggaccctgactcggaccctgactgaggatggcagctcttctgctcccccatcaggactggtgctgcttccagagacttccttggggttgcaacctggggaagccacatcccactggatccacacccgcccccacttctccatcttagaaaccccttctcttgactcccgttctgttcatgatttgcctctggtccagtttctcatctctggactgcaacggtcttcttgtgctagaactcaggctcagcctcgaattccacagacgaagtactttcttttgtctgcgccaagaggaatgtgttcagaagctgctgcctgagggcagggcctacctgggcacacagaagagcatatgggagggcaggggtttgggtgtgggtgcacacaaagcaagcaccatctgggattggcacactggcagagccagtgtgttggggtatgtgctgcacttcccagggagaaaacctgtcagaactttccatacgagtatatcagaacacacccttccaaggtatgtatgctctgttgttcctgtcctgtcttcactgagcgcagggctggaggcctcttagacattctccttggtcctcgttcagctgcccactgtagtatccacagtgcccgagttctcgctggttttggcaattaaacctccttcctactggtttagactacacttacaacaaggaaaatgcccctcgtgtgaccatagattgagatttataccacataccacacatagccacagaaacatcatcttgaaataaagaagagttttggacaaaaa

SEQ ID NO: 177053 - DNA, 649 bp, Homo sapiens
  Payload ID: 14741
  Gene Symbol: RIC8A
  Gene Name: RIC8 guanine nucleotide exchange factor A
  ENST ID: ENST00000524854
  CDS Start-End: 1-442
cgagttcttgtttgtcctgtgctctgagagtgtgccccgattcatcaagtacacaggctatgggaatgctgctggccttctggctgccaggggcctcatggcaggaggccggcccgagggccagtactcagaggatgaggacacagacacagatgagtacaaggaagccaaagccagcataaaccctgtgaccgggagggtggaggagaagccgcctaaccctatggagggcatgacagaggagcagaaggagcacgaggccatgaagctggtgaccatgtttgacaagctctccagccccactgcacctttccccaacaggaacagagtcatccagccaatggggatgagtccccggggtcatcttacgtccctgcaggatgccatgtgcgagactatggagcagcagctctcctcggaccctgactcggaccctgactgaggatggcagctcttctgctcccccatcaggactggtgctgcttccagagacttccttggggttgcaacctggggaagccacatcccactggatccacacccgcccccacttctccatcttagaaaccccttctcttgactcccgttctgttcatgatttgcctctggtccagtttctcatctctggactgcaacggtcttcttgtgc

SEQ ID NO: 177054 - DNA, 965 bp, Homo sapiens
  Payload ID: 14741
  Gene Symbol: RIC8A
  Gene Name: RIC8 guanine nucleotide exchange factor A
  ENST ID: ENST00000526982
  CDS Start-End: 56-214
gaactgcggcccggaacggctgaggaagggcccgtcccgccttccccggcgcgccatggagccccgggcggttgcagaagccgtggagacgggtgaggaggatgtgattatggaagctctgcggtcatacaaccaggagtggctgctgcctgagttagaggccaataggccgcccgcatcagcggacgcggatcctacccctctgtggatttgaattcactagttctctctgcagcactcccagagcttcacgtttgatgatgcccaacaggaggaccggaagagactggcggagctgctggtctccgtcctggaacagggcttgccaccctcccaccgtgtcatctggctgcagagtgtccgaatcctgtcccgggaccgcaactgcctggacccgttcaccagccgccagagcctgcaggcactagcctgctatgctgacatctctgtctctgaggggtccgtcccagagtccgcagacatggatgttgtactggagtccctcaagtgcctgtgcaacctcgtgctcagcagccctgtggcacagatgctggcagcagaggcccgcctagtggtgaagctcacagagcgtgtggggctgtaccgtgagaggagcttcccccacgatgtccagttctttgacttgcggctcctcttcctgctaacggcactccgcaccgatgtgcgccagcagctgtttcaggagctgaaaggagtgcgcctgctaactgacacactggagctgacgctgggggtgactcctgaagggaaccccccacccacgctccttccttcccaagagactgagcgggccatggagatcctcaaagtgctcttcaacatcaccctggactccatcaagggggaggtggacgagacgctgccctttaccgacacctggggacccttctccggcactgtgtgatgatcgctactgctggagaccgcacagaggagttccacgg

SEQ ID NO: 177055 - DNA, 859 bp, Homo sapiens
  Payload ID: 14741
  Gene Symbol: RIC8A
  Gene Name: RIC8 guanine nucleotide exchange factor A
  ENST ID: ENST00000527728
  CDS Start-End: 1-859
agtgcctgtgcaacctcgtgctcagcagccctgtggcacagatgctggcagcagaggcccgcctagtggtgaagctcacagagcgtgtggggctgtaccgtgagaggagcttcccccacgatgtccagttctttgacttgcggctcctcttcctgctaacggcactccgcaccgatgtgcgccagcagctgtttcaggagctgaaaggagtgcgcctgctaactgacacactggagctgacgctgggggtgactcctgaagggaaccccccacccacgctccttccttcccaagagactgagcgggccatggagatcctcaaagtgctcttcaacatcaccctggactccatcaagggggaggtggacgagcactacccagagtcacctaggaagaccccaggggaccaggaagacgctgccctttaccgacacctggggacccttctccggcactgtgtgatgatcgctactgctggagaccgcacagaggagttccacggccacgcagtgaacctcctggggaacttgcccctcaagtgtctggatgttctcctcaccctggagccacatggagactccacggagttcatgggagtgaatatggatgtgattcgtgccctcctcatcttcctagagaagcgtttgcacaagacacacaggctgaaggagagtgtagctcccgtgctgagcgtgctgactgaatgtgcccggatgcaccgcccagccaggaagttcctgaaggcccaggtgctgccccctctgcgggatgtgaggacacggcctgaggttggggagatgctgcggaacaagcttgtccgcctcatgacacacctggacacagatgtgaagagggtggc

SEQ ID NO: 177056 - DNA, 500 bp, Homo sapiens
  Payload ID: 14741
  Gene Symbol: RIC8A
  Gene Name: RIC8 guanine nucleotide exchange factor A
  ENST ID: ENST00000528357
  CDS Start-End: 56-500
gaactgcggcccggaacggctgaggaagggcccgtcccgccttccccggcgcgccatggagccccgggcggttgcagaagccgtggagacgggtgaggaggatgtgattatggaagctctgcggtcatacaaccaggagcactcccagagcttcacgtttgatgatgcccaacaggaggaccggaagagtgtccgaatcctgtcccgggaccgcaactgcctggacccgttcaccagccgccagagcctgcaggcactagcctgctatgctgacatctctgtctctgaggggtccgtcccagagtccgcagacatggatgttgtactggagtccctcaagtgcctgtgcaacctcgtgctcagcagccctgtggcacagatgctggcagcagaggcccgcctagtggtgaagctcacagagcgtgtggggctgtaccgtgagaggagcttcccccacgatgtccagttctttgacttgcggctcctcttcctgctaacgg

SEQ ID NO: 177057 - DNA, 159 bp, Homo sapiens
  Payload ID: 14741
  Gene Symbol: RIC8A
  Gene Name: RIC8 guanine nucleotide exchange factor A
  ENST ID: ENST00000626818
  CDS Start-End: 1-159
atggagccccgggcggttgcagaagccgtggagacgggtgaggaggatgtgattatggaagctctgcggtcatacaaccaggagtggctgctgcctgagttagaggccaataggccgcccgcatcagcggacgcggatcctacccctctgtggatttga

SEQ ID NO: 177058 - DNA, 3207 bp, Homo sapiens
  Payload ID: 14742
  Gene Symbol: RIC8B
  Gene Name: RIC8 guanine nucleotide exchange factor B
  Uniprot ID: Q9NVN3
  ENST ID: ENST00000355478
  CDS Start-End: 289-1779
gggggcgcgaggcgtttacctggaggcagcggcttgggcgcgcagagcggccgcggctcccccgcacctgcggccatggatgaggagcgcgccctctacatcgtccgggccggcgaagcaggggctatcgagcgggtcctgagggattacagcgacaagcatagggctactttcaaatttgaatcaacagatgaagataaaagaaaggcacccgaaatgtgagatttgatggagaacataaagctttgacattaaactagttatagcgttgacagaaaacagaagatcatgcttgccagtaaactctgtgaaggcatatttaaagtccttataaaggacatcccaacaacatgtcaagtgtcctgcctggaagtactccgcattctctccagagacaaaaaggttttagttcctgtgacaactaaggaaaatatgcagatactgctgcgactagccaagctaaatgagttagatgattctttggagaaagtatcagagttcccagttattgtggagtcattaaaatgtctgtgtaatatagtgttcaacagtcagatggcacagcagctcagcctggaacttaatcttgctgcaaagctctgtaacctcctgagaaagtgcaaggaccggaaatttatcaatgacattaagtgctttgacttgcgcttgctcttccttctgtcacttttgcacaccgacatcaggtcacaattgcgctatgagctccagggactaccgctgctaacgcagatcttggaaagtgcctttagcatcaagtggaccgatgagtatgaatcggccatagaccataatggacctcctctctcacctcaggagacagactgtgccattgaggccctcaaagctctcttcaatgtgacggtagacagttggaaggtgcataaagagagtgattctcatcagttccgtgtaatggcagctgtccttcgtcattgtttactaatcgtaggtccaactgaagacaaaacagaagagctacacagcaatgcagtcaaccttttaagcaatgttccagtctcttgtttggatgttctcatttgtccgttaacccatgaagaaacagcccaagaggcaacgactctagatgaactgcccagtaataaaacagctgagaaagaaacagttttgaaaaacaataccatggtatacaatggtatgaatatggaggccattcatgttttactgaattttatggagaagagaatagacaagggaagcagctatagagagggtctaactccagttctcagcttattaaccgaatgttcccgagcccatcgaaacatccgaaaatttctcaaagatcaggttttaccaccgttgagggatgtgacaaatcgacctgaagttggctcaactgtgagaaataagctggtgcgcctcatgacacatgttgaccttggagtcaagcaaattgctgctgaattcctttttgtcctttgcaaagagagagtggatagtctgctgaaatacactggctatgggaatgctgcaggactgttggcggccaggggcctcttggctggaggaagaggagataattggtactcagaggatgaggacacagacactgaagaatacaaaaatgcaaaaccaaacattaatcttatcactggtcatttagaggaaccaatgccaaaccccatagatgaaatgacagaagaacaaaaagaatatgaagccatgaaacttgtcaacatgcttgataaactttccaggagagcagatgtgaaggacctgcaccaggatggtggttagcaacagtggcccgtgccaaagcacttaccaaagtgatgatgactaagagaggagttgcttaaaccaatgggactaaaacctgatgggacaataacgcctttggaggaagcactcaaccagtactctgtcatcgaagagaccagctctgacacagactaaaagcatcacctgctcaactctcaatattgctttatcagcatcttttctctgtagctccaggggaatcttttctctaaaacatttatgcccttgctttggctagaaacacattaactggtttactcattgagaatccagcatatttaagaggtgaccctgtgttttttgtgatattgaggcattcatacagagctgcagttagacggggttacgggggctaaaagcagaaaaaaaattccatttcatcgggatggaactgaaggattttattctataaagcggccctggttgaatctggcaattctttttgccaagatccctagcagaagatttagccatgtccttcccctcacttgtgtgagtggccccttctgaatctctccagcagccagaggcacgtgagaagcagaaagagctggtaaataaagccttgggcaagcgacttcttagatcagaactcaccaaatggaagcctagcagctgctccataaacctagccccattcttcatatcaattttgtataaatatatagaaacacacacacagcctcagacttacaaactgattatactctaaaagtttgtatgtcagttagctaaaacttcagaatacatttctccctataaagagttataaatgatggtttagttctcaggcagctacaaatgcctatttattccctaatgtacctgaacactagtaccatagaactgaaccaccatctgtatcagcgcatggggagtgtgcattctgaggtctaacccggggtgccaggaacacacacatcctccatcccagcatagagaatggggactccctgagtaatgggagttctttcatggcctctgcttggggtgggggagtcagcagcacccatttgtacatataggtcattcatacatcacattttaaattggggactgtgtgtgctggtgtgtgtgtgagttctacgtttctaccatatgtgatcagtttaatagtaactttatttatttaaaaaaaagaaacacaattagttactgttaaactgataaagggtgtttatttttacttttagaattggtcctatgaagaagtagaaagtgagtcatgcactagacagtgggcctagctcatcagtggctaaagttgaaaaggggttggtttcctgtatatatatgtatgtatatacacacgtacatacattcatatatatacatatatacataatgtgcttaaccactgccttttaaaactttaaattaaataaaacattggggttgattcaa

SEQ ID NO: 177059 - DNA, 5135 bp, Homo sapiens
  Payload ID: 14742
  Gene Symbol: RIC8B
  Gene Name: RIC8 guanine nucleotide exchange factor B
  ENST ID: ENST00000392837
  CDS Start-End: 152-1834
cgggcggaggctggcgggttggaggcaggacggagggagggaaagagggaaggaaggaagctgggaaggagcgagcgggggcgcgaggcgtttacctggaggcagcggcttgggcgcgcagagcggccgcggctcccccgcacctgcggccatggatgaggagcgcgccctctacatcgtccgggccggcgaagcaggggctatcgagcgggtcctgagggattacagcgacaagcatagggctactttcaaatttgaatcaacagatgaagataaaagaaagaaactctgtgaaggcatatttaaagtccttataaaggacatcccaacaacatgtcaagtgtcctgcctggaagtactccgcattctctccagagacaaaaaggttttagttcctgtgacaactaaggaaaatatgcagatactgctgcgactagccaagctaaatgagttagatgattctttggagaaagtatcagagttcccagttattgtggagtcattaaaatgtctgtgtaatatagtgttcaacagtcagatggcacagcagctcagcctggaacttaatcttgctgcaaagctctgtaacctcctgagaaagtgcaaggaccggaaatttatcaatgacattaagtgctttgacttgcgcttgctcttccttctgtcacttttgcacaccgacatcaggtcacaattgcgctatgagctccagggactaccgctgctaacgcagatcttggaaagtgcctttagcatcaagtggaccgatgagtatgaatcggccatagaccataatggacctcctctctcacctcaggagacagactgtgccattgaggccctcaaagctctcttcaatgtgacggtagacagttggaaggtgcataaagagagtgattctcatcagttccgtgtaatggcagctgtccttcgtcattgtttactaatcgtaggtccaactgaagacaaaacagaagagctacacagcaatgcagtcaaccttttaagcaatgttccagtctcttgtttggatgttctcatttgtccgttaacccatgaagaaacagcccaagaggcaacgactctagatgaactgcccagtaataaaacagctgagaaagaaacagttttgaaaaacaataccatggtatacaatggtatgaatatggaggccattcatgttttactgaattttatggagaagagaatagacaagggaagcagctatagagagggtctaactccagttctcagcttattaaccgaatgttcccgagcccatcgaaacatccgaaaatttctcaaagatcaggttttaccaccgttgagggatgtgacaaatcgacctgaagttggctcaactgtgagaaataagctggtgcgcctcatgacacatgttgaccttggagtcaagcaaattgctgctgaattcctttttgtcctttgcaaagagagagtggatagtctgctgaaatacactggctatgggaatgctgcaggactgttggcggccaggggcctcttggctggaggaagaggagataattggtactcagaggatgaggacacagacactgaagaatacaaaaatgcaaaaccaaacattaatcttatcactggtcatttagaggaaccaatgccaaaccccatagatgaaatgacagaagaacaaaaagaatatgaagccatgaaacttgtcaacatgcttgataaactttccagagaggagttgcttaaaccaatgggactaaaacctgatgggacaataacgcctttggaggaagcactcaaccagtactctgtcatcgaagagaccagctctgacacagactaaaagcatcacctgctcaactctcaatattgctttatcagcatcttttctctgtagctccaggggaatcttttctctaaaacatttatgcccttgctttggctagaaacacattaactggtttactcattgagaatccagcatatttaagaggtgaccctgtgttttttgtgatattgaggcattcatacagagctgcagttagacggggttacgggggctaaaagcagaaaaaaaattccatttcatcgggatggaactgaaggattttattctataaagcggccctggttgaatctggcaattctttttgccaagatccctagcagaagatttagccatgtccttcccctcacttgtgtgagtggccccttctgaatctctccagcagccagaggcacgtgagaagcagaaagagctggtaaataaagccttgggcaagcgacttcttagatcagaactcaccaaatggaagcctagcagctgctccataaacctagccccattcttcatatcaattttgtataaatatatagaaacacacacacagcctcagacttacaaactgattatactctaaaagtttgtatgtcagttagctaaaacttcagaatacatttctccctataaagagttataaatgatggtttagttctcaggcagctacaaatgcctatttattccctaatgtacctgaacactagtaccatagaactgaaccaccatctgtatcagcgcatggggagtgtgcattctgaggtctaacccggggtgccaggaacacacacatcctccatcccagcatagagaatggggactccctgagtaatgggagttctttcatggcctctgcttggggtgggggagtcagcagcacccatttgtacatataggtcattcatacatcacattttaaattggggactgtgtgtgctggtgtgtgtgtgagttctacgtttctaccatatgtgatcagtttaatagtaactttatttatttaaaaaaaagaaacacaattagttactgttaaactgataaagggtgtttatttttacttttagaattggtcctatgaagaagtagaaagtgagtcatgcactagacagtgggcctagctcatcagtggctaaagttgaaaaggggttggtttcctgtatatatatgtatgtatatacacacgtacatacattcatatatatacatatatacataatgtgcttaaccactgccttttaaaactttaaattaaataaaacattggggttgattcaatttggccatctgtgtgtgtttctttatagatacatgggctaaacaatactatttcacagtttatgcttttttaaagtgcttttacatccatggtcccacttctaatagcctttttaaggacaggtagagtacatggagggttactgaaaaggtcatttatccagaagttacctctctggcaaagcaaaaaaatcaggaattacgtcttaaaggcctttcagctgccagaggagatgtcacaaagtttcttgcaacttacttatgggagagatcttcaagaatatcactcttagactctgaactgaaatttgcatacgcttccaacatgttttattagctggctttgaagctcacaaaagaatggcaaagaaagaggctgctagattgaaggcaggcatactgaaagaagaaaaaggccaactgaaaactagatagtgagatgagaagaataaaacttcaagacatagcaaatctgggactgtctacttaccaaaggatactctagttgacccagaaaatgtgtgtacaacagtatggcccgtagactacttcctataatggtgaccctgagtttttttaaaagaagaaattaaatccagaacgctttataaaagggtaggaagaagacaatagatgttagaatttcatccaaaatgtttgagggagaggtgagtgacccaggttttaaccaacagcaaaagaaatgggcaattcataattttagattaagtgaaaagtttagaaaaaatttaagtatttttgttattctacaaatgcatttttaaagtatttttataatttctataatcaaatagctttggcatgcatgtcagcttacctaaatgaagatgtgtttaatgaaatgccatcttaccagctttctttatgcagagtaagtgtttgaacagtcctgtttcagtagctgtgctcttctgctttcagtgagttctgtttcattttgcatttctctgcactgggcactaagctttgtttttgaaaagagagtttgcggggaagaagatgagagtgtcttcatctggcacacagaaagagaactaatatctgttaagtgcttactacatgctgggcttttgatgtatgttatctcatgtaacctcaccttatcgcatatgaaagatcctctccagaaagcttatgaaagttaccccacgtcacagcaaggaagagtccaactctggtggcctgactcccagcaccactccttccttttccccacagcacacctgggcccacactgtgcctccttagggctctgaaatgctgggaacagagtggtgtgaggagggtggtcattctcaggccattttaagcaataactatttcaacagaactagtttaaagaggtttttaagcagggaagtgacctgaagtggaagtatgagtgggaaacttgcatggtcagcactggatttccaatgaagacctggaatccgttaggataggccagggaccaaggctgcaggctggcctctctgcccacaactctcctgaccttggaagcagggtacggaggcgtgtgtcctaaaataaagcatttgagctgctgctacagaggaacaatcaccagatattgtgaccctttcagatgcccagtagtcctgggaggcaggcagggcaggtgttattatcccttctttataaatgaggacacagaatgaggcagtacaagtgactctaaacacccccttagtgccacatcagtctcgccacctcccaggactaggtgtcacctgtattgacctcttcccctctgattataaaagtaatatatgttcattgtggaaagtttggaaaatgcagaaaataaaattaataatttaccccaaatcccaccatcctgagatcatcactgttaatgttttagtgtatttccttcctgtattttttctatgcatatataatttattttactacaagattgggatcatgctgtatttacagatttgtatcctgctttctttaacatattgtgagcattttcccatgtcaataaatattcttcaaaaagtaa

SEQ ID NO: 177060 - DNA, 2440 bp, Homo sapiens
  Payload ID: 14742
  Gene Symbol: RIC8B
  Gene Name: RIC8 guanine nucleotide exchange factor B
  Uniprot ID: Q9NVN3
  ENST ID: ENST00000392839
  CDS Start-End: 107-1669
agggaaggaaggaagctgggaaggagcgagcgggggcgcgaggcgtttacctggaggcagcggcttgggcgcgcagagcggccgcggctcccccgcacctgcggccatggatgaggagcgcgccctctacatcgtccgggccggcgaagcaggggctatcgagcgggtcctgagggattacagcgacaagcatagggctactttcaaatttgaatcaacagatgaagataaaagaaagaaactctgtgaaggcatatttaaagtccttataaaggacatcccaacaacatgtcaagtgtcctgcctggaagtactccgcattctctccagagacaaaaaggttttagttcctgtgacaactaaggaaaatatgcagatactgctgcgactagccaagctaaatgagttagatgattctttggagaaagtatcagagttcccagttattgtggagtcattaaaatgtctgtgtaatatagtgttcaacagtcagatggcacagcagctcagcctggaacttaatcttgctgcaaagctctgtaacctcctgagaaagtgcaaggaccggaaatttatcaatgacattaagtgctttgacttgcgcttgctcttccttctgtcacttttgcacaccgacatcaggtcacaattgcgctatgagctccagggactaccgctgctaacgcagatcttggaaagtgcctttagcatcaagtggaccgatgagtatgaatcggccatagaccataatggacctcctctctcacctcaggagacagactgtgccattgaggccctcaaagctctcttcaatgtgacggtagacagttggaaggtgcataaagagagtgattctcatcagttccgtgtaatggcagctgtccttcgtcattgtttactaatcgtaggtccaactgaagacaaaacagaagagctacacagcaatgcagtcaaccttttaagcaatgttccagtctcttgtttggatgttctcatttgtccgttaacccatgaagaaacagcccaagaggcaacgactctagatgaactgcccagtaataaaacagctgagaaagaaacagttttgaaaaacaataccatggtatacaatggtatgaatatggaggccattcatgttttactgaattttatggagaagagaatagacaagggaagcagctatagagagggtctaactccagttctcagcttattaaccgaatgttcccgagcccatcgaaacatccgaaaatttctcaaagatcaggttttaccaccgttgagggatgtgacaaatcgacctgaagttggctcaactgtgagaaataagctggtgcgcctcatgacacatgttgaccttggagtcaagcaaattgctgctgaattcctttttgtcctttgcaaagagagagtggatagtctgctgaaatacactggctatgggaatgctgcaggactgttggcggccaggggcctcttggctggaggaagaggagataattggtactcagaggatgaggacacagacactgaagaatacaaaaatgcaaaaccaaaagaggagttgcttaaaccaatgggactaaaacctgatgggacaataacgcctttggaggaagcactcaaccagtactctgtcatcgaagagaccagctctgacacagactaaaagcatcacctgctcaactctcaatattgctttatcagcatcttttctctgtagctccaggggaatcttttctctaaaacatttatgcccttgctttggctagaaacacattaactggtttactcattgagaatccagcatatttaagaggtgaccctgtgttttttgtgatattgaggcattcatacagagctgcagttagacggggttacgggggctaaaagcagaaaaaaaattccatttcatcgggatggaactgaaggattttattctataaagcggccctggttgaatctggcaattctttttgccaagatccctagcagaagatttagccatgtccttcccctcacttgtgtgagtggccccttctgaatctctccagcagccagaggcacgtgagaagcagaaagagctggtaaataaagccttgggcaagcgacttcttagatcagaactcaccaaatggaagcctagcagctgctccataaacctagccccattcttcatatcaattttgtataaatatatagaaacacacacacagcctcagacttacaaactgattatactctaaaagtttgtatgtcagttagctaaaacttcagaatacatttctccctataaagagttataaatgatggtttagttctcaggcagctacaaatgcctatttattccctaatgtacctgaacactagtaccatagaactgaaccaccatctgtatcagcgcatggggagtgtgcattctgaggtctaacccggggtg

SEQ ID NO: 177061 - DNA, 3389 bp, Homo sapiens
  Payload ID: 14742
  Gene Symbol: RIC8B
  Gene Name: RIC8 guanine nucleotide exchange factor B
  Uniprot ID: Q9NVN3
  ENST ID: ENST00000462949
  CDS Start-End: 33-1643
agagcggccgcggctcccccgcacctgcggccatggatgaggagcgcgccctctacatcgtccgggccggcgaagcaggggctatcgagcgggtcctgagggattacagcgacaagcatagggctactttcaaatttgaatcaacagatgaagataaaagaaagaaactctgtgaaggcatatttaaagtccttataaaggacatcccaacaacatgtcaagtgtcctgcctggaagtactccgcattctctccagagacaaaaaggttttagttcctgtgacaactaaggaaaatatgcagatactgctgcgactagccaagctaaatgagttagatgattctttggagaaagtatcagagttcccagttattgtggagtcattaaaatgtctgtgtaatatagtgttcaacagtcagatggcacagcagctcagcctggaacttaatcttgctgcaaagctctgtaacctcctgagaaagtgcaaggaccggaaatttatcaatgacattaagtgctttgacttgcgcttgctcttccttctgtcacttttgcacaccgacatcaggtcacaattgcgctatgagctccagggactaccgctgctaacgcagatcttggaaagtgcctttagcatcaagtggaccgatgagtatgaatcggccatagaccataatggacctcctctctcacctcaggagacagactgtgccattgaggccctcaaagctctcttcaatgtgacggtagacagttggaaggtgcataaagagagtgattctcatcagttccgtgtaatggcagctgtccttcgtcattgtttactaatcgtaggtccaactgaagacaaaacagaagagctacacagcaatgcagtcaaccttttaagcaatgttccagtctcttgtttggatgttctcatttgtccgttaacccatgaagaaacagcccaagaggcaacgactctagatgaactgcccagtaataaaacagctgagaaagaaacagttttgaaaaacaataccatggtatacaatggtatgaatatggaggccattcatgttttactgaattttatggagaagagaatagacaagggaagcagctatagagagggtctaactccagttctcagcttattaaccgaatgttcccgagcccatcgaaacatccgaaaatttctcaaagatcaggttttaccaccgttgagggatgtgacaaatcgacctgaagttggctcaactgtgagaaataagctggtgcgcctcatgacacatgttgaccttggagtcaagcaaattgctgctgaattcctttttgtcctttgcaaagagagagtggatagtctgctgaaatacactggctatgggaatgctgcaggactgttggcggccaggggcctcttggctggaggaagaggagataattggtactcagaggatgaggacacagacactgaagaatacaaaaatgcaaaaccaaacattaatcttatcactggtcatttagaggaaccaatgccaaaccccatagatgaaatgacagaagaacaaaaagaatatgaagccatgaaacttgtcaacatgcttgataaactttccaggagagcagatgtgaaggacctgcaccaggatggtggttagcaacagtggcccgtgccaaagcacttaccaaagtgatgatgactaagaccctgtcattaattccatgtgtcaatactgccctgtagtacacagagcagacaagaaagaagagcccttgaaaacaagggaatgatttttgagtcgttatcaagctaagtggcaagcgggaagctgaaactcgtatagttgaacattcttggaggcttatctcttccctggccagatgcctgatcagatgagaagcccgccatgatactgtcacagtgcctagaatgggctctttatccagtagacaccactgtactttttgatacgagggcagtcttaacttgtgttaaggcctgtgtgtagcattgaagagaggagttgcttaaaccaatgggactaaaacctgatgggacaataacgcctttggaggaagcactcaaccagtactctgtcatcgaagagaccagctctgacacagactaaaagcatcacctgctcaactctcaatattgctttatcagcatcttttctctgtagctccaggggaatcttttctctaaaacatttatgcccttgctttggctagaaacacattaactggtttactcattgagaatccagcatatttaagaggtgaccctgtgttttttgtgatattgaggcattcatacagagctgcagttagacggggttacgggggctaaaagcagaaaaaaaattccatttcatcgggatggaactgaaggattttattctataaagcggccctggttgaatctggcaattctttttgccaagatccctagcagaagatttagccatgtccttcccctcacttgtgtgagtggccccttctgaatctctccagcagccagaggcacgtgagaagcagaaagagctggtaaataaagccttgggcaagcgacttcttagatcagaactcaccaaatggaagcctagcagctgctccataaacctagccccattcttcatatcaattttgtataaatatatagaaacacacacacagcctcagacttacaaactgattatactctaaaagtttgtatgtcagttagctaaaacttcagaatacatttctccctataaagagttataaatgatggtttagttctcaggcagctacaaatgcctatttattccctaatgtacctgaacactagtaccatagaactgaaccaccatctgtatcagcgcatggggagtgtgcattctgaggtctaacccggggtgccaggaacacacacatcctccatcccagcatagagaatggggactccctgagtaatgggagttctttcatggcctctgcttggggtgggggagtcagcagcacccatttgtacatataggtcattcatacatcacattttaaattggggactgtgtgtgctggtgtgtgtgtgagttctacgtttctaccatatgtgatcagtttaatagtaactttatttatttaaaaaaaagaaacacaattagttactgttaaactgataaagggtgtttatttttacttttagaattggtcctatgaagaagtagaaagtgagtcatgcactagacagtgggcctagctcatcagtggctaaagttgaaaaggggttggtttcctgtatatatatgtatgtatatacacacgtacatacattcatatatatacatatatacataatgtgcttaaccactgccttttaaaactttaaattaaataaaacattggggttgattcaatttggc

SEQ ID NO: 177062 - DNA, 3921 bp, Homo sapiens
  Payload ID: 14742
  Gene Symbol: RIC8B
  Gene Name: RIC8 guanine nucleotide exchange factor B
  Uniprot ID: Q9NVN3
  ENST ID: ENST00000470960
  CDS Start-End: 1170-1946
aaaatgaaaaaggctgactctaacaagtattggtgtccctgtagagcaactggtggggtataaattggtataagtactttgaaacactgttcagcagtacctggtaaagattgacatatggatataacctgtgagtcagcatctcctctctagggtgtatacctgtagatatcaaatgacatgtaaaaattgtgttcacatcagcacttttcaagatagccccaagctggaaacaatccaagtgtcatcaggagtacagcagataagtaaattgtggcatattcatacattggaatactatatagcagtgctttcttaacctacctgtaggtgaggaaccagatttttttccctaaaaatctgtcaggatgaaactcttgtgtaatacaatattacatacaacgccaaactgctcaaaagtttctaaatgttcacacataccttctgtactcatggtgttgcaggccagtgatgaacagggtggggaccagcagtggtacacaaacatacttcaaatagcactgctctcaaacaatgacaaagaacagactgcaactacacagagtagtgtgaatgaatctcacaagccaacacaagagtctgtattttatgattccatacgtgtaaagttcagtagcaaccaaaatactaacctgtgacattaacaagttagaattacccttgaggagcagaagatggtcatttgtagggggtatggaaagaattctgggattcttaatcttggcattgcatgatttttatgttggctatatgggtatgctcattttgtcaaaatttagctgtgtgcttatgatttgtgcacttttctgtatgtacattatacttaacatttacattaaaatttattgatgacctattaaacacacaccctctttcctcattaaggtagtagattagtggaggaaacaaagtgtatgcaagtaaacaaatgtgaaattacaaattatgatttcatgagagaaaaaagagtcttctcggagaagatactttagctgaaacctggagtatgcaaaggaaccagcgatgcaaagagcagaggcaaacaatccagggattttggtagttgttttgagtagagaaatagagctaatttagtggatttagagtaaaagaggacattgtagacatcgggtacaacttgggagttgatgttatcaaaactggaaaagagtgattctcatcagttccgtgtaatggcagctgtccttcgtcattgtttactaatcgtaggtccaactgaagacaaaacagaagagctacacagcaatgcagtcaaccttttaagcaatgttccagtctcttgtttggatgttctcatttgtccgttaacccatgaagaaacagcccaagaggcaacgactctagatgaactgcccagtaataaaacagctgagaaagaaacagttttgaaaaacaataccatggtatacaatggtatgaatatggaggccattcatgttttactgaattttatggagaagagaatagacaagggaagcagctatagagagggtctaactccagttctcagcttattaaccgaatgttcccgagcccatcgaaacatccgaaaatttctcaaagatcaggttttaccaccgttgagggatgtgacaaatcgacctgaagttggctcaactgtgagaaataagctggtgcgcctcatgacacatgttgaccttggagtcaagcaaattgctgctgaattcctttttgtcctttgcaaagagagagtggatagtctgctgaaatacactggctatgggaatgctgcaggactgttggcggccaggggcctcttggctggaggaagaggagataattggtactcagaggatgaggacacagacactgaagaatacaaaaatgcaaaaccaaactccattgaatttgaggagagaagccatctctcaagaggcaaataagcatgatctacatagttaatacatctaccttcccttatactttcttctaaggcctgattttctttgcttgggaagtgcattaatcttatcactggtcatttagaggaaccaatgccaaaccccatagatgaaatgacagaagaacaaaaagaatatgaagccatgaaacttgtcaacatgcttgataaactttccaggagagcagatgtgaaggacctgcaccaggatggtggttagcaacagtggcccgtgccaaagcacttaccaaagtgatgatgactaagaccctgtcattaattccatgtgtcaatactgccctgtagtacacagagcagacaagaaagaagagcccttgaaaacaagggaatgatttttgagtcgttatcaagctaagtggcaagcgggaagctgaaactcgtatagttgaacattcttggaggcttatctcttccctggccagatgcctgatcagatgagaagcccgccatgatactgtcacagtgcctagaatgggctctttatccagtagacaccactgtactttttgatacgagggcagtcttaacttgtgttaaggcctgtgtgtagcattgaagagaggagttgcttaaaccaatgggactaaaacctgatgggacaataacgcctttggaggaagcactcaaccagtactctgtcatcgaagagaccagctctgacacagactaaaagcatcacctgctcaactctcaatattgctttatcagcatcttttctctgtagctccaggggaatcttttctctaaaacatttatgcccttgctttggctagaaacacattaactggtttactcattgagaatccagcatatttaagaggtgaccctgtgttttttgtgatattgaggcattcatacagagctgcagttagacggggttacgggggctaaaagcagaaaaaaaattccatttcatcgggatggaactgaaggattttattctataaagcggccctggttgaatctggcaattctttttgccaagatccctagcagaagatttagccatgtccttcccctcacttgtgtgagtggccccttctgaatctctccagcagccagaggcacgtgagaagcagaaagagctggtaaataaagccttgggcaagcgacttcttagatcagaactcaccaaatggaagcctagcagctgctccataaacctagccccattcttcatatcaattttgtataaatatatagaaacacacacacagcctcagacttacaaactgattatactctaaaagtttgtatgtcagttagctaaaacttcagaatacatttctccctataaagagttataaatgatggtttagttctcaggcagctacaaatgcctatttattccctaatgtacctgaacactagtaccatagaactgaaccaccatctgtatcagcgcatggggagtgtgcattctgaggtctaacccggggtgccaggaacacacacatcctccatcccagcatagagaatggggactccctgagtaatgggagttctttcatggcctctgcttggggtgggggagtcagcagcacccatttgtacatataggtcattcatacatcacattttaaattggggactgtgtgtgctggtgtgtgtgtgagttctacgtttctaccatatgtgatcagtttaatagtaactttatttatttaaaaaaaagaaacacaattagttactgttaaactgataaagggtgtttatttttacttttagaattggtcctatgaagaagtagaaagtgagtcatgcactagacagtgggcctagctcatcagtggctaaagttgaaaaggggttggtttcctgtatatatatgtatgtatatacacacgtacatacattcatatatatacatatatacataatgtgcttaaccactgccttttaaaactttaaattaaataaaacattggggttgattc

SEQ ID NO: 177063 - DNA, 829 bp, Homo sapiens
  Payload ID: 14742
  Gene Symbol: RIC8B
  Gene Name: RIC8 guanine nucleotide exchange factor B
  ENST ID: ENST00000548914
  CDS Start-End: 1-829
gagcgagcgggggcgcgaggcgtttacctggaggcagcggcttgggcgcgcagagcggccgcggctcccccgcacctgcggccatggatgaggagcgcgccctctacatcgtccgggccggcgaagcaggggctatcgagcgggtcctgagggattacagcgacaagcatagggctactttcaaatttgaatcaacagatgaagataaaagaaagagtgattctcatcagttccgtgtaatggcagctgtccttcgtcattgtttactaatcgtaggtccaactgaagacaaaacagaagagctacacagcaatgcagtcaaccttttaagcaatgttccagtctcttgtttggatgttctcatttgtccgttaacccatgaagaaacagcccaagaggcaacgactctagatgaactgcccagtaataaaacagctgagaaagaaacagttttgaaaaacaataccatggtatacaatggtatgaatatggaggccattcatgttttactgaattttatggagaagagaatagacaagggaagcagctatagagagggtctaactccagttctcagcttattaaccgaatgttcccgagcccatcgaaacatccgaaaatttctcaaagatcaggttttaccaccgttgagggatgtgacaaatcgacctgaagttggctcaactgtgagaaataagctggtgcgcctcatgacacatgttgaccttggagtcaagcaaattgctgctgaattcctttttgtcctttgcaaagagagagtggatagtctgctgaaatacactggctatgggaatgctgcaggactgtt

SEQ ID NO: 177064 - DNA, 534 bp, Homo sapiens
  Payload ID: 14742
  Gene Symbol: RIC8B
  Gene Name: RIC8 guanine nucleotide exchange factor B
  ENST ID: ENST00000550215
  CDS Start-End: 126-251
aggacggagggagggaaagagggaaggaaggaagctgggaaggagcgagcgggggcgcgaggcgtttacctggaggcagcggcttgggcgcgcagagcggccgcggctcccccgcacctgcggccatggatgaggagcgcgccctctacatcgtccgggccggcgaagcaggggctatcgagcgggtcctgagggattacagcgacaagagtgtttatagggtagatggtatcatcctccccattttatagatgaggaaaccgaggtgcaaagagctgaaatcacgcccaaggtcatggacatataatgttcatagggctactttcaaatttgaatcaacagatgaagataaaagaaagaaactctgtgaaggcatatttaaagtccttataaaggacatcccaacaacatgtcaagtgtcctgcctggaagtactccgcattctctccagagacaaaaaggttttagttcctgtgacaactaaggaaaatatgcagatactgctgcgactagccaagctaaatgagttagatg

SEQ ID NO: 177065 - DNA, 419 bp, Homo sapiens
  Payload ID: 14742
  Gene Symbol: RIC8B
  Gene Name: RIC8 guanine nucleotide exchange factor B
  ENST ID: ENST00000552619
  CDS Start-End: 65-419
gcgtttacctggaggcagcggcttgggcgcgcagagcggccgcggctcccccgcacctgcggccatggatgaggagcgcgccctctacatcgtccgggccggcgaagcaggggctatcgagcgggtcctgagggattacagcgacaagaaactctgtgaaggcatatttaaagtccttataaaggacatcccaacaacatgtcaagtgtcctgcctggaagtactccgcattctctccagagacaaaaaggttttagttcctgtgacaactaaggaaaatatgcagatactgctgcgactagccaagctaaatgagttagatgattctttggagaaagtatcagagttcccagttattgtggagtcattaaaatgtctgtgtaatatagtgttcaacagtcagatggcacagcagctca

SEQ ID NO: 177066 - DNA, 571 bp, Homo sapiens
  Payload ID: 14742
  Gene Symbol: RIC8B
  Gene Name: RIC8 guanine nucleotide exchange factor B
  ENST ID: ENST00000549643
  CDS Start-End: 313-405
gcgtttacctggaggcagcggcttgggcgcgcagagcggccgcggctcccccgcacctgcggccatggatgaggagcgcgccctctacatcgtccgggccggcgaagcaggggctatcgagcgggtcctgagggattacagcgacaagtggatagtctgctgaaatacactggctatgggaatgctgcaggactgttggcggccaggggcctcttggctggaggaagaggagataattggtactcagaggatgaggacacagacactgaagaatacaaaaatgcaaaaccaaaagaggagttgcttaaaccaatgggactaaaacctgatgggacaataacgcctttggaggaagcactcaaccagtactctgtcatcgaagagaccagctctgacacagactaaaagcatcacctgctcaactctcaatattgctttatcagcatcttttctctgtagctccaggggaatcttttctctaaaacatttatgcccttgctttggctagaaacacattaactggtttactcattgagaatccagcatatttaagaggtgaccctgtgttttt

SEQ ID NO: 177067 - DNA, 720 bp, Homo sapiens
  Payload ID: 14742
  Gene Symbol: RIC8B
  Gene Name: RIC8 guanine nucleotide exchange factor B
  ENST ID: ENST00000546449
  CDS Start-End: 1-139
cattaatcttatcactggtcatttagaggaaccaatgccaaaccccatagatgaaatgacagaagaacaaaaagaatatgaagccatgaaacttgtcaacatgcttgataaactttccaggggaatccacatattctagaagctgccaacaaataaatatacaaacgtcaagtctgaaataccccagcttccacctgatttaaactatgcctcaaagaagatgcctacttatccggaagtacccagcagatgcccaactgaagagaggagttgcttaaaccaatgggactaaaacctgatgggacaataacgcctttggaggaagcactcaaccagtactctgtcatcgaagagaccagctctgacacagactaaaagcatcacctgctcaactctcaatattgctttatcagcatcttttctctgtagctccaggggaatcttttctctaaaacatttatgcccttgctttggctagaaacacattaactggtttactcattgagaatccagcatatttaagaggtgaccctgtgttttttgtgatattgaggcattcatacagagctgcagttagacggggttacgggggctaaaagcagaaaaaaaattccatttcatcgggatggaactgaaggattttattctataaagcggccctggttgaatctggcaattctttttgccaagatccctagcagaagatttagccatgtcctt

SEQ ID NO: 177068 - DNA, 2722 bp, Homo sapiens
  Payload ID: 14743
  Gene Symbol: RFESD
  Gene Name: Rieske (Fe-S) domain containing
  Uniprot ID: Q8TAC1
  ENST ID: ENST00000311364
  CDS Start-End: 1418-1891
cgggaccagctgcttccggctgggctgcgggcgtggactcctcattccggctgtggccgcgccgctgcggggcctgaggccctcttgggttttggttcagcgttagttaacggttaacccgccaaggcgggcttccgcccaggcacaggagactcaccgagcttgttcaccttgaaacttgggccacacctgagacctgccacctaaggggggtacgcgggtcgtttttaacaagctttcatggcatttgtgccatgaaagctctaaagtatagaagctgctccagggcttccgcagccccggccgtcctggagatactcgcctcctggagtctgtgtcgagaatttgcagcacctggacagccacgtgcagtctcagaactgcaggcggtctttaccgaaatgttaaacacaacttgaagttaggcaggataactgccagagctggatggaccttagaggtgccagctaacgcgctgtgagcgttttctgcggttaggcctgctctaaacatttgacatgtgttaaagcatttatgtgctttacccacacccctatgtggcgggcccttcttaaagtaaaagaaactgcagcacagcgaagttaagcaacttgccccaaatcacgcagaactgggatgcaaacccaggtctagctcactcgtgatcacaattcaacatcatacgatggtgctgatttccagagcagctctgtgactttatataaaattattgggcaagcgttcaattgtaaacattcgtgaacatagctgttgcacattagcgttcctttttttttttaattcaggaccatctttggtgacaaatataaatatcaatactatatatatcaccaatatacatatttgctttgctaaaaggtttctgtgtcttcaggatagtttacttgcaagcctcatgtttttataaaaacgtgggtgctacctgaataaaactaatgcctacccgttggcggttttgtgaagactaatgaactattatattcaaagggtccaagcagtaggcatttactaaaggacagctagttttatctgttattattctgccattcagagagataccaaaactactctctaaggcatttctcttccctgcatgtaaaagcaagggtgtcatacttgagataagcattctgataatgtgtaggcaaagtttccacacttggtaaaagcatcttagtcatggttcaagacgagtgacaagttaccacctatttgcaattcaaggagaatataagacagagaagaaagctgtgaatgaatttcatttgattagcaatagattggacactctactgatcttgcctctctacaacctctcttccacctgacctctaaatgttgaagtgtttcaggaattgtcttagaccttcttccttatctacacttcctctccaacatgaatcttgatggctctgcacaagatcctgaaaagagggaatattcttctgtgtgtgtgggcagagaagatgacattaaaaaatctgaaagaatgacagctgttgtccatgatagagaagtggtcattttctaccacaagggagaatatcatgctatggatattcgctgttaccactcaggaggacctttacatttgggagatatagaggattttgatggacgaccgtgtatagtttgcccctggcataaatacaaaattactttggcaacaggagaaggtctgtaccagtctataaaccctaaagatccatcagcaaaacccaagtggtgctccaaaggaataaagcaaaggattcacacagtgacagtagacaacggaaatatttatgtgactctttctaatgaaccttttaagtgtgactctgatttttatgccactggagacttcaaagtaattaagagttcttcctgataaaaaatatatagaaatgaaaaatgttgtgtatgcttgaaaacatttttagaataactctgcttcagttttaaaggtgatgaaatttttcaacataggcacaactgtttaaaattcacatacatttgagaggtttaagagcacacatacttagtatgatgtaaggattatcatcaggatcaatagaatacattttatcgaatcttctggattaattagaaacctgaaggttataggtttgggatgttctgtttaagaaggataaaaataaatttggagtaaacaaataataggtaaaaattaaggattagtaagaaaaaattttttaatttaaaaaatttaatttttaaaataggaaaaaatccctgtttgatgtagcagacttaattctggaaaagttttagtatatacaaagtaaacagactatataatgaacttccatcactcagctttaacagttatcagcattcttccattcttgttttatttatacctctgtggatttgctacctctcctatttgattgttatttttacatttttaggaaagtttaaatacattgaaatgttcacctctgaactgtgcaaccttcctaaataacagactttttatacttaaaaaatgcctccaaaaatgagataggtttacctgctgaacttgaaaataagaaacttaaccactgttaagtgatctgtgatcaaggcagatcttgaagtaaggaagccagacacagctgctgcccagccatgagagatgtaaagtctcctattcagtgagccaatgttctttgaatgcctatatgaaattttcaaataaagatttttaaaaacg

SEQ ID NO: 177069 - DNA, 2587 bp, Homo sapiens
  Payload ID: 14743
  Gene Symbol: RFESD
  Gene Name: Rieske (Fe-S) domain containing
  Uniprot ID: Q8TAC1
  ENST ID: ENST00000380005
  CDS Start-End: 182-814
ctcgtgcagtagcgtcacgcggaggcggagcgaggactcggggacagttaccacctatttgcaattcaaggagaatataagacagagaagaaagctgtgaatgaatttcatttgattagcaatagattggacactctactgatcttgcctctctacaacctctcttccacctgacctctaaatgttgaagtgtttcaggaattgtcttagaccttcttccttatctacacttcctctccaatatggaattctcttccccaagctgttggcatgtctagttcatttgcattttgggcatttcagctcagctgtcatctcagtgaccagtttttatctgagcatgaatcttgatggctctgcacaagatcctgaaaagagggaatattcttctgtgtgtgtgggcagagaagatgacattaaaaaatctgaaagaatgacagctgttgtccatgatagagaagtggtcattttctaccacaagggagaatatcatgctatggatattcgctgttaccactcaggaggacctttacatttgggagatatagaggattttgatggacgaccgtgtatagtttgcccctggcataaatacaaaattactttggcaacaggagaaggtctgtaccagtctataaaccctaaagatccatcagcaaaacccaagtggtgctccaaaggaataaagcaaaggattcacacagtgacagtagacaacggaaatatttatgtgactctttctaatgaaccttttaagtgtgactctgatttttatgccactggagacttcaaagtaattaagagttcttcctgataaaaaatatatagaaatgaaaaatgttgtgtatgcttgaaaacatttttagaataactctgcttcagttttaaaggtgatgaaatttttcaacataggcacaactgtttaaaattcacatacatttgagaggtttaagagcacacatacttagtatgatgtaaggattatcatcaggatcaatagaatacattttatcgaatcttctggattaattagaaacctgaaggttataggtttgggatgttctgtttaagaaggataaaaataaatttggagtaaacaaataataggtaaaaattaaggattagtaagaaaaaattttttaatttaaaaaatttaatttttaaaataggaaaaaatccctgtttgatgtagcagacttaattctggaaaagttttagtatatacaaagtaaacagactatataatgaacttccatcactcagctttaacagttatcagcattcttccattcttgttttatttatacctctgtggatttgctacctctcctatttgattgttatttttacatttttaggaaagtttaaatacattgaaatgttcacctctgaactgtgcaaccttcctaaataacagactttttatacttaaaaaatgcctccaaaaatgagataggtttacctgctgaacttgaaaataagaaacttaaccactgttaagtgatctgtgatcaaggcagatcttgaagtaaggaagccagacacagctgctgcccagccatgagagatgtaaagtctcctattcagtgagccaatgttctttgaatgcctatatgaaattttcaaataaagatttttaaaaacgttttagaactttgtgaatgtaggcacaactaagtgtctcctataaatattatagagaggagatctagggttttgttccttggagttcccgagcaaggttgatgttcagttggttcaccctggttttatcatgtcagttatttatggtcagtaccattcagttgcaatgatggtcataccgtaccagttgtaatgtatttaaaataacaccccaagcacccaccatgcaaaaatcagcagcacatagtggtgatttttgcatggtcagtgctcatgcaaaaatcaccactatgtgggaccagaaatagctaaaatgagtagatgatgaattcagagtgagaagaactgtcaagattggaacctagtctcaaagcacagtagtatttttaaaggaatagaattaagaatctaaatctaatacttaacattctaaggagccgacctggactctttctcttggttattataaaaatagtaaatgagtaaggtccgtatagtaaagactctgcttacttacctttactacatattattacacttccttttctgttggagtttggatagcatgagtagcacttggtcctcatttctcagacaaccaacgaaccagacttgggctttttatagatactgtttgtggtagcagctacttactaagtacagaaaatgtactatctctcaggaaggtacatcccagtctattctatcatgtgataatccttcaatgcccagtcaggtcttaacacatgtccagaatataaagtgtacagaagaaatcaaagtactttcttcaggcaaaaactagccctggtttgcaggaataattacagaaatattttctcataggagccactggcaataatgagtagtgtgcacttgatttttcattctaaatttgtatctctaaatctagaaataaaaatcatatcatgtactgtcttca

SEQ ID NO: 177070 - DNA, 2788 bp, Homo sapiens
  Payload ID: 14743
  Gene Symbol: RFESD
  Gene Name: Rieske (Fe-S) domain containing
  Uniprot ID: Q8TAC1
  ENST ID: ENST00000458310
  CDS Start-End: 1332-1964
tgcgggcgtggactcctcattccggctgtggccgcgccgctgcggggcctgaggccctcttgggttttggttcagcgttagttaacggttaacccgccaaggcgggcttccgcccaggcacaggagactcaccgagcttgttcaccttgaaacttgggccacacctgagacctgccacctaaggggggtacgcgggtcgtttttaacaagctttcatggcatttgtgccatgaaagctctaaagtatagaagctgctccagggcttccgcagccccggccgtcctggagatactcgcctcctggagtctgtgtcgagaatttgcagcacctggacagccacgtgcagtctcagaactgcaggcggtctttaccgaaatgttaaacacaacttgaagttaggcaggataactgccagagctggatggaccttagaggtgccagctaacgcgctgtgagcgttttctgcggttaggcctgctctaaacatttgacatgtgttaaagcatttatgtgctttacccacacccctatgtggcgggcccttcttaaagtaaaagaaactgcagcacagcgaagttaagcaacttgccccaaatcacgcagaactgggatgcaaacccaggtctagctcactcgtgatcacaattcaacatcatacgatggtgctgatttccagagcagctctgtgactttatataaaattattgggcaagcgttcaattgtaaacattcgtgaacatagctgttgcacattagcgttcctttttttttttaattcaggaccatctttggtgacaaatataaatatcaatactatatatatcaccaatatacatatttgctttgctaaaaggtttctgtgtcttcaggatagtttacttgcaagcctcatgtttttataaaaacgtgggtgctacctgaataaaactaatgcctacccgttggcggttttgtgaagactaatgaactattatattcaaagggtccaagcagtaggcatttactaaaggacagctagttttatctgttattattctgccattcagagagataccaaaactactctctaaggcatttctcttccctgcatgtaaaagcaagggtgtcatacttgagataagcattctgataatgtgtaggcaaagtttccacacttggtaaaagcatcttagtcatggttcaagacgagtgacaagttaccacctatttgcaattcaaggagaatataagacagagaagaaagctgtgaatgaatttcatttgattagcaatagattggacactctactgatcttgcctctctacaacctctcttccacctgacctctaaatgttgaagtgtttcaggaattgtcttagaccttcttccttatctacacttcctctccaatatggaattctcttccccaagctgttggcatgtctagttcatttgcattttgggcatttcagctcagctgtcatctcagtgaccagtttttatctgagcatgaatcttgatggctctgcacaagatcctgaaaagagggaatattcttctgtgtgtgtgggcagagaagatgacattaaaaaatctgaaagaatgacagctgttgtccatgatagagaagtggtcattttctaccacaagggagaatatcatgctatggatattcgctgttaccactcaggaggacctttacatttgggagatatagaggattttgatggacgaccgtgtatagtttgcccctggcataaatacaaaattactttggcaacaggagaaggtctgtaccagtctataaaccctaaagatccatcagcaaaacccaagtggtgctccaaaggaataaagcaaaggattcacacagtgacagtagacaacggaaatatttatgtgactctttctaatgaaccttttaagtgtgactctgatttttatgccactggagacttcaaagtaattaagagttcttcctgataaaaaatatatagaaatgaaaaatgttgtgtatgcttgaaaacatttttagaataactctgcttcagttttaaaggtgatgaaatttttcaacataggcacaactgtttaaaattcacatacatttgagaggtttaagagcacacatacttagtatgatgtaaggattatcatcaggatcaatagaatacattttatcgaatcttctggattaattagaaacctgaaggttataggtttgggatgttctgtttaagaaggataaaaataaatttggagtaaacaaataataggtaaaaattaaggattagtaagaaaaaattttttaatttaaaaaatttaatttttaaaataggaaaaaatccctgtttgatgtagcagacttaattctggaaaagttttagtatatacaaagtaaacagactatataatgaacttccatcactcagctttaacagttatcagcattcttccattcttgttttatttatacctctgtggatttgctacctctcctatttgattgttatttttacatttttaggaaagtttaaatacattgaaatgttcacctctgaactgtgcaaccttcctaaataacagactttttatacttaaaaaatgcctccaaaaatgagataggtttacctgctgaacttgaaaataagaaacttaaccactgttaagtgatctgtgatcaaggcagatcttgaagtaaggaagccagacacagctgctgcccagccatgagagatgtaaagtctcctattcagtgagccaatgttctttgaatgcctatatgaaattttcaaataaagattttt

SEQ ID NO: 177071 - DNA, 615 bp, Homo sapiens
  Payload ID: 14743
  Gene Symbol: RFESD
  Gene Name: Rieske (Fe-S) domain containing
  ENST ID: ENST00000511684
  CDS Start-End: 261-615
gcacgtctggagctctggctcgtgcagtagcgtcacgcggaggcggagcgaggactcggggacagttaccacctatttgcaattcaaggagaatataagacagagaagaaagctgtgaatgaatttcatttgattagcaatagattggacactctactgatcttgcctctctacaacctctcttccacctgacctctaaatgttgaagtgtttcaggaattgtcttagaccttcttccttatctacacttcctctccaacatgaatcttgatggctctgcacaagatcctgaaaagagggaatattcttctgtgtgtgtgggcagagaagatgacattaaaaaatctgaaagaatgacagctgttgtccatgatagagaagtggtcattttctaccacaagggagaatatcatgctatggatattcgctgttaccactcaggaggacctttacatttgggagatatagaggattttgatggacgaccgtgtatagtttgcccctggcataaatacaaaattactttggcaacaggagaaggtctgtaccagtctataaaccctaaagatccatcagcaaaacccaagtggtgctccaaaggaataaagcaaagga

SEQ ID NO: 177072 - DNA, 464 bp, Homo sapiens
  Payload ID: 14743
  Gene Symbol: RFESD
  Gene Name: Rieske (Fe-S) domain containing
  ENST ID: ENST00000513950
  CDS Start-End: 2-184
catgaatcttgatggctctgcacaagatcctgaaaagagggaatattcttctgtgtgtgtgggcagagaagatgacattaaaaaatctgaaagaatgacagctgttgtccatgatagagaagtggtcattttctaccacaagggagaatatcatgctatggatattcgctgttaccgattttgatggacgaccgtgtatagtttgcccctggcataaatacaaaattactttggcaacaggagaaggtctgtaccagtctataaaccctaaagatccatcagcaaaacccaagtggtgctccaaaggaataaagcaaaggattcacacagtgacagtagacaacggaaatatttatgtgactctttctaatgaaccttttaagtgtgactctgatttttatgccactggagacttcaaagtaattaagagttcttcctgataaaaaatatatagaaatgaaaaa

SEQ ID NO: 177073 - DNA, 6321 bp, Homo sapiens
  Payload ID: 14744
  Gene Symbol: RIMBP2
  Gene Name: RIMS binding protein 2
  Uniprot ID: O15034
  ENST ID: ENST00000261655
  CDS Start-End: 165-3323
atgcaggccttcccacaagggcccggcagcatgacaaggtgaaggcagagtatgtgcatctcaaccatccgctcaccctcgtgaccagagagcgcgatttggccgtgaaggagaaacaccagctccaagccaagctggagaacctagaacaggtcctgaagcatatgcgagaggcggctgaacggcggcagcagctgcagttggagcatgaccaggccctggctgttctcagtgccaagcagcaggaaattgaccttctgcagaagtccaaggttcgagagctggaagagaaatgccggactcaaagtgagcagttcaacctgctgtcccgggacctggagaagttccggcagcacgctggcaagattgacctgctgggtggcagcgcggtggcccccctggacatctccacggcccccagcaagcctttcccacagttcatgaatggcctagccacctccctcggcaaaggtcaggagagcgctattggaggcagctctgcgatcggtgaatatatccggccccttccgcagcctggtgacaggccggagcctctgtccgccaagcccaccttcctgtcgagatccggtagcgcaagatgcagatctgagtcagacatggagaatgaacggaattccaatacctccaagcagagatactcggggaaggtccacctctgtgttgcccgctatagttacaaccccttcgatggaccgaacgagaaccccgaagctgagctgcccctcacggcgggaaaatacctctacgtctatggagacatggatgaggatgggttctatgaaggagagctcctcgatggccagaggggtctggtgccctccaacttcgtggactttgtgcaggacaacgagtcgcggttggcaagcacgctggggaacgagcaggatcagaacttcatcaaccattccggcatcggcctggagggagagcacatcctggacctccactccccaacccacatagatgcgggcatcaccgacaacagtgccgggaccctggacgtgaacatcgacgacatcggagaagacatcgtgccttaccctagaaaaatcaccctcatcaaacaactcgccaaaagtgttattgtgggctgggagcccccggcggtgccaccaggatggggaacggtgagcagctacaacgtcctggtggacaaggagacacgcatgaacctcacgctggggagcagaactaaagccctcatcgagaagctcaacatggcagcctgcacctaccgcatctccgtgcagtgcgtcaccagcaggggcagctcggatgagctgcagtgcacgctgctggtgggcaaggacgtggtggtggccccctcccacctgcgggtggacaacatcacgcagatctccgcccagctctcctggctacccaccaacagcaactacagccacgtcatcttcctcaacgaggaggagttcgacatcgtcaaggccgccaggtacaagtaccagttcttcaatctcaggcccaacatggcctataaggtgaaggttctggccaaaccccaccagatgccgtggcagctcccgctggagcaaagggagaagaaggaggcctttgtggagttctccacgttgcctgcaggacccccagcacccccacaagatgttaccgtccaggctggggtgacccccgccaccatccgggtctcctggagaccacctgtgctgacgcccaccgggctgtccaatggcgcaaacgttaccggctacggcgtgtatgccaaagggcagagggtggctgaagtcatcttccccacggcagacagcacggccgtggagcttgtgcggctgcggagcctggaggccaagggcgtgaccgtgcggaccctctccgcccagggcgagtccgtggactctgcagttgctgccgttccccccgagctcctggtgcctcctaccccccacccgagacctgcaccccaatcaaagccattagcaagttctggagtccccgaaaccaaagacgagcacctgggtccccacgccaggatggatgaggcctgggagcagagccgtgcacctggccctgtgcatgggcacatgctggagccgcccgtgggccccggaaggcggtcgccctcacccagccgcatcctgccacagccacagggcaccccggtgtccaccaccgtcgccaaggccatggcccgggaggccgcgcagagggtggccgagagcagcaggttagagaaaaggagcgtcttcctagagagaagcagcgcggggcagtacgccgcctcagacgaggaggacgcctatgactctccagacttcaagaggaggggcgcctcggtggacgacttcctgaaaggctctgaacttggcaagcagccgcactgttgccatggagacgagtaccacacagagagcagccgggggtctgacctctcagacatcatggaggaggacgaggaggagctgtattctgaaatgcagctggaagatgggggaaggaggcggcccagcggcacgtcccacaatgccctcaagattttagggaacccagcctctgcaggacgggtggatcacatgggccggaggtttccccgtggcagcgctggtcctcagaggtcccggcccgtgacagtcccatccatcgacgattacgggcgagaccgcctttctccagacttctatgaagagtcagaaactgaccctggtgccgaagagctcccggcccggatctttgtggctctctttgactacgacccgctcaccatgtccccaaacccagatgctgcagaggaggagcttccctttaaagaaggccagatcatcaaggtttatggtgataaagacgctgatggattctaccgtggggaaacctgtgcccggcttggccttattccttgtaacatggtctctgagatacaagcagatgatgaggagatgatggatcagcttcttagacagggctttctccctctgaatacacctgtggagaaaatagagagaagcaggagaagtggcaggcgtcattcggtatcgacgcggagaatggtggccctgtatgactacgaccccagagaaagctcgcccaacgtcgatgtcgaggccgaacttacattttgcacaggagatattattacagtttttggtgaaattgatgaagatggattttattatggggagctgaatgggcagaaaggccttgtgccctcaaacttcttggaagaagtgcctgatgacgtagaagtctatctttctgatgctccatcccactactctcaagatacgccaatgcgctcaaaggcaaaaaggaagaagagtgttcatttcacaccttaatcaggcaatgtagccttcacgtaagtgagcaactgaagataccgataaagataccaacttaagctaccttaaccgggccagtgtggtagacttaaggcttcattgtggggttaaaaaaaaaaaaagatacaaagaaatatgtctcaaaaaactattggacctaaataattagaatattacttggtctcagttgtaaagcaactgaatttatagtgaagcaaatcatctttaataatcatttcctactatttgcattaagaatatttgaaaggccaacattgggaacatatttcttaacaagctaactgtgtgtttacatagagagagctgcatattgcattgttagccactcttggaaaaagcacaacctaacaaacatgtttactataggaagctttactttagaaacttaacccaaggtcaagcagatgagtagtgaacacaggtgatcgagtgttggctctgaacactccaaacactggctcgagtggccagaacgtgttttccttaagtaaccctgcctctaccttacgagagagctatgctcctcctcaaagcacaatcatcctgtgacagaagttgctgcaacacgcgtttgttgttggtataccaatgcaatactaagttgatgaagcacgcagctcaaatgatcacattagatggaatagatggtatcttcaggtgtactttgggatgctttactaggtgttttccattagaattagaccttgattttaaatccaagcaagcttgaagccccttggcttacagcatttgcctgctgaatactaaacactcacatggcaagagttgctctggagaggtagggccagaggaatgctgctgcactgccaactcaggcacatgcttagctgtaaagggaagcgaggtgaagtcgtcctgcagcgtattagagtaaaagtctacccctctgaagcactattaagcgcttaacgtatatttaaatactaccatgtgctatctactgaggaagattcatgttcaattatttggaaataatgcaagcatccactaagggcctttaagctttctttgattataattaaggttcattttagtttttttttttctttcaaccagtgtgccatctccaatatttctatagtataccaaccaccccaggaatgcactttaacaatatcaggattttatataaccaaatagtttcaaatacaacaaaattccctttatgaactttcgctttttaagactactgatgggtactcggccaactttactatcaacctaatttcagatcatgtctcccctgcccttagtcttcatttatgaagtgaattattacctgccttagctttgccaaagcaacggccaccccgcactccctcgagacagagaaacggaacccacacatttatgtctggggcctctctctggcgtgctgtgggagaggacctttgcttctcatggcatacttcaacaactgaaagaacaaatgaacccccctgacctttcctggtgggaaacggggacagtacgatgttaccaagtgaattctgttgttggcgctcacacactcaataaactgtaacactgtacctactaggttcctcctgagggttcaggtacagcaaggagagctccatcccccacagtccatctccattcggggtcacctacgtcatctatgggttctggtagtcctgggagaggcagggaaatgtcctcgaaaaagaaaaaggggctgctttccaaaggcaagaaactgctgaaaaagctgggtgcagtgaaatgattcatgtgcttccggacaactgccaaatctatgtaattttctttaattccaaactagggctttcatgactcaagtacttcctaaaaaaacccaatcttctcccctgacaccagtagagaaatgcacttttgcactaccaaccactttaaaccaaccacgagaacaaagaggagcggttgctctctgtcaccgctggcagtctgctctcattgtccaagctctgatttgggaggtgggaggggacgtcttattaacaaacgggggcgcatagctatcacctgtagctccctccctacctgtaattccagtctttgtgcatttgtcatctgcccttaaaggaatgattttcaacctttctcccttctcaaaatgcttgcctcataatgcataactttcactttgactctggtcttgaaattcctagtttaattcgccttgatgttctgccttataaatgcacaatgatttgtactgtctaataaaaacagtgtatactttgtatgtgtcgtgcattcagtggtcttcatcctgacacagtggtttgagatcaagttgtacaggctgtgcattttaagatactagtttcagtctttcaaagccagccaggctacacacagaaaatgtttactcaatcattcaaaaaagagaaaaggagagaaagtaactttgtttggtaaagcaccagtactccaaccttccagaaagccgattatcttcattgcttttaatgttctattctgtggcatatggttttctgttactttcgttgtcaaaatgccatacccaaatacacagcaatgaatggcacacaagtaatccacataatgcataagccacaccaaaaccagactcaatttaaatctgctccaaatgagtccatacccatcttcatcattggcatttgaacaaaagacttacttacaaagttgctggcagatgtatttgatggttactcttttgtaattcttgtccacttgtaaattgtttttactctttatacatacttttcagactgcctttcttttgtaatttatggacggtttataaatgaatgacaaagctttccccattgtgtcttcaaaaacgctattataaattgtaatataatagtatgtggtagatttattattaaaggaaatccatgtgtggttaagctctgtgtgggtgtgtgcatgtgcacagttagtgtaaaatattttctagaaataaaatttgttattttat

SEQ ID NO: 177074 - DNA, 994 bp, Homo sapiens
  Payload ID: 14744
  Gene Symbol: RIMBP2
  Gene Name: RIMS binding protein 2
  ENST ID: ENST00000536632
  CDS Start-End: 524-994
ctttgactaacatacaaacattttaaacgtgggctgtgcttagctttccattttgcagagtgtgtgggtcctgggaaggctccccagcatgggccatcctgcccctggcacggccgcagcccctgccccagcctgtgctctctgaggaggcccccgaggcccagccctgtctcaatgctttcacatgcagtgtggccaggtacagagtgtggctgtggttatgtgcttctccaattcatctgacctagacctcccgatctatttccacctacatgttaagacacaaaaaagacaaaagtcaaggaaccgctgccatcctcactgctttccaaagctgcatttcccgtgcacgctcctcagttaggctcactgccgctctgttcttcacccccacttgctcgcagacgattacgggcgagaccgcctttctccagacttctatgaagagtcagaaactgaccctggtgccgaagagctcccggcccggatctttgtggctctctttgactacgacccgctcaccatgtccccaaacccagatgctgcagaggaggagcttccctttaaagaaggccagatcatcaaggtttatggtgataaagacgctgatggattctaccgtggggaaacctgtgcccggcttggccttattccttgtaacatggtctctgagatacaagcagatgatgaggagatgatggatcagcttcttagacagggctttctccctctgaatacacctgtggagaaaatagagagaagcaggagaagtggcaggcgtcattcggtatcgacgcggagaatggtggccctgtatgactacgaccccagagaaagctcgcccaacgtcgatgtcgaggccgaacttacattttgcacaggagatattattacagtttttggtgaaattgatgaagatggattttattatggggagctgaatgggcagaaaggccttgtgccctcaaacttcttggaagaagtgcctgatgac

SEQ ID NO: 177075 - DNA, 3868 bp, Homo sapiens
  Payload ID: 14744
  Gene Symbol: RIMBP2
  Gene Name: RIMS binding protein 2
  Uniprot ID: O15034
  ENST ID: ENST00000536002
  CDS Start-End: 1328-3265
gtacactgcagttgtctccgaggtgaacctccggagccttggcacagctcgcttctaaagcttggaaatgacccgccacacctgaagcctgcaggtgctgaggccacattcgatcagacccaagctttgggagaccgctggggaaatttcccacttcctctcctgagaccaggaactcagcagagaaactttgtggaaaatgaactgaaggatgccacccagggagagtatctcctgagatcccatcatgcaggccttcccacaagggcccggcagcatgacaaggtgaaggcagagtatgtgcatctcaaccatccgctcaccctcgtgaccagagagcgcgatttggccgtgaaggagaaacaccagctccaagccaagctggagaacctagaacaggtcctgaagcatatgcgagaggcggctgaacggcggcagcagctgcagttggagcatgaccaggccctggctgttctcagtgccaagcagcaggaaattgaccttctgcagaagcctcagaaaaccaacctccagtgtccgcactttaggaagtgtcccatgctttcacagttgacgatgacgttcgttagcactcttggtttcaagcgacagaaaacccaaacaggaaattgtttttgtgcccatcactgaaaatgtggcttcagacatggctagatccagggctcaaatctgctggcctcagacccagtagaatccaaggcctccccgacatcaccaggacttggctgctctctgccctcctctggatcagcttcagccttggtttccctgtggagacccccagccactccagccctgaccctcctggtggcaaagtggctgcagcctcacctcctcccaagccaaagtccaatagaaaggggcttccctctcccgcagcattctcaggcagaggcccattgccctccgtaggccccacaccacccaggtcaccagtcgctgagggttcagactgtgcttggcacaggggaggtccagaccccagccagtccagaggttcttcccaggagaggagctcctgacgctggaggaagaggcctgaggaacaggcctgttacccagaggatccgctatccaggaggctcaggttgaggctaagaaggagcatgaaggcgcagtgcggctgctagagtccaaggttcgagagctggaagagaaatgccggactcaaagtgagcagttcaacctgctgtcccgggacctggagaagttccggcagcacgctggcaagattgacctgctgggtggcagcgcggtggcccccctggacatctccacggcccccagcaagcctttcccacagttcatgaatggcctagccacctccctcggcaaaggtcaggagagcgctattggaggcagctctgcgatcggtgaatatatccggccccttccgcagcctggtgacaggccggagcctctgtccgccaagcccaccttcctgtcgagatccggtagcgcaagatgcagatctgagtcagacatggagaatgaacggaattccaatacctccaagcagagatactcggggaaggtccacctctgtgttgcccgctatagttacaaccccttcgatggaccgaacgagaaccccgaagctgagctgcccctcacggcgggaaaatacctctacgtctatggagacatggatgaggatgggttctatgaaggagagctcctcgatggccagaggggtctggtgccctccaacttcgtggactttgtgcaggacaacgagtcgcggttggcaagcacgctggggaacgagcaggatcagaacttcatcaaccattccggcatcggcctggagggagagcacatcctggacctccactccccaacccacatagatgcgggcatcaccgacaacagtgccgggaccctggacgtgaacatcgacgacatcggagaagacatcgtgccttaccctagaaaaatcaccctcatcaaacaactcgccaaaagtgttattgtgggctgggagcccccggcggtgccaccaggatggggaacggtgagcagctacaacgtcctggtggacaaggagacacgcatgaacctcacgctggggagcagaactaaagccctcatcgagaagctcaacatggcagcctgcacctaccgcatctccgtgcagtgcgtcaccagcaggggcagctcggatgagctgcagtgcacgctgctggtgggcaaggacgtggtggtggccccctcccacctgcgggtggacaacatcacgcagatctccgcccagctctcctggctacccaccaacagcaactacagccacgtcatcttcctcaacgaggaggagttcgacatcgtcaaggccgccaggtacaagtaccagttcttcaatctcaggcccaacatggcctataaggtgaaggttctggccaaaccccaccagatgccgtggcagctcccgctggagcaaagggagaagaaggaggcctttgtggagttctccacgttgcctgcaggacccccagcacccccacaagatgttaccgtccaggctggggtgacccccgccaccatccgggtctcctggagaccacctgtgctgacgcccaccgggctgtccaatggcgcaaacgttaccggctacggcgtgtatgccaaagggcagagggtggctgaagtcatcttccccacggcagacagcacggccgtggagcttgtgcggctgcggagcctggaggccaagggcgtgaccgtgcggaccctctccgcccagggcgagtccgtggactctgcagttgctgccgttccccccgagctcctggtgcctcctaccccccacccgagacctgcaccccaatcaaagccattagcaagttctggagtccccgaaaccaaagacgagcacctgggtccccacgccaggatggatgaggcctgggagcagagccgtgcacctggccctgtgcatgggcacatgctggagccgcccgtgggccccggaaggcggtcgccctcacccagccgcatcctgccacagccacagggcaccccggtgtccaccaccgtcgccaaggccatggcccgggaggccgcgcagagggtggccgagagcagcaggttagagaaaaggagcgtcttcctagagagaagcagcgcggggcagtacgccgcctcagacgaggaggacgcctatgactctccagacttcaagaggaggggcgcctcggtggacgacttcctgaaaggctctgaacttggcaagcagatggtctcctaacagagctggaattagattgaaccgaggcctgaagaagacctgtttccacgcctttccccatgtgccacgttctcctcacctatccaggagtgaatcatcaccttccctgcaatctgctcagattacaaacccggaggaaaggctggagcacttgttctctgggtgaaggacccatacccccactggtttttgagatcggcattcagcgctgtcttatggcagccacagccccaggtggccccagagcccttgacatgtggccacctggggctgagtgtgactgaggccctgaatttttacttctataaaattagttccagattagtttacattctaattagtttacatgtaaacagccacacgtggctggtggccaccagtgctgacgcccagctctggatgaccacacctgctacaagagatgacttttctagagaagagtagaaacacagcggcagaaacacagctctgcacttccgagggcctcccactccttctgatgagactgcagaggaagtctgtttggccaagcatgctattaacacgttttcctgcttgttttgttttttaacagagcaaacaggtctgtttctattaaaattt

SEQ ID NO: 177076 - DNA, 552 bp, Homo sapiens
  Payload ID: 14744
  Gene Symbol: RIMBP2
  Gene Name: RIMS binding protein 2
  ENST ID: ENST00000540658
  CDS Start-End: 1-187
gagagaagcaggagaagtggcaggcgtcattcggtatcgacgcggagaatggtggccctgtatgactacgaccccagagaaagctcgcccaacgtcgatgtcgaggccgaacttacattttgcacaggagatattattacagtttttggtgaaattgatgaagatggattttattatggggagctgaatgggcagaaaggccttgtgccctcaaacttcttggaagaagtgcctgatgacgtagaagtctatctttctgatgctccatcccactactctcaagatacgccaatgcgctcaaaggcaaaaagggttcctcctgagggttcaggtacagcaaggagagctccatcccccacagtccatctccattcggggtcacctacgtcatctatgggttctggtagtcctgggagaggcagggaaatgtcctcgaaaaagaaaaaggggctgctttccaaaggcaagaaactgctgaaaaagctgggtgcagtgaaatgattcatgtgcttccggacaactgccaaatctatgtaattttctttaattcca

SEQ ID NO: 177077 - DNA, 3685 bp, Homo sapiens
  Payload ID: 14744
  Gene Symbol: RIMBP2
  Gene Name: RIMS binding protein 2
  Uniprot ID: O15034
  ENST ID: ENST00000535703
  CDS Start-End: 1133-3070
gaaaatgaactgaaggatgccacccagggagagtatctcctgagatcccatcatgcaggccttcccacaagggcccggcagcatgacaaggtgaaggcagagtatgtgcatctcaaccatccgctcaccctcgtgaccagagagcgcgatttggccgtgaaggagaaacaccagctccaagccaagctggagaacctagaacaggtcctgaagcatatgcgagaggcggctgaacggcggcagcagctgcagttggagcatgaccaggccctggctgttctcagtgccaagcagcaggaaattgaccttctgcagaagcctcagaaaaccaacctccagtgtccgcactttaggaagtgtcccatgctttcacagttgacgatgacgttcgttagcactcttggtttcaagcgacagaaaacccaaacaggaaattgtttttgtgcccatcactgaaaatgtggcttcagacatggctagatccagggctcaaatctgctggcctcagacccagtagaatccaaggcctccccgacatcaccaggacttggctgctctctgccctcctctggatcagcttcagccttggtttccctgtggagacccccagccactccagccctgaccctcctggtggcaaagtggctgcagcctcacctcctcccaagccaaagtccaatagaaaggggcttccctctcccgcagcattctcaggcagaggcccattgccctccgtaggccccacaccacccaggtcaccagtcgctgagggttcagactgtgcttggcacaggggaggtccagaccccagccagtccagaggttcttcccaggagaggagctcctgacgctggaggaagaggcctgaggaacaggcctgttacccagaggatccgctatccaggaggctcaggttgaggctaagaaggagcatgaaggcgcagtgcggctgctagagtccaaggttcgagagctggaagagaaatgccggactcaaagtgagcagttcaacctgctgtcccgggacctggagaagttccggcagcacgctggcaagattgacctgctgggtggcagcgcggtggcccccctggacatctccacggcccccagcaagcctttcccacagttcatgaatggcctagccacctccctcggcaaaggtcaggagagcgctattggaggcagctctgcgatcggtgaatatatccggccccttccgcagcctggtgacaggccggagcctctgtccgccaagcccaccttcctgtcgagatccggtagcgcaagatgcagatctgagtcagacatggagaatgaacggaattccaatacctccaagcagagatactcggggaaggtccacctctgtgttgcccgctatagttacaaccccttcgatggaccgaacgagaaccccgaagctgagctgcccctcacggcgggaaaatacctctacgtctatggagacatggatgaggatgggttctatgaaggagagctcctcgatggccagaggggtctggtgccctccaacttcgtggactttgtgcaggacaacgagtcgcggttggcaagcacgctggggaacgagcaggatcagaacttcatcaaccattccggcatcggcctggagggagagcacatcctggacctccactccccaacccacatagatgcgggcatcaccgacaacagtgccgggaccctggacgtgaacatcgacgacatcggagaagacatcgtgccttaccctagaaaaatcaccctcatcaaacaactcgccaaaagtgttattgtgggctgggagcccccggcggtgccaccaggatggggaacggtgagcagctacaacgtcctggtggacaaggagacacgcatgaacctcacgctggggagcagaactaaagccctcatcgagaagctcaacatggcagcctgcacctaccgcatctccgtgcagtgcgtcaccagcaggggcagctcggatgagctgcagtgcacgctgctggtgggcaaggacgtggtggtggccccctcccacctgcgggtggacaacatcacgcagatctccgcccagctctcctggctacccaccaacagcaactacagccacgtcatcttcctcaacgaggaggagttcgacatcgtcaaggccgccaggtacaagtaccagttcttcaatctcaggcccaacatggcctataaggtgaaggttctggccaaaccccaccagatgccgtggcagctcccgctggagcaaagggagaagaaggaggcctttgtggagttctccacgttgcctgcaggacccccagcacccccacaagatgttaccgtccaggctggggtgacccccgccaccatccgggtctcctggagaccacctgtgctgacgcccaccgggctgtccaatggcgcaaacgttaccggctacggcgtgtatgccaaagggcagagggtggctgaagtcatcttccccacggcagacagcacggccgtggagcttgtgcggctgcggagcctggaggccaagggcgtgaccgtgcggaccctctccgcccagggcgagtccgtggactctgcagttgctgccgttccccccgagctcctggtgcctcctaccccccacccgagacctgcaccccaatcaaagccattagcaagttctggagtccccgaaaccaaagacgagcacctgggtccccacgccaggatggatgaggcctgggagcagagccgtgcacctggccctgtgcatgggcacatgctggagccgcccgtgggccccggaaggcggtcgccctcacccagccgcatcctgccacagccacagggcaccccggtgtccaccaccgtcgccaaggccatggcccgggaggccgcgcagagggtggccgagagcagcaggttagagaaaaggagcgtcttcctagagagaagcagcgcggggcagtacgccgcctcagacgaggaggacgcctatgactctccagacttcaagaggaggggcgcctcggtggacgacttcctgaaaggctctgaacttggcaagcagatggtctcctaacagagctggaattagattgaaccgaggcctgaagaagacctgtttccacgcctttccccatgtgccacgttctcctcacctatccaggagtgaatcatcaccttccctgcaatctgctcagattacaaacccggaggaaaggctggagcacttgttctctgggtgaaggacccatacccccactggtttttgagatcggcattcagcgctgtcttatggcagccacagccccaggtggccccagagcccttgacatgtggccacctggggctgagtgtgactgaggccctgaatttttacttctataaaattagttccagattagtttacattctaattagtttacatgtaaacagccacacgtggctggtggccaccagtgctgacgcccagctctggatgaccacacctgctacaagagatgacttttctagagaagagtagaaacacagcggcagaaacacagctctgcacttccgagggcctcccactccttctgatgagactgcagaggaagtctgtttggccaagcatgctattaacacgttttcctgcttgttttgttttttaacagagcaaacaggtctgtttctattaaaatttaaaaagcgttaa

SEQ ID NO: 177078 - DNA, 6105 bp, Homo sapiens
  Payload ID: 14745
  Gene Symbol: RIMBP3
  Gene Name: RIMS binding protein 3
  Uniprot ID: Q9UFD9
  ENST ID: ENST00000619918
  CDS Start-End: 486-5405
ccagccacctgacccaaatacaccacctgaacccacgaccaggtatgcccacaccccatgggtggccttaacacacacaccctgcccctttctccaagtacaggagcagcagcccagacttccctcggggcaccgcggcctgcttgggactgcacagtgcctgggagggtgcctggggagggtcacaagggacttggtgctagaagcaggaaaagtgtagggaccggaaaagcccccgtgcatcctggaagggacatgggccagtttgagcaggggtgtgggagtccagccctggccttgccaggtggagaggcgcctgggccagacatccgcggcaggaggcgggggaacatgccaagaggcggaaggggcacgcggagacccccagggggcgccggaaggggcgcgccgggcggtcggcggcggccgttggcgagctgaggcctgccaggcgaagtctggagaccagccgggccgcggccgcaatggccaaggactcgcccagccccttgggcgcgtcgcccaagaagccgggctgctccagcccggcggcggcagtgctggagaaccagaggcgggagctggagaagctacgggcggagctggaggcggagcgggcaggctggcgggcggaacggcggcgcttcgctgcccgggagcgccagctgcgtgaggaggccgagcgggagcggcgacagctggctgaccgtctgcgctccaagtgggaggcacagcgcagccgggagttgcggcagctgcaagaggagatgcagcgggaacgcgaggccgagatccggcagctgctgcgctggaaggaggccgagcagcggcagctgcagcagctgctgcaccgggagcgcgatggcgtggtgcgccaagcccgggagctgcagcgccagctggccgaggagctggtgaaccgcggccactgtagccgcccgggggcgtccgaggtttccgcggcgcagtgccgctgtcgcctgcaggaagtgttggcgcagcttcgctggcagactgacggcgagcaggcggcgcgcatccgctatctgcaggcggcgctggaggtggagcgccagctcttcctcaagtacatcctggcgcacttccgcgggcacccggctttgtcgggatcaccggacccccaagctgtgcattccttggaagaaccgctgccccagacctccagcggctcttgccacgcccccaaacccgcctgccaactcggatctctagacagcctgagtgctgaagtcggtgtgcgctcccgctcgctaggcctggtgtcctctgcgtgctccagctccccagacggcctgctctccacgcacgccagctcccttgattgcttcgcacctgcgtgttcccgctcgcttgacagcacccggagcctccccaaggcctccaaatccgaggagcggccctcctcaccagacacctccacccctggctcccggaggctctcgccgccaccatcgccactcccgccgccaccaccaccgtcagcccacaggaaactcagcaacccgcggggaggagaaggctctgagagccagccctgcgaagtcctgactccctcacccccgggcctgggccaccacgagctgataaagctgaactggctgctggccaaggcgttgtgggtgctggcgcgccgctgttataccctgcaagcggagaacaagcagctgcggcgtgcaggctgcccctaccaggcagacgagaaggtgaagcggctcaaggtaaagcgcgcggagctgaccgggctcgcgcggcgcctagctgaccgcgcccgcaagctgcaggagaccaacctccgggccgtgagcgcgcctatacccggcgagagttgcgccggcctggagctgtgccaagtctttgcccgccagcgcgctcgggacctgtcggagcaggcgagcgcgccgctggccaaggacaagcagatcgaagagctgcggcaggagtgccacctcctgcaggcgcgtgtcgcctcgggtccctgcagcgacctgcatactggaaggggcggcccctgcacccagtggctcaacgtcagagacttagaccgcctgcagcgcgagtcccagcgggaagtgctgcgcctgcagaggcagttgatgcttcagcagggcaacggtggcgcttggcccgaggcgggcggccagagcgcaacctgcgaggaggtgcgacggcagatgctggcgctggagcgcgagctggaccagcggcggcgcgagtgccaggagctgggcgcgcaggcggccccggcgcggcgacgtggcgaggaggccgagacacagctgcaggcggcgctgctcaaaaacgcctggctggcggaggagaatgggcggctgcaggccaagaccgactgggtgcggaaggtggaggctgagaatagcgaagtgcgcggccacctgggccgcgcgtgtcaagagcgcgatgcctccggcttgatcgccgaacagctgctgcagcaggcggcgcgcgggcaggacaggcagcagcagctgcaacgcgacccgcagaaggccctgtgtgacctccatccttcctggaaggagatacaggcgctccagtgtcggcctggtcaccctcctgaacagccctgggagaccagtcaaatgccggagtcccaagttaaaggtagcagaaggcccaagttccacgcacggcctgaagactacgcagtgtcacagcccaacagagacatacaggagaaaagggaagcctccctcgaggagagcccagttgcccttggggagtcagccagtgtcccccaagtttcagagacagtccctgccagccaacctctgtccaagaaaaccagctcccagtcaaactcctcctctgaggggtcgatgtgggccaccgtgccgtcctcccctactctggacagggacacagccagtgaggtggatgacctggagcctgacagcgtgtccctggccctggaaatggggggctcggcggctcctgctgcccccaagctcaagatcttcatggctcagtataactacaacccatttgaggggcccaatgatcaccctgagggtgagctgcccctcacagctggggactacatatatatcttcggggacatggatgaggatggcttctatgagggggagcttgaggatggccggcgggggctggtgccctccaacttcgtggagcagattccggacagctacatcccaggctgcctgcctgccaaatcccctgatcttggccccagtcaactcccagcggggcaggatgaagctctggaggaagacagcttattatctgggaaagcccagggagtggtggacagagggctgtgccagatggtcagggtgggctccaagacagaagtagcaacagagatcctggataccaagacggaagcctgccagctgggcttgctgcagagcatggggaagcagggcctctccagaccccttctggggaccaaaggggtgctccgtatggctcccatgcagctacacctgcagaatgtcacagccacatcagccaacatcacctgggtctacagcagccaccgccacccccatgtggtatatcttgatgaccgagagcatgccctgaccccagcgggcgtgagctgctacaccttccagggcctgtgccccggcacgcactaccgggcgcgggtggaggtgcggctgccacgggacttgctgcaggtgtattggggaactatgtcctccaccgtcaccttcgacacactcttggcaggacctccctacccaccgctggatgtgctggtggagcgccatgcctcgccaggtgtcctggtggtcagctggctccctgtgaccattgactcagctgggtcctccaatggagtccaggtcaccggttatgctgtgtatgcagatgggcttaaggtttgtgaggtcgccgatgccactgctgggagcaccctattggaattctcccagctacaggtgcccctcacgtggcagaaggtctcagtgagaaccatgtcactctgtggtgagtccctggattcagtgcctgctcagatccccgaggacttcttcatgtgtcaccgatggccagagactccaccctttagctacacttgtggcgacccatccacctacagagtcaccttccccgtctgcccccagaagctgtcactggctcctccgagtgccaaggccagcccccacaaccctggaagctgcggggagccccaggccaagttcctagaagcattctttgaagaacccccaaggaggcaatccccagtgtccaacctgggctcagaaggagaatgtccgagttcaggggctggcagccaagcccaggagcttgcagaggcctgggagggctgtagaaaggacctgctctttcagaagagtccccagaaccacaggccaccttcagtcagtgaccagcctggggagaaggaaaattgctcccagcacatgggcaccagcaaaagccctgctccaggattcatccatctacgcaccgagtgtgggcccaggaaagaaccgtgtcaggaaaaggctgcccttgagagggtacttcggcaaaagcaagatgcccaagggttcacacctccccagctgggcgccagccaacagtatgcatctgacttccataacgttttgaaggaggagcaggaggcactgtgcttggatctgtggggcacagagaggcgagaggagaggagggagcctgagccccacagcaggcaaggacaagctctgggggtgaagagagggtgccagctccatgagcccagctcggcactgtgtccagctccatccgccaaagtcatcaagatgcccaggggtggcccccaacagctggggacgggggccaacactccagccagggtctttgtggccctctctgattacaaccccctggtgatgtctgccaacctcaaggctgcagaggaggagctggtcttccagaaaaggcagttgctaagagtgtggggctctcaggacacccatgatttctacctcagcgagtgcaacaggcaagtgggcaatatccccgggcgcctagtggctgagatggaggtggggacagagcagactgataggaggtggcgttctccggcccaagggaacctgccttctgtggcccacctcgaggactttcaggggctcaccatcccccagggttcctccctggtgctccaggggaactccaagagactcccactgtggactccaaagatcatgatagcagctctggactatgatcctggggatgggcaaatggggggccaggggaagggcaggctggcgctgagggcaggagacgtggtcatggtttacgggcccatggatgaccaaggattctattatggagagttgggcggccacaggggcctggttcctgcccacctgctggatcacatgtccctccatggacactgagcaagcatccttgcccaggtagtggcctctggctgctcacaccctgccagaggagaagcaagcgttcagaccctcacaccagcacccctcctcaccaccataagtagcatgtgctccaagtgccactgtgttaaactgatggtagtccttaagcgtcccctaggctctgaaagtagcaggacttaagcctgagttatttgcaaaagcaaacacaacaagccaacccctgagagtctgagaagccatttcaaagttgctgataactatggcaggtatacggagaagcgcctttttctgtggccaatgtgtgttttctctgggaggttaaggttatctgtccattgccttgtacgaaagtctcaagaaaagtctacatcttaaaaaagaaaaagcaatctgagtgttatttttgggatgtgagggtgatctggctgcgacatgtgtcaccccattgatcatcagggttgattcggctgatctggctgactaggcgggtatccccttcctccctcaccactccatgtgcgtccctccagaagctgtgtgctcaatggaagaggatgaccatccccgatagaggacgatcggtcttcagtcaagagtataagagtagctgcgctcccctgctagaacctccaaacgagctctcagaatgttatttttctgtcttatgtccaacccctcattaaaatgttcatag

SEQ ID NO: 177079 - DNA, 6105 bp, Homo sapiens
  Payload ID: 14746
  Gene Symbol: RIMBP3B
  Gene Name: RIMS binding protein 3B
  Uniprot ID: A6NNM3
  ENST ID: ENST00000620804
  CDS Start-End: 486-5405
ccagccacctgacccaaatacaccacctgaacccacgaccaggtatgcccacaccccatgggtggccttaacacacacaccctgcccctttctccaagtacaggagcagcagcccagacttccctcggggcaccgcggcctgcttgggactgcacagtgcctgggagggtgcctggggagggtcacaagggacttggtgctagtagcaggaaaagtgtagggaccggaaaagcccccgtgcatcctggaagggacatgggccagtttgagcaggggtgtgggagtccagccctggccttgccaggtggagaggcgcctgggccagacatccgcggcaggaggcgggggaacatgccaagaggcggaaggggcacgcggagacccccagggggcgccggaaggggcgcgccgggcggtcggcggcggccgttggcgagctgaggcctgccaggcgaagtctggagaccagccgggccgcggccgcaatggccaaggactcgcccagccccttgggcgcgtcgcccaagaagccgggctgctccagcccggcggcggcagtgctggagaaccagaggcgggagctggagaagctacgggcggagctggaggcggagcgggcaggctggcgggcggaacggcggcgcttcgctgcccgggagcgccagctgcgtgaggaggccgagcgggagcggcggcagctggctgaccgtctgcgctccaagtgggaggcacagcgcagccgggagttgcggcagctgcaagaggagatgcagcgggaacgcgaggccgagatccggcagctgctgcgctggaaggaggccgagcagcggcagctgcagcagctgctgcaccgggagcgcgatggcgtggtgcgccaagcccgggagctgcagcgccagctggccgaggagctggtgaaccgcggccactgtagccgcccgggggcgtccgaggtttccgcggcgcagtgccgctgtcgcctgcaggaagtgttggcgcagcttcgctggcagactgacggcgagcaggcggcgcgcatccgctatctgcaggcggcgctggaggtggagcgccagctcttcctcaagtacatcctggcgcacttccgcgggcacccggctttgtcgggatcaccggacccccaagctgtgcattccttggaagaaccgctgccccagacctccagcggctcttgccacgcccccaaacccgcctgccaactcggatctctagacagcctgagtgctgaagtcggtgtgcgctcccgctcgctaggcctggtgtcctctgcgtgctccagctccccagacggcctgctctccacgcacgccagctcccttgattgcttcgcacctgcgtgttcccgctcgcttgacagcacccggagcctccccaaggcctccaaatccgaggagcggccctcctcaccagacacctccacccctggctcccggaggctctcgccgccaccatcgccactcccgccgccaccaccaccgtcagcccacaggaaactcagcaacccgcggggaggagaaggctctgagagccagccctgcgaagtcctgactccctcacccccgggcctgggccaccacgagctgataaagctgaactggctgctggccaaggcgttgtgggtgctggcgcgccgctgttataccctgcaagaggagaacaagcagctgcggcgtgcaggctgcccctaccaggcagacgagaaggtgaagcggctcaaggtaaagcgcgcggagctgaccgggctcgcgcggcgcctagctgaccgcgcccgcgagctgcaggagaccaacctccgggccgtgagcgcgcctatacccggcgagagttgcgccggcctggagctgtgccaagtctttgcccgccagcgcgctcgggacctgtcggagcaggcgagcgcgccgctggccaaggacaagcagatcgaagagctgcggcaggagtgccacctcctgcaggcgcgtgtcgcctcgggtccctgcagcgacctgcatactggaaggggcggcccctgcacccagtggctcaacgtcagagacttagaccgcctgcagcgcgagtcccagcgggaagtgctgcgcctgcagaggcagttgatgcttcagcagggcaacggtggcgcttggcccgaggcgggcggccagagcgcaacctgcgaggaggtgcgacggcagatgctggcgctggagcgcgagctggaccagcggcggcgcgagtgccaggagctgggcacgcaggcggccccggcgcggcgacgtggcgaggaggccgagacacagctgcaggcggcgctgctcaaaaacgcctggctggcggaggagaatgggcggctgcaggccaagaccgactgggtgcggaaggtggaggctgagaatagcgaagtgcgcggccacctgggccgcgcgtgtcaagagcgcgatgcctccggcttgatcgccgaacagctgctgcagcaggcggcgcgcgggcaggacaggcagcagcagctgcaacgcgacccgcagaaggccctgtgtgacctccatccttcctggaaggagatacaggcgctccagtgtcggcctggtcaccctcctgaacagccctgggagaccagtcaaatgccggagtcccaagttaaaggtagcagaaggcccaagttccacgcacggcctgaagactacgcagtgtcacagcccaacagagacatacaggagaaaagggaagcctccctcgaggagagcccagttgcccttggggagtcagccagtgtcccccaagtttcagagacagtccctgccagccaacctctgtccaagaaaaccagctcccagtcaaactcctcctctgaggggtcgatgtgggccaccgtgccgtcctcccctactctggacagggacacagccagtgaggtggatgacctggagcctgacagcgtgtccctggccctggaaatggggggctcggcggctcctgctgcccccaagctcaagatcttcatggctcagtataactacaacccatttgaggggcccaatgatcaccctgagggtgagctgcccctcacagctggggactacatatatatcttcggggacatggatgaggatggcttctatgagggggagcttgacgatggccggcgggggctggtgccctccaacttcgtggagcagattccggacagctacatcccaggctgcctgcctgccaaatcccctgatcttggccccagtcaactcccagcggggcaggatgaagctctggaggaagacagcttattatctgggaaagcccagggaatggtggacagagggctgtgccagatggtcagggtgggctccaagacagaagtagcaacagagatcctggataccaagacggaagcctgccagctgggcttgctgcagagcatggggaagcagggcctctccagaccccttctggggaccaaaggggtgctccgtatggctcccatgcagctacacctgcagaatgtcacagccacatcagccaacatcacctgggtctacagcagccaccgccacccccatgtggtatatcttgatgaccgagagcatgccctgaccccagcgggcgtgagctgctacaccttccagggcctgtgccccggcacgcactaccgggtgcgggtggaggtgcggctgccatgggacttgctgcaggtgtattggggaactatgtcctccaccgtcaccttcgacacactcttggcaggacctccctacccaccgctggaggtgctggtggagcgccatgcctcgccaggtgtcctggtggtcagctggctccctgtgaccattgactcagctgggtcctccaatggagtccaggtcaccggttatgctgtgtatgcagatgggcttaaggtttgtgaggtcgccgatgccactgctgggagcaccgtattggaattctcccagctacaggtgcccctcacgtggcagaaggtctcagtgagaaccatgtcactctgtggtgagtccctggattcagtgcctgctcagatccccgaggacttcttcatgtgtcaccgatggccagagactccaccctttagctacacttgtggcgacccatccacctacagagtcaccttccccgtctgcccccagaagctgtcactggctcctccgagtgccaaggccagcccccacaaccctggaagctgcggggagccccaggccaagttcctagaagcattctttgaagaacccccaaggaggcaatccccagtgtccaacctgggctcagaaggagaatgtccgagttcaggggctggcagccaagcccaggagcttgcagaggcctgggagggctgtagaaaggacctgctctttcagaagagtccccagaaccacaggccaccttcagtcagtgaccagcctggggagaaggaaaattgctaccagcacatgggcaccagcaaaagccctgctccaggattcatccatctacgcaccgagtgtgggcccaggaaagaaccgtgtcaggaaaaggctgcccttgagagggtacttcggcaaaagcaagatgcccaagggttcacacctccccagctgggcgccagccaacagtatgcatctgacttccataacgttttgaaggaggagcaggaggcactgtgcttggatctgcggggcacagagaggcgagaggagaggagggagcctgagccccacagcaggcaaggacaagctctgggggtgaagagagggtgccagctccatgagcccagctcggcactgtgtccagctccatccgccaaagtcatcaagatgcccaggggtggcccccaacagctggggacgggggccaacactccagccagggtctttgtggccctctctgattacaaccccctggtgatgtctgccaacctcaaggctgcagaggaggagctggtcttccagaaaaggcagttgctaagagtgtggggctctcaggacacccatgatttctacctcagcgagtgcaacaggcaagtgggcaatatccccgggcgcctagtggctgagatggaggtggggacagagcagactgataggaggtggcgttctccggcccaagggcacctgccttctgtggcccacctcgaggactttcaggggctcaccatcccccagggttcctccctggtgctccaggggaactccaagagactcccactgtggactccaaagatcatgatagcagctctggactatgatcctggggatgggcaaatggggggccaggggaagggcaggctggcgctgagggcaggagacgtggtcatggtttacgggcccatggatgaccaaggattctattatggagagttgggcggccacaggggcctggttcctgcccacctgctggatcacatgtccctccatggacactgagcaagcatccttgcccaggtagtggcctctggctgctcacaccctgccagaggagaagcaagcgttcagaccctcacaccagcacccctcctcaccaccataagtagcatgtgctccaagtgccactgtgttaaactgatggtagtccttaagcgtcccctaggctctgaaagtagcaggacttaagcctgagttatttgcaaaagcaaacacaacaagccaacccctgagagtctgagaagccatttcaaagttgctgataactatggcaggtatacggagaagcgcctttttctgtggccaatgtgtgttttctctgggaggttaaggttatctgtccattgccttgtacgaaagtctcaagaaaagtctacatcttaaaaaagaaaaagcaatctgagtgttatttttgggatgtgagggtgatctggctgcgacatgtgtcaccccattgatcatcagggttgattcggctgatctggctgactaggcgggtatccccttcctccctcaccactccatgtgcgtccctccagaagctgtgtgctcaatggaagaggatgaccatccccgatagaggacgatcggtcttcagtcaagagtataagagtagctgcgctcccctgctagaacctccaaacgagctctcagaatgttatttttctgtcttatgtccaacccctcattaaaatgttcatag

SEQ ID NO: 177080 - DNA, 5475 bp, Homo sapiens
  Payload ID: 14747
  Gene Symbol: RIMBP3C
  Gene Name: RIMS binding protein 3C
  ENST ID: ENST00000331505
  CDS Start-End: 138-4775
cggaacggcggcgcttcgctgcccgggagcgccagctgcgtgaggaggccgagcgggagcggcggcagctggctgaccgtctgcgctccaagtgggaggcacagcgcagccgggagttgcggcagctgcaagaggagatgcagcgggaacgcgaggccgagatccggcagctgctgcgctggaaggaggccgagcagcggcagctgcagcagctgctgcaccgggagcgcgatggcgtggtgcgccaagcccgggagctgcagcgccagctggccgaggagctggtgaaccgcggccactgtagccgcccgggggcgtccgaggtttccgcggcgcagtgccgctgtcgcctgcaggaagtgttggcgcagcttcgctggcagactgacggcgagcaggcggcgcgcatccgctatctgcaggcggcgctggaggtggagcgccagctcttcctcaagtacatcctggcgcacttccgcgggcacccggctttgtcgggatcaccggacccccaagctgtgcattccttggaagaaccgctgccccagacctccagcggctcttgccacgcccccaaacccgcctgccaactcggatctctagacagcctgagtgctgaagtcggtgtgcgctcccgctcgctaggcctggtgtcctctgcgtgctccagctccccagacggcctgctctccacgcacgccagctcccttgattgcttcgcacctgcgtgttcccgctcgcttgacagcacccggagcctccccaaggcctccaaatccgaggagcggccctcctcaccagacacctccacccctggctcccggaggctctcgccgccaccatcgccactcccgccgccaccaccaccgtcagcccacaggaaactcagcaacccgcggggaggagaaggctctgagagccagccctgcgaagtcctgactccctcacccccgggcctgggccaccacgagctgataaagctgaactggctgctggccaaggcgttgtgggtgctggcgcgccgctgttataccctgcaagaggagaacaagcagctgcggcgtgcaggctgcccctaccaggcagacgagaaggtgaagcggctcaaggtaaagcgcgcggagctgaccgggctcgcgcggcgcctagctgaccgcgcccgcgagctgcaggagaccaacctccgggccgtgagcgcgcctatacccggcgagagttgcgccggcctggagctgtgccaagtctttgcccgccagcgcgctcgggacctgtcggagcaggcgagcgcgccgctggccaaggacaagcagatcgaagagctgcggcaggagtgccacctcctgcaggcgcgtgtcgcctcgggtccctgcagcgacctgcatactggaaggggcggcccctgcacccagtggctcaacgtcagagacttagaccgcctgcagcgcgagtcccagcgggaagtgctgcgcctgcagaggcagttgatgcttcagcagggcaacggtggcgcttggcccgaggcgggcggccagagcgcaacctgcgaggaggtgcgacggcagatgctggcgctggagcgcgagctggaccagcggcggcgcgagtgccaggagctgggcacgcaggcggccccggcgcggcgacgtggcgaggaggccgagacacagctgcaggcggcgctgctcaaaaacgcctggctggcggaggagaatgggcggctgcaggccaagaccgactgggtgcggaaggtggaggctgagaatagcgaagtgcgcggccacctgggccgcgcgtgtcaagagcgcgatgcctccggcttgatcgccgaacagctgctgcagcaggcggcgcgcgggcaggacaggcagcagcagctgcaacgcgacccgcagaaggccctgtgtgacctccatccttcctggaaggagatacaggcgctccagtgtcggcctggtcaccctcctgaacagccctgggagaccagtcaaatgccggagtcccaagttaaaggtagcagaaggcccaagttccacgcacggcctgaagactacgcagtgtcacagcccaacagagacatacaggagaaaagggaagcctccctcgaggagagcccagttgcccttggggagtcagccagtgtcccccaagtttcagagacagtccctgccagccaacctctgtccaagaaaaccagctcccagtcaaactcctcctctgaggggtcgatgtgggccaccgtgccgtcctcccctactctggacagggacacagccagtgaggtggatgacctggagcctgacagcgtgtccctggccctggaaatggggggctcggcggctcctgctgcccccaagctcaagatcttcatggctcagtataactacaacccatttgaggggcccaatgatcaccctgagggtgagctgcccctcacagctggggactacatatatatcttcggggacatggatgaggatggcttctatgagggggagcttgacgatggccggcgggggctggtgccctccaacttcgtggagcagattccggacagctacatcccaggctgcctgcctgccaaatcccctgatcttggccccagtcaactcccagcggggcaggatgaagctctggaggaagacagcttattatctgggaaagcccagggaatggtggacagagggctgtgccagatggtcagggtgggctccaagacagaagtagcaacagagatcctggataccaagacggaagcctgccagctgggcttgctgcagagcatggggaagcagggcctctccagaccccttctggggaccaaaggggtgctccgtatggctcccatgcagctacacctgcagaatgtcacagccacatcagccaacatcacctgggtctacagcagccaccgccacccccatgtggtatatcttgatgaccgagagcatgccctgaccccagcgggcgtgagctgctacaccttccagggcctgtgccccggcacgcactaccgggtgcgggtggaggtgcggctgccatgggacttgctgcaggtgtattggggaactatgtcctccaccgtcaccttcgacacactcttggcaggacctccctacccaccgctggatgtgctggtggagcgccatgcctcgccaggtgtcctggtggtcagctggctccctgtgaccattgactcagctgggtcctccaatggagtccaggtcaccggttatgctgtgtatgcagatgggcttaaggtttgtgaggtcgccgatgccactgctgggagcaccgtattggaattctcccagctacaggtgcccctcacgtggcagaaggtctcagtgagaaccatgtcactctgtggtgagtccctggattcagtgcctgctcagatccccgaggacttcttcatgtgtcaccgatggccagagactccaccctttagctacacttgtggcgacccatccacctacagagtcaccttccccgtctgcccccagaagctgtcactggctcctccgagtgccaaggccagcccccacaaccctggaagctgcggggagccccaggccaagttcctagaagcattctttgaagaacccccaaggaggcaatccccagtgtccaacctgggctcagaaggagaatgtccgagttcaggggctggcagccaagcccaggagcttgcagaggcctgggagggctgtagaaaggacctgctctttcagaagagtccccagaaccacaggccaccttcagtcagtgaccagcctggggagaaggaaaattgctaccagcacatgggcaccagcaaaagccctgctccaggattcatccatctacgcaccgagtgtgggcccaggaaagaaccgtgtcaggaaaaggctgcccttgagagggtacttcggcaaaagcaagatgcccaagggttcacacctccccagctgggcgccagccaacagtatgcatctgacttccataacgttttgaaggaggagcaggaggcactgtgcttggatctgcggggcacagagaggcgagaggagaggagggagcctgagccccacagcaggcaaggacaagctctgggggtgaagagagggtgccagctccatgagcccagctcggcactgtgtccagctccatccgccaaagtcatcaagatgcccaggggtggcccccaacagctggggacgggggccaacactccagccagggtctttgtggccctctctgattacaaccccctggtgatgtctgccaacctcaaggctgcagaggaggagctggtcttccagaaaaggcagttgctaagagtgtggggctctcaggacacccatgatttctacctcagcgagtgcaacaggcaagtgggcaatatccccgggcgcctagtggctgagatggaggtggggacagagcagactgataggaggtggcgttctccggcccaagggcacctgccttctgtggcccacctcgaggactttcaggggctcatcatcccccagggttcctccctggtgctccaggggaactccaagagactcccactgtggactccaaagatcatgatagcagctctggactatgatcctggggatgggcaaatggggggccaggggaagggcaggctggcgctgagggcaggagacgtggtcatggtttacgggcccatggatgaccaaggattctattatggagagttgggcggccacaggggcctggttcctgcccacctgctggatcacatgtccctccatggacactgagcaagcatccttgcccaggtagtggcctctggctgctcacaccctgccagaggagaagcaagcgttcagaccctcacaccagcacccctcctcaccaccataagtagcatgtgctccaagtgccactgtgttaaactgatggtagtccttaagtgtcccctaggctctgaaagtagcaggacttaagcctgagttatttgcaaaagcaaacacaacaagccaacccctgagagtctgagaagccatttcaaagttgctgataactatggcaggtatacggagaagcgcctttttctgtggccaatgtgtgttttctctgggaggttaaggttatctgtccattgccttgtacgaaagtctcaagaaaagtctacatcttaaaaaagaaaaagcaatctgagtgttatttttgggatgtgagggtgatctggctgcgacatgtgtcaccccattgatcatcagggttgattcggctgatctggctgactaggcgggtatccccttcctcccgcaccactccatgtgcgtccctccagaagctgtgcgctcaatggaagaggatgaccatccccgatagaggacgatcggtcttcagtcaagagtataagagtagctgcgctcccctgctagaacctccaaacgagctctcagaatgttatttttctgtcttatgtccaacccctcattaaaatgttcatag

SEQ ID NO: 177081 - DNA, 5784 bp, Homo sapiens
  Payload ID: 14747
  Gene Symbol: RIMBP3C
  Gene Name: RIMS binding protein 3C
  Uniprot ID: A6NJZ7
  ENST ID: ENST00000433039
  CDS Start-End: 486-5405
ccagccacctgacccaaatacaccacctgaacccacgaccaggtatgcccacaccccatgggtggccttaacacacacaccctgcccctttctccaagtacaggagcagcagcccagacttccctcggggcaccgcggcctgcttgggactgcacagtgcctgggagggtgcctggggagggtcacaagggacttggtgctagaagcaggaaaagtgtagggaccggaaaagcccccgtgcatcctggaagggacatgggccagtttgagcaggggtgtgggagtccagccctggccttgccaggtggagaggcgcctgggccagacatccgcggcaggaggcgggggaacatgccaagaggcggaaggggcacgcggagacccccagggggcgccggaaggggcgcgccgggcggtcggcggcggccgttggcgagctgaggcctgccaggcgaagtctggagaccagccgggccgcggccgcaatggccaaggactcgcccagccccttgggcgcgtcgcccaagaagccgggctgctccagcccggcggcggcagtgctggagaaccagaggcgggagctggagaagctacgggcggagctggaggcggagcgggcaggctggcgggcggaacggcggcgcttcgctgcccgggagcgccagctgcgtgaggaggccgagcgggagcggcggcagctggctgaccgtctgcgctccaagtgggaggcacagcgcagccgggagttgcggcagctgcaagaggagatgcagcgggaacgcgaggccgagatccggcagctgctgcgctggaaggaggccgagcagcggcagctgcagcagctgctgcaccgggagcgcgatggcgtggtgcgccaagcccgggagctgcagcgccagctggccgaggagctggtgaaccgcggccactgtagccgcccgggggcgtccgaggtttccgcggcgcagtgccgctgtcgcctgcaggaagtgttggcgcagcttcgctggcagactgacggcgagcaggcggcgcgcatccgctatctgcaggcggcgctggaggtggagcgccagctcttcctcaagtacatcctggcgcacttccgcgggcacccggctttgtcgggatcaccggacccccaagctgtgcattccttggaagaaccgctgccccagacctccagcggctcttgccacgcccccaaacccgcctgccaactcggatctctagacagcctgagtgctgaagtcggtgtgcgctcccgctcgctaggcctggtgtcctctgcgtgctccagctccccagacggcctgctctccacgcacgccagctcccttgattgcttcgcacctgcgtgttcccgctcgcttgacagcacccggagcctccccaaggcctccaaatccgaggagcggccctcctcaccagacacctccacccctggctcccggaggctctcgccgccaccatcgccactcccgccgccaccaccaccgtcagcccacaggaaactcagcaacccgcggggaggagaaggctctgagagccagccctgcgaagtcctgactccctcacccccgggcctgggccaccacgagctgataaagctgaactggctgctggccaaggcgttgtgggtgctggcgcgccgctgttataccctgcaagaggagaacaagcagctgcggcgtgcaggctgcccctaccaggcagacgagaaggtgaagcggctcaaggtaaagcgcgcggagctgaccgggctcgcgcggcgcctagctgaccgcgcccgcgagctgcaggagaccaacctccgggccgtgagcgcgcctatacccggcgagagttgcgccggcctggagctgtgccaagtctttgcccgccagcgcgctcgggacctgtcggagcaggcgagcgcgccgctggccaaggacaagcagatcgaagagctgcggcaggagtgccacctcctgcaggcgcgtgtcgcctcgggtccctgcagcgacctgcatactggaaggggcggcccctgcacccagtggctcaacgtcagagacttagaccgcctgcagcgcgagtcccagcgggaagtgctgcgcctgcagaggcagttgatgcttcagcagggcaacggtggcgcttggcccgaggcgggcggccagagcgcaacctgcgaggaggtgcgacggcagatgctggcgctggagcgcgagctggaccagcggcggcgcgagtgccaggagctgggcacgcaggcggccccggcgcggcgacgtggcgaggaggccgagacacagctgcaggcggcgctgctcaaaaacgcctggctggcggaggagaatgggcggctgcaggccaagaccgactgggtgcggaaggtggaggctgagaatagcgaagtgcgcggccacctgggccgcgcgtgtcaagagcgcgatgcctccggcttgatcgccgaacagctgctgcagcaggcggcgcgcgggcaggacaggcagcagcagctgcaacgcgacccgcagaaggccctgtgtgacctccatccttcctggaaggagatacaggcgctccagtgtcggcctggtcaccctcctgaacagccctgggagaccagtcaaatgccggagtcccaagttaaaggtagcagaaggcccaagttccacgcacggcctgaagactacgcagtgtcacagcccaacagagacatacaggagaaaagggaagcctccctcgaggagagcccagttgcccttggggagtcagccagtgtcccccaagtttcagagacagtccctgccagccaacctctgtccaagaaaaccagctcccagtcaaactcctcctctgaggggtcgatgtgggccaccgtgccgtcctcccctactctggacagggacacagccagtgaggtggatgacctggagcctgacagcgtgtccctggccctggaaatggggggctcggcggctcctgctgcccccaagctcaagatcttcatggctcagtataactacaacccatttgaggggcccaatgatcaccctgagggtgagctgcccctcacagctggggactacatatatatcttcggggacatggatgaggatggcttctatgagggggagcttgacgatggccggcgggggctggtgccctccaacttcgtggagcagattccggacagctacatcccaggctgcctgcctgccaaatcccctgatcttggccccagtcaactcccagcggggcaggatgaagctctggaggaagacagcttattatctgggaaagcccagggaatggtggacagagggctgtgccagatggtcagggtgggctccaagacagaagtagcaacagagatcctggataccaagacggaagcctgccagctgggcttgctgcagagcatggggaagcagggcctctccagaccccttctggggaccaaaggggtgctccgtatggctcccatgcagctacacctgcagaatgtcacagccacatcagccaacatcacctgggtctacagcagccaccgccacccccatgtggtatatcttgatgaccgagagcatgccctgaccccagcgggcgtgagctgctacaccttccagggcctgtgccccggcacgcactaccgggtgcgggtggaggtgcggctgccatgggacttgctgcaggtgtattggggaactatgtcctccaccgtcaccttcgacacactcttggcaggacctccctacccaccgctggatgtgctggtggagcgccatgcctcgccaggtgtcctggtggtcagctggctccctgtgaccattgactcagctgggtcctccaatggagtccaggtcaccggttatgctgtgtatgcagatgggcttaaggtttgtgaggtcgccgatgccactgctgggagcaccgtattggaattctcccagctacaggtgcccctcacgtggcagaaggtctcagtgagaaccatgtcactctgtggtgagtccctggattcagtgcctgctcagatccccgaggacttcttcatgtgtcaccgatggccagagactccaccctttagctacacttgtggcgacccatccacctacagagtcaccttccccgtctgcccccagaagctgtcactggctcctccgagtgccaaggccagcccccacaaccctggaagctgcggggagccccaggccaagttcctagaagcattctttgaagaacccccaaggaggcaatccccagtgtccaacctgggctcagaaggagaatgtccgagttcaggggctggcagccaagcccaggagcttgcagaggcctgggagggctgtagaaaggacctgctctttcagaagagtccccagaaccacaggccaccttcagtcagtgaccagcctggggagaaggaaaattgctaccagcacatgggcaccagcaaaagccctgctccaggattcatccatctacgcaccgagtgtgggcccaggaaagaaccgtgtcaggaaaaggctgcccttgagagggtacttcggcaaaagcaagatgcccaagggttcacacctccccagctgggcgccagccaacagtatgcatctgacttccataacgttttgaaggaggagcaggaggcactgtgcttggatctgcggggcacagagaggcgagaggagaggagggagcctgagccccacagcaggcaaggacaagctctgggggtgaagagagggtgccagctccatgagcccagctcggcactgtgtccagctccatccgccaaagtcatcaagatgcccaggggtggcccccaacagctggggacgggggccaacactccagccagggtctttgtggccctctctgattacaaccccctggtgatgtctgccaacctcaaggctgcagaggaggagctggtcttccagaaaaggcagttgctaagagtgtggggctctcaggacacccatgatttctacctcagcgagtgcaacaggcaagtgggcaatatccccgggcgcctagtggctgagatggaggtggggacagagcagactgataggaggtggcgttctccggcccaagggcacctgccttctgtggcccacctcgaggactttcaggggctcatcatcccccagggttcctccctggtgctccaggggaactccaagagactcccactgtggactccaaagatcatgatagcagctctggactatgatcctggggatgggcaaatggggggccaggggaagggcaggctggcgctgagggcaggagacgtggtcatggtttacgggcccatggatgaccaaggattctattatggagagttgggcggccacaggggcctggttcctgcccacctgctggatcacatgtccctccatggacactgagcaagcatccttgcccaggtagtggcctctggctgctcacaccctgccagaggagaagcaagcgttcagaccctcacaccagcacccctcctcaccaccataagtagcatgtgctccaagtgccactgtgttaaactgatggtagtccttaagtgtcccctaggctctgaaagtagcaggacttaagcctgagttatttgcaaaagcaaacacaacaagccaacccctgagagtctgagaagccatttcaaagttgctgataactatggcaggtatacggagaagcgcctttttctgtggccaatgtgtgttttctctgggaggttaaggttatctgtccattgccttgtacgaaagtctcaagaaaagtctacatctt

SEQ ID NO: 177082 - DNA, 10988 bp, Homo sapiens
  Payload ID: 14748
  Gene Symbol: RC3H1
  Gene Name: ring finger and CCCH-type domains 1
  Uniprot ID: Q5TC82
  ENST ID: ENST00000258349
  CDS Start-End: 80-3481
caaagattttgattccagtggaatctttgctttagatttgtgtgtgtgtttgtgttcgtgaattgtaactccagaagcaatgcctgtacaagctccacaatggacggatttcctctcctgcccaatttgcactcagactttcgacgaaacaattcgaaagcccatcagtttgggttgtggccatactgtctgcaagatgtgcctgaataaactccaccgcaaggcttgcccatttgaccagaccactatcaatacagacattgagctcctccctgtgaactcagcattgctgcagctcgtgggtgctcaggtccctgagcagcagcctattactttgtgtagtggggttgaagacacaaagcattatgaggaagccaagaaatgtgtagaagaattagcattgtacttaaaaccgctcagcagtgctagaggagtgggtctgaacagcactactcagagtgttctgagtcgcccaatgcagaggaagcttgtgactctagtccactgtcaactagtagaagaagaaggcaggattcgtgccatgagggcagctcgatctttaggtgaacgaacagttacagagctcattctccagcaccagaatcctcagcaactctcttccaatctttgggcagcagtaagggctaggggatgccagttccttggaccagcaatgcaggaggaagctttaaagttggttctgctggccttagaagatggttctgctttgtcaagaaaagtattggttctgtttgtggtgcaaagattggagccacggtttcctcaagcctctaaaactagcattgggcatgttgttcagctcctttatagagcctcctgtttcaaggtcaccaaacgtgatgaagactcttctttgatgcagctgaaagaagaatttagaacctatgaagctctgcggcgagaacatgactcccagatagtgcagattgctatggaagcaggcttacgaattgcaccggaccagtggtcctctttgctttatggagaccagtctcacaaatctcatatgcagtccattattgacaagttgcagactccagcctcttttgcacagagtgttcaggaactaacaattgctctccagcgaactggagacccagcaaacttgaaccgactaagaccccatttggagctgttagcaaacattgaccctagtccagatgctcctcctcctacttgggaacagctggaaaatgggctggttgctgtgcgtacagtggtacatgggctggttgattatatccagaaccacagcaaaaaaggagcagatcagcagcagcctccacagcatagcaaatacaaaacatacatgtgtcgagatatgaagcagagaggaggatgccctcgtggggccagctgtacatttgcacactcacaggaggaactggaaaaatttcgtaaaatgaataagcgcctggttccgagaagacccttgagtgcctctttgggtcaacttaatgaggtgggcctgccttcagcagctatccttccagatgaaggtgcagtggatctccctagcagaaaacctcctgctctgccaaatggaattgtatcaacagggaatacagtaacacagcttattccgcgagggacagaccccagctatgattctagtctgaaaccaggaaaaatagatcatctgagcagtagtgctcctggatcccctcctgacctgctagaatctgttcctaagagtatttctgccttacctgtgaatccacattctatacctccaagggggccagcagatctgcctccaatgcctgttaccaaaccacttcagatggtacctcgaggttctcagttatatccagcacaacagacggatgtttattatcaggatcctcgaggagcagctccgccatttgaaccagcaccttatcagcagggtatgtattatactccaccaccacaatgtgtgtcccgctttgtccgacctccaccatctgctcctgaacctgctcctccctacttggatcattatccaccctacctccaagaacgtgttgtaaactctcagtatggcacacagccacagcagtacccacctatatacccatctcactatgatggccgtcgagtgtaccctgctccgtcttacacaagagaagagatattccgagaaagccctatacccattgagattccacctgcagcagtaccatcgtatgtaccagaatccagagaaagataccaacagatcgagagttactatccagtggctcctcatccaactcagatcagaccttcgtacctcagagaacctccttatagccggcttcctcctcctccccagcctcatcctagtctagatgaactacatcgccgacgaaaggaaataatggcccagctagaggaaagaaaggttatctctccacctccttttgcaccttcaccaaccttgcctcctacctttcatccggaagaatttttggatgaagacttgaaggtagctgggaaatacaaaggaaatgattatagccaatactctccctggtcatgtgacaccatcggctcctacattggaaccaaagatgcaaaacccaaagatgttgtggcagcagggagtgtggaaatgatgaatgtggagagtaaaggaatgagggaccagcgattagatcttcagagaagagcagcagaaaccagtgatgatgacctcatcccatttggagaccgaccaacagtgtctcggtttggtgccatctcacgaacttccaaaactatatatcagggtgctggtccaatgcaggctatggcacctcagggagctcctacaaaatctattaacatttcagattatagtccatatggaacccacggtggctggggagcttctccatattcacctcatcaaaacataccttctcagggacacttcagtgagagggagagaatatctatgtcagaagtggccagtcatggaaaaccccttccatctgctgagagagaacagctacgactagaattgcagcaattgaaccatcagattagccagcagacccagctacgtggactagaggctgttagtaacaggctggtgttgcagagggaggcaaacaccctggcaggccagtcacagcccccaccaccgccacctccaaaatggcctgggatgatctcaagtgagcagttgagcttggaactgcaccaggtggaaagggaaatcgggaagagaacacgggaactgagtatggaaaaccagtgttctctggacatgaaaagcaaactgaatacaagtaaacaagcagaaaatggacaaccagaaccacaaaacaaggttccggctgaggaccttacattgacattcagtgatgtaccaaatggatcagccttgacacaagagaatatcagcctcctatcaaacaagaccagctctctgaacctgtcagaggaccctgagggaggaggggataataatgactcccagagatcaggagttactcccagttctgctccttaaaatatgaggagtcctacttttatcttctgctcctaatcagtttgtcgggcataggggtaggagaacgcataacttctaaactttttctcttaagagcggtcagagaaatccaggaaattcaccagaggcaatgtgcacaaacaccactactaaaaacaaaccctgcacatagttcacattaatgcatttttttaatttaaagaaaaagaaaattagcagtatctgcaagcaattcagattaaatttgtttttgttctgtgaatgaactttattttaataactttggacgccttggatccagggctttaaaaaaaaaagatattatatatacactctgtttgattaattgtatgatcttaatgaagtaggttttcttgtattttggtattacatacccagtgtataatttgtataattcctcacccccaatccttatcaattctcaccaccccataaacttaaaacagaccaaaaatgtcagctttcagagaattctgtggtgcttgagaaacagacagtactagactgagttattagaaaatgtgcagcaaaccaacttttcccagagctgttatttggaattctttatccctttctagatcactagcttcattggatacgtatatttttcttgacattgaagctttttgtttgtttgggagggttttatttcttgtttttattttcaacttttcaaatagaattaccaattttgaagtcctcattttcatattaaggatcatttgcattctcttaatataatcagaaagctgattcagtgtttaattagatttaaatgttgatcaagaattaactgtaacttactagcactgaaaatacatgtttggtgtttcgcctgcgttcagctcatggttggaaatttgaagcagtgcttttcaaattaaacttttgctgacatcataggatgctaaaaaacaaggacaatcaactatgttttaaaactgcaacatttgatttgaacttaaaatgaatagagccacattattttaatggatgttttgttttacttgtgaactgattgagtcttaaggatagtttatgaattgatcacttgttgctcagaatcattagtataagtaggtaggaaatagtttgaagtcatttttcatagacttaactgtccaatgttgcaaatgtttcttcatgaaaatattgaaaagagtaaggttttttttttttttaattctgctgcacatattctgatgccatgtgtctgtgcttaattaactaagaccctataaaacgtgtttagtggggactgtttgatatagttgccctctccattcctctatttgcctgatttttttcagtttccctttctgtattttactactaaattagaaagcactggttatgtaataagttactacattgctttggttgagtaaaaacaagagtttatatttttcttgtttcttattttcttaacccttaactcctgctgaggtcataacaacctcagtctaagctctgtgtccatcatactgttaacttaaacaaatgggtggtgggggtgggaagggtaatacagtcctgccattgcctaccagtaggagagtccaaacagaacactcttttgagtagcaattatttaatttgcccagtcaaggcaccgtgtttatatactatttcacattgaatttgattatgccctacagacctggctggtcaaggatttgatatacacatattggcttgggattcgagctttcttttttatttaaataaaaatttatatatatattatatatatacatatatacatagctatatctgtatatatattgggtatgttttaaggattttttcgcatgagcgcagctgttgcgataaattgaccgattgggaggtggtagaagcactgaatgaaggtgaggctttttttttttccagttttcttatacatttgtcttctttttttaaaaaaaaaaaaaaaaatatatatatatatatatatatatatatatatgtatgctttttcttttttttttggcttttgtttgctttttgacttttacttaaaacccttttacatttccactttaaatgcctattgtttattgggagaaggaaagaaacttttgtatgtctgacagagtcccaagatttttcatttctctgcataacagtaaaaggcaacattattggcctccaaccttctttttttttttttttttttttttttggagagggagtctgcttctgttgcccaggctggagtgcagtgggttgatctcggctcgctacaacctccacctcccgggttcaagcgattctcctgcctcagcctcctgagtagctgggactacaggcacgcgccaccacgtccagctaatttttgtactacaaccttcttataagcagatttggactgatcttctcctttgggtatgtcagatcatcctaaattttagaagcagttgattcactttggaattcagaatgattcttgtattagaagataatttgtgggtattaatttttgtttaagtttaaaataaaagtaaagattcattttggatatcagttgaaaccccttagtaactcagtttctgttattcttgttctcatttcctttaaatacacttgttcttggcttttgccattttgattctgtgaagtaggcaggagcagggattaatttatacagtattcctgttctgaacaaaaccagaaaagtcactgtataaacttgacttaaaatagtatctttctcttttcatgtattttcatttgggggaaaaaaaatctctttaattgtaacctgaattcaagctgtacccctccatggtcctacactctagagctaatctggttgggcagaaaggcagaaggatggtatattgtcccattgtgcctataatgtattttaaattggtcattccaccttacctaatggaaattcttgcagctttcctagtgctcatcagcggttttaggaattcactaacacccccaaaatttgttttttgttttttgctttttttccttttccttttctctgtgatatcatgagcctgtaaggacaaatggcatatttgggcataactgcttgactctgtaactacttttttaaaatcaaaattgaaaaggtattaattgcttctggctttttaatttttttttttagagacaaagatgaaaccagataggaaatacagtttttatgttttctacttactaaaatattagtttcttctaaatattactttatttgtatttcactaaattccaaagcaaaaatcagatatctgagatgaacaattttgaatgggttaaggtaggagtaataagcattgtgttcactcatacataggtgagggaattttatttatagcgagaaatataaaagtattttgacttactcttttttcaaggagtcgctaggaaagggtagaagaactgagaataagacatctagattccatttctggtttatatgtagctcttttgcctaatttatatataattttgtcataagataagtccagtaactgtcctgtcttagataacgtacagaggctgaagtgaccaaagatccattccttattacttttctaattaaaagaagagttagctagatttctagtagtagtattctagatattgataagacattattcctaatgccaactacaaatattcaactactcagaatgtatttaaaaaattgtttggtacagcattaatgttggtgattcctttctcccatcttatttcccttcccttctattctttcccatgtatttcttttgcctaaaagaatattggtatgattctcatttgctactttgagtatataactccatcagactttccagagttcttcagggatggagctcaaagtttacatttttccatatatgtctttttttttcttgacctttttccaccctgtaatttccccttgacttacccactgccctccccaatctgcaacagtgacagtttgctgcctcaaaacagagcattcaaatgaattcgcttagccaataacttctgtgaagttgccttttctaatggtgttattactcagtgatgcacaaatgtggtatttgccctactggtaggcaaacaaaggtctggttaagaatggtaacctgctgttttctttaaaggagagccaaagacttgtgctttactctgttttggttttgggggaagtagtagccattttgatcatgaaaccttttagtatttgtgagttgattgtactgtgtaagtagatttatctaaagttaactgttaaagttagctagccttataaaatgtaaaagtaatgaaaattcatcagtttctctaagccagtgaatgtcgtcttttgtaatattgtgtataagcatttgtgcccaccccagcttctgctatcactgtggtcaagtcatgggtctgagtaaaagaattcttgagtatgtgactggtgagaaataactaactatagtcagtacatgtacagattgttaaaattcaagacaaaatactttcactaaaaaaaaggattcgtctcagtaaagaagtattcagttgctgtcacttacatacaaatggtggtgggtagcagtctcaccatttttctactctctttttgctcgttttaaataattgagtaaaggttttatttgtaaaatctatctgtaaaaagcacctgtaacgatttatatgtcattgaaaggaatggcccagttactttttaggagagattaataacctacctggaaattaactgcagtgtttacttagattttttccccctaataagagtctaagtgtgttaaatttttaactgatgatatggttacagtgttgcaaggtgatctcttcccctgaaaaatctgcctatccttttaagaaaaattagacctactaaactaaagcaaattttactttcatcattagcacctaaacaagcaagcagtctactactgtcatcattttacctgagtgcccattttgctgatccacattcatacctttctaccttggacagctatgatttttatatttatttgttgcttcagctcaggtttatgaaattttcctgctgaaatgacttattgggagttgtaggttgattatagttactattaaacattttctcaatttagcttttctgagccacttcaagaagaaagctgtttttgtcaaaaggtactattaattgtagcaagtaaatcttaagatttgaatttttaagattttatttctgtgttcactaaagatctttccacaagtaatagattataattgataagtaatactagctatagtgttaataaagagtaagactatcaccaccaggaataagtaacaccttttaataataaatctattcctaataggtatgttttcaatactgcactgaacaaagtgggtaaagagccctttgaaatcttattgtaataaagggacttacctcaccactggaatccttgttttcagagcctctggattttcagccaaacactgaatttctcctaaactttatccctgaaacatccctagagaacgaactttattttcacaagaaaataaggcacaataagggggaagaacttaaacctcaacataatatcgtgtccaaaaatgtgtatttagaaaaataaaatcctgtggagtttgttatcctaatgtttattttatactagataaggtgacttgttttcttgtattgaggtcttactgtttcagatttgtttttgtttctgttctaactctaagcagacagagctcacaagtctttggcatccattttaggttgtacactcagagtcatcttataactggaaactgtcaggtggtcccccaccccagtgagtgtatgaaagagtcaagaaaaagattggaaacaaactattgggtgaataattggttgctctattattattattattattatttgcctttttttaatcaccatttatttgtgtaatctttctccattgattggctgtcattcttataatatctgaactaccccataaaataattctctgacttaaaggcatttagcttttgcttatcgtttttacatcctctattcaactaagacactgtcttgagagttattttttccagatggatcgttggcctaaattttcacacttctcccctgttcatcctttttcctcttccctgcttcctgggaataaaaggaacttttttaaaaaaattaattagtccacaggtctcattatctttctttatgattaatctatgactttttggtacaagaacaatggaaaaagtgaattaaggtaatgaacaaaacctttcacccacttaaacattttccagttttgagattcctcttcgtgtttgtggtgtcttccccttgttaccccttctgccctttttctctgactatggtaatttggtctttaggctcatatcagtctccccgagacattctgcagtcattatcacctttttgggtggattttattttgttttattttgttttttttaaaaaaataactttttaacattggtgcatatttgcttgggatagagcttgtgtaatttaccaatcgtattgattgtaagtgattgtgccctgcagaggtatatttaacaagacaaaaataatcttggttaataaaggagcccatgagatttgagtcaggttgtaagtgaaatcacttacacttttggatagaatttatactcctgctcttataaatcagtggtagacttaccattttttaaagttttcttgcatttttttgtttttttattgccacagctccctattctttcttgcctgcctccacccccctgttcaggaaaaaaaaaaattgagccttaaagtgacagctgattttttaattgctgaattttgtgaaattttactttttccaagtgtttccaactttaaaaagagaagtgaagacaaataggttggaatggtgaagacaaatggattggaatttcacaggctgtgaataattccttaggatctggcaaaccgtgaagtcttatttgaagaccttatctcctgagagttcttttggagtaggaaaaagaaccctatttgaaatagaccgtttttctcttgtttttaatctgtttaatatttctgatttttaagcagctttcaaaacaagtgtggtggaaaaaaagaaatagtagtaggaagatgtttagggcagcagaactctgggtctaaataagtacatgttcccacttgttgccgatttttgagagtactagggccatctttctcaattttgtattatttgtgtgcatgtttatatcaaagatgcccattttgttaaaatgctatttcctttattaccttggaaactgactcagcctcatgttgctcctaattagtgtttaaggctcccatgagttgcagataaaatgatttattttaacaagtagaaggaggtgattcaccttttggattgtaaatatatgaaaatgtctacaaggtctttatctgctttctgtcagcatttatattaaatgataaattaatgaggaa

SEQ ID NO: 177083 - DNA, 3775 bp, Homo sapiens
  Payload ID: 14748
  Gene Symbol: RC3H1
  Gene Name: ring finger and CCCH-type domains 1
  Uniprot ID: Q5TC82
  ENST ID: ENST00000367694
  CDS Start-End: 88-3465
ctttttttcaaagattttgattccagtggaatctttgctttagatttgtgtgtgtgtttgtgttcgtgaattgtaactccagaagcaatgcctgtacaagctccacaatggacggatttcctctcctgcccaatttgcactcagactttcgacgaaacaattcgaaagcccatcagtttgggttgtggccatactgtctgcaagatgtgcctgaataaactccaccgcaaggcttgcccatttgaccagaccactatcaatacagacattgagctcctccctgtgaactcagcattgctgcagctcgtgggtgctcaggtccctgagcagcagcctattactttgtgtagtggggttgaagacacaaagcattatgaggaagccaagaaatgtgtagaagaattagcattgtacttaaaaccgctcagcagtgctagaggagtgggtctgaacagcactactcagagtgttctgagtcgcccaatgcagaggaagcttgtgactctagtccactgtcaactagtagaagaagaaggcaggattcgtgccatgagggcagctcgatctttaggtgaacgaacagttacagagctcattctccagcaccagaatcctcagcaactctcttccaatctttgggcagcagtaagggctaggggatgccagttccttggaccagcaatgcaggaggaagctttaaagttggttctgctggccttagaagatggttctgctttgtcaagaaaagtattggttctgtttgtggtgcaaagattggagccacggtttcctcaagcctctaaaactagcattgggcatgttgttcagctcctttatagagcctcctgtttcaaggtcaccaaacgtgatgaagactcttctttgatgcagctgaaagaagaatttagaacctatgaagctctgcggcgagaacatgactcccagatagtgcagattgctatggaagcaggcttacgaattgcaccggaccagtggtcctctttgctttatggagaccagtctcacaaatctcatatgcagtccattattgacaagttgcagactccagcctcttttgcacagagtgttcaggaactaacaattgctctccagcgaactggagacccagcaaacttgaaccgactaagaccccatttggagctgttagcaaacattgaccctagtccagatgctcctcctcctacttgggaacagctggaaaatgggctggttgctgtgcgtacagtggtacatgggctggttgattatatccagaaccacagcaaaaaaggagcagatcagcagcagcctccacagcatagcaaatacaaaacatacatgtgtcgagatatgaagcagagaggaggatgccctcgtggggccagctgtacatttgcacactcacaggaggaactggaaaaatttcgtaaaatgaataagcgcctggttccgagaagacccttgagtgcctctttgggtcaacttaatgaggtgggcctgccttcagcagctatccttccagatgaaggtgcagtggatctccctagcagaaaacctcctgctctgccaaatggaattgtatcaacagggaatacagtaacacagcttattccgcgagggacagaccccagctatgattctagtctgaaaccaggaaaaatagatcatctgagcagtagtgctcctggatcccctcctgacctgctagaatctgttcctaagagtatttctgccttacctgtgaatccacattctatacctccaagggggccagcagatctgcctccaatgcctgttaccaaaccacttcagatggtacctcgaggttctcagttatatccagcacaacagacggatgtttattatcaggatcctcgaggagcagctccgccatttgaaccagcaccttatcagcagggtatgtattatactccaccaccacaatgtgtgtcccgctttgtccgacctccaccatctgctcctgaacctgctcctccctacttggatcattatccaccctacctccaagaacgtgttgtaaactctcagtatggcacacagccacagcagtacccacctatatacccatctcactatgatggccgtcgagtgtaccctgctccgtcttacacaagagaagagatattccgagaaagccctatacccattgagattccacctgcagcagtaccatcgtatgtaccagaatccagagaaagataccaacagatcgagagttactatccagtggctcctcatccaactcagatcagaccttcgtacctcagagaacctccttatagccggcttcctcctcctccccagcctcatcctagtctagatgaactacatcgccgacgaaaggaaataatggcccagctagaggaaagaaaggttatctctccacctccttttgcaccttcaccaaccttgcctcctacctttcatccggaagaatttttggatgaagacttgaaggtagctgggaaatacaaaggaaatgattatagccaatactctccctggtcatgtgacaccatcggctcctacattggaaccaaagatgcaaaacccaaagatgttgtggcagcagggagtgtggaaatgatgaatgtggagagtaaaggaatgagggaccagcgattagatcttcagagaagagcagcagaaaccagtgatgatgacctcatcccatttggagaccgaccaacagtgtctcggtttggtgccatctcacgaacttccaaaactatatatcagggtgctggtccaatgcaggctatggcacctcagggagctcctacaaaatctattaacatttcagattatagtccatatggaacccacggtggctggggagcttctccatattcacctcatcaaaacataccttctcagggacacttcagtgagagggagagaatatctatgtcagaagtggccagtcatggaaaaccccttccatctgctgagagagaacagctacgactagaattgcagcaattgaaccatcagattagccagcagacccagctacgtggactagagagggaggcaaacaccctggcaggccagtcacagcccccaccaccgccacctccaaaatggcctgggatgatctcaagtgagcagttgagcttggaactgcaccaggtggaaagggaaatcgggaagagaacacgggaactgagtatggaaaaccagtgttctctggacatgaaaagcaaactgaatacaagtaaacaagcagaaaatggacaaccagaaccacaaaacaaggttccggctgaggaccttacattgacattcagcagtgatgtaccaaatggatcagccttgacacaagagaatatcagcctcctatcaaacaagaccagctctctgaacctgtcagaggaccctgagggaggaggggataataatgactcccagagatcaggagttactcccagttctgctccttaaaatatgaggagtcctacttttatcttctgctcctaatcagtttgtcgggcataggggtaggagaacgcataacttctaaactttttctcttaagagcggtcagagaaatccaggaaattcaccagaggcaatgtgcacaaacaccactactaaaaacaaaccctgcacatagttcacattaatgcatttttttaatttaaagaaaaagaaaattagcagtatctgcaagcaattcagattaaatttgtttttgttctgtgaatgaactttattttaataactttggacgccttggatccagggctttaaa

SEQ ID NO: 177084 - DNA, 11261 bp, Homo sapiens
  Payload ID: 14748
  Gene Symbol: RC3H1
  Gene Name: ring finger and CCCH-type domains 1
  Uniprot ID: Q5TC82
  ENST ID: ENST00000367696
  CDS Start-End: 353-3754
tggcccctgctgcaggagcagcctcagcagcagcaggtgggaggccggaggcggtgctggcggtggcggcggcagccgtggcccggcggcctgggacagaatcagagtcaacggtggcctcggcggcggcggcggctgccgcggcggtggcgacggccgcggggactcggagctgagaggagctgctgctcggaccagcgcggttatatttcacactatgtgctgactgtatctacagaagatatttaaaaaaaaaaaagataaactttttttcaaagattttgattccagtggaatctttgctttagatttgtgtgtgtgtttgtgttcgtgaattgtaactccagaagcaatgcctgtacaagctccacaatggacggatttcctctcctgcccaatttgcactcagactttcgacgaaacaattcgaaagcccatcagtttgggttgtggccatactgtctgcaagatgtgcctgaataaactccaccgcaaggcttgcccatttgaccagaccactatcaatacagacattgagctcctccctgtgaactcagcattgctgcagctcgtgggtgctcaggtccctgagcagcagcctattactttgtgtagtggggttgaagacacaaagcattatgaggaagccaagaaatgtgtagaagaattagcattgtacttaaaaccgctcagcagtgctagaggagtgggtctgaacagcactactcagagtgttctgagtcgcccaatgcagaggaagcttgtgactctagtccactgtcaactagtagaagaagaaggcaggattcgtgccatgagggcagctcgatctttaggtgaacgaacagttacagagctcattctccagcaccagaatcctcagcaactctcttccaatctttgggcagcagtaagggctaggggatgccagttccttggaccagcaatgcaggaggaagctttaaagttggttctgctggccttagaagatggttctgctttgtcaagaaaagtattggttctgtttgtggtgcaaagattggagccacggtttcctcaagcctctaaaactagcattgggcatgttgttcagctcctttatagagcctcctgtttcaaggtcaccaaacgtgatgaagactcttctttgatgcagctgaaagaagaatttagaacctatgaagctctgcggcgagaacatgactcccagatagtgcagattgctatggaagcaggcttacgaattgcaccggaccagtggtcctctttgctttatggagaccagtctcacaaatctcatatgcagtccattattgacaagttgcagactccagcctcttttgcacagagtgttcaggaactaacaattgctctccagcgaactggagacccagcaaacttgaaccgactaagaccccatttggagctgttagcaaacattgaccctagtccagatgctcctcctcctacttgggaacagctggaaaatgggctggttgctgtgcgtacagtggtacatgggctggttgattatatccagaaccacagcaaaaaaggagcagatcagcagcagcctccacagcatagcaaatacaaaacatacatgtgtcgagatatgaagcagagaggaggatgccctcgtggggccagctgtacatttgcacactcacaggaggaactggaaaaatttcgtaaaatgaataagcgcctggttccgagaagacccttgagtgcctctttgggtcaacttaatgaggtgggcctgccttcagcagctatccttccagatgaaggtgcagtggatctccctagcagaaaacctcctgctctgccaaatggaattgtatcaacagggaatacagtaacacagcttattccgcgagggacagaccccagctatgattctagtctgaaaccaggaaaaatagatcatctgagcagtagtgctcctggatcccctcctgacctgctagaatctgttcctaagagtatttctgccttacctgtgaatccacattctatacctccaagggggccagcagatctgcctccaatgcctgttaccaaaccacttcagatggtacctcgaggttctcagttatatccagcacaacagacggatgtttattatcaggatcctcgaggagcagctccgccatttgaaccagcaccttatcagcagggtatgtattatactccaccaccacaatgtgtgtcccgctttgtccgacctccaccatctgctcctgaacctgctcctccctacttggatcattatccaccctacctccaagaacgtgttgtaaactctcagtatggcacacagccacagcagtacccacctatatacccatctcactatgatggccgtcgagtgtaccctgctccgtcttacacaagagaagagatattccgagaaagccctatacccattgagattccacctgcagcagtaccatcgtatgtaccagaatccagagaaagataccaacagatcgagagttactatccagtggctcctcatccaactcagatcagaccttcgtacctcagagaacctccttatagccggcttcctcctcctccccagcctcatcctagtctagatgaactacatcgccgacgaaaggaaataatggcccagctagaggaaagaaaggttatctctccacctccttttgcaccttcaccaaccttgcctcctacctttcatccggaagaatttttggatgaagacttgaaggtagctgggaaatacaaaggaaatgattatagccaatactctccctggtcatgtgacaccatcggctcctacattggaaccaaagatgcaaaacccaaagatgttgtggcagcagggagtgtggaaatgatgaatgtggagagtaaaggaatgagggaccagcgattagatcttcagagaagagcagcagaaaccagtgatgatgacctcatcccatttggagaccgaccaacagtgtctcggtttggtgccatctcacgaacttccaaaactatatatcagggtgctggtccaatgcaggctatggcacctcagggagctcctacaaaatctattaacatttcagattatagtccatatggaacccacggtggctggggagcttctccatattcacctcatcaaaacataccttctcagggacacttcagtgagagggagagaatatctatgtcagaagtggccagtcatggaaaaccccttccatctgctgagagagaacagctacgactagaattgcagcaattgaaccatcagattagccagcagacccagctacgtggactagaggctgttagtaacaggctggtgttgcagagggaggcaaacaccctggcaggccagtcacagcccccaccaccgccacctccaaaatggcctgggatgatctcaagtgagcagttgagcttggaactgcaccaggtggaaagggaaatcgggaagagaacacgggaactgagtatggaaaaccagtgttctctggacatgaaaagcaaactgaatacaagtaaacaagcagaaaatggacaaccagaaccacaaaacaaggttccggctgaggaccttacattgacattcagtgatgtaccaaatggatcagccttgacacaagagaatatcagcctcctatcaaacaagaccagctctctgaacctgtcagaggaccctgagggaggaggggataataatgactcccagagatcaggagttactcccagttctgctccttaaaatatgaggagtcctacttttatcttctgctcctaatcagtttgtcgggcataggggtaggagaacgcataacttctaaactttttctcttaagagcggtcagagaaatccaggaaattcaccagaggcaatgtgcacaaacaccactactaaaaacaaaccctgcacatagttcacattaatgcatttttttaatttaaagaaaaagaaaattagcagtatctgcaagcaattcagattaaatttgtttttgttctgtgaatgaactttattttaataactttggacgccttggatccagggctttaaaaaaaaaagatattatatatacactctgtttgattaattgtatgatcttaatgaagtaggttttcttgtattttggtattacatacccagtgtataatttgtataattcctcacccccaatccttatcaattctcaccaccccataaacttaaaacagaccaaaaatgtcagctttcagagaattctgtggtgcttgagaaacagacagtactagactgagttattagaaaatgtgcagcaaaccaacttttcccagagctgttatttggaattctttatccctttctagatcactagcttcattggatacgtatatttttcttgacattgaagctttttgtttgtttgggagggttttatttcttgtttttattttcaacttttcaaatagaattaccaattttgaagtcctcattttcatattaaggatcatttgcattctcttaatataatcagaaagctgattcagtgtttaattagatttaaatgttgatcaagaattaactgtaacttactagcactgaaaatacatgtttggtgtttcgcctgcgttcagctcatggttggaaatttgaagcagtgcttttcaaattaaacttttgctgacatcataggatgctaaaaaacaaggacaatcaactatgttttaaaactgcaacatttgatttgaacttaaaatgaatagagccacattattttaatggatgttttgttttacttgtgaactgattgagtcttaaggatagtttatgaattgatcacttgttgctcagaatcattagtataagtaggtaggaaatagtttgaagtcatttttcatagacttaactgtccaatgttgcaaatgtttcttcatgaaaatattgaaaagagtaaggttttttttttttttaattctgctgcacatattctgatgccatgtgtctgtgcttaattaactaagaccctataaaacgtgtttagtggggactgtttgatatagttgccctctccattcctctatttgcctgatttttttcagtttccctttctgtattttactactaaattagaaagcactggttatgtaataagttactacattgctttggttgagtaaaaacaagagtttatatttttcttgtttcttattttcttaacccttaactcctgctgaggtcataacaacctcagtctaagctctgtgtccatcatactgttaacttaaacaaatgggtggtgggggtgggaagggtaatacagtcctgccattgcctaccagtaggagagtccaaacagaacactcttttgagtagcaattatttaatttgcccagtcaaggcaccgtgtttatatactatttcacattgaatttgattatgccctacagacctggctggtcaaggatttgatatacacatattggcttgggattcgagctttcttttttatttaaataaaaatttatatatatattatatatatacatatatacatagctatatctgtatatatattgggtatgttttaaggattttttcgcatgagcgcagctgttgcgataaattgaccgattgggaggtggtagaagcactgaatgaaggtgaggctttttttttttccagttttcttatacatttgtcttctttttttaaaaaaaaaaaaaaaaatatatatatatatatatatatatatatatatgtatgctttttcttttttttttggcttttgtttgctttttgacttttacttaaaacccttttacatttccactttaaatgcctattgtttattgggagaaggaaagaaacttttgtatgtctgacagagtcccaagatttttcatttctctgcataacagtaaaaggcaacattattggcctccaaccttctttttttttttttttttttttttttggagagggagtctgcttctgttgcccaggctggagtgcagtgggttgatctcggctcgctacaacctccacctcccgggttcaagcgattctcctgcctcagcctcctgagtagctgggactacaggcacgcgccaccacgtccagctaatttttgtactacaaccttcttataagcagatttggactgatcttctcctttgggtatgtcagatcatcctaaattttagaagcagttgattcactttggaattcagaatgattcttgtattagaagataatttgtgggtattaatttttgtttaagtttaaaataaaagtaaagattcattttggatatcagttgaaaccccttagtaactcagtttctgttattcttgttctcatttcctttaaatacacttgttcttggcttttgccattttgattctgtgaagtaggcaggagcagggattaatttatacagtattcctgttctgaacaaaaccagaaaagtcactgtataaacttgacttaaaatagtatctttctcttttcatgtattttcatttgggggaaaaaaaatctctttaattgtaacctgaattcaagctgtacccctccatggtcctacactctagagctaatctggttgggcagaaaggcagaaggatggtatattgtcccattgtgcctataatgtattttaaattggtcattccaccttacctaatggaaattcttgcagctttcctagtgctcatcagcggttttaggaattcactaacacccccaaaatttgttttttgttttttgctttttttccttttccttttctctgtgatatcatgagcctgtaaggacaaatggcatatttgggcataactgcttgactctgtaactacttttttaaaatcaaaattgaaaaggtattaattgcttctggctttttaatttttttttttagagacaaagatgaaaccagataggaaatacagtttttatgttttctacttactaaaatattagtttcttctaaatattactttatttgtatttcactaaattccaaagcaaaaatcagatatctgagatgaacaattttgaatgggttaaggtaggagtaataagcattgtgttcactcatacataggtgagggaattttatttatagcgagaaatataaaagtattttgacttactcttttttcaaggagtcgctaggaaagggtagaagaactgagaataagacatctagattccatttctggtttatatgtagctcttttgcctaatttatatataattttgtcataagataagtccagtaactgtcctgtcttagataacgtacagaggctgaagtgaccaaagatccattccttattacttttctaattaaaagaagagttagctagatttctagtagtagtattctagatattgataagacattattcctaatgccaactacaaatattcaactactcagaatgtatttaaaaaattgtttggtacagcattaatgttggtgattcctttctcccatcttatttcccttcccttctattctttcccatgtatttcttttgcctaaaagaatattggtatgattctcatttgctactttgagtatataactccatcagactttccagagttcttcagggatggagctcaaagtttacatttttccatatatgtctttttttttcttgacctttttccaccctgtaatttccccttgacttacccactgccctccccaatctgcaacagtgacagtttgctgcctcaaaacagagcattcaaatgaattcgcttagccaataacttctgtgaagttgccttttctaatggtgttattactcagtgatgcacaaatgtggtatttgccctactggtaggcaaacaaaggtctggttaagaatggtaacctgctgttttctttaaaggagagccaaagacttgtgctttactctgttttggttttgggggaagtagtagccattttgatcatgaaaccttttagtatttgtgagttgattgtactgtgtaagtagatttatctaaagttaactgttaaagttagctagccttataaaatgtaaaagtaatgaaaattcatcagtttctctaagccagtgaatgtcgtcttttgtaatattgtgtataagcatttgtgcccaccccagcttctgctatcactgtggtcaagtcatgggtctgagtaaaagaattcttgagtatgtgactggtgagaaataactaactatagtcagtacatgtacagattgttaaaattcaagacaaaatactttcactaaaaaaaaggattcgtctcagtaaagaagtattcagttgctgtcacttacatacaaatggtggtgggtagcagtctcaccatttttctactctctttttgctcgttttaaataattgagtaaaggttttatttgtaaaatctatctgtaaaaagcacctgtaacgatttatatgtcattgaaaggaatggcccagttactttttaggagagattaataacctacctggaaattaactgcagtgtttacttagattttttccccctaataagagtctaagtgtgttaaatttttaactgatgatatggttacagtgttgcaaggtgatctcttcccctgaaaaatctgcctatccttttaagaaaaattagacctactaaactaaagcaaattttactttcatcattagcacctaaacaagcaagcagtctactactgtcatcattttacctgagtgcccattttgctgatccacattcatacctttctaccttggacagctatgatttttatatttatttgttgcttcagctcaggtttatgaaattttcctgctgaaatgacttattgggagttgtaggttgattatagttactattaaacattttctcaatttagcttttctgagccacttcaagaagaaagctgtttttgtcaaaaggtactattaattgtagcaagtaaatcttaagatttgaatttttaagattttatttctgtgttcactaaagatctttccacaagtaatagattataattgataagtaatactagctatagtgttaataaagagtaagactatcaccaccaggaataagtaacaccttttaataataaatctattcctaataggtatgttttcaatactgcactgaacaaagtgggtaaagagccctttgaaatcttattgtaataaagggacttacctcaccactggaatccttgttttcagagcctctggattttcagccaaacactgaatttctcctaaactttatccctgaaacatccctagagaacgaactttattttcacaagaaaataaggcacaataagggggaagaacttaaacctcaacataatatcgtgtccaaaaatgtgtatttagaaaaataaaatcctgtggagtttgttatcctaatgtttattttatactagataaggtgacttgttttcttgtattgaggtcttactgtttcagatttgtttttgtttctgttctaactctaagcagacagagctcacaagtctttggcatccattttaggttgtacactcagagtcatcttataactggaaactgtcaggtggtcccccaccccagtgagtgtatgaaagagtcaagaaaaagattggaaacaaactattgggtgaataattggttgctctattattattattattattatttgcctttttttaatcaccatttatttgtgtaatctttctccattgattggctgtcattcttataatatctgaactaccccataaaataattctctgacttaaaggcatttagcttttgcttatcgtttttacatcctctattcaactaagacactgtcttgagagttattttttccagatggatcgttggcctaaattttcacacttctcccctgttcatcctttttcctcttccctgcttcctgggaataaaaggaacttttttaaaaaaattaattagtccacaggtctcattatctttctttatgattaatctatgactttttggtacaagaacaatggaaaaagtgaattaaggtaatgaacaaaacctttcacccacttaaacattttccagttttgagattcctcttcgtgtttgtggtgtcttccccttgttaccccttctgccctttttctctgactatggtaatttggtctttaggctcatatcagtctccccgagacattctgcagtcattatcacctttttgggtggattttattttgttttattttgttttttttaaaaaaataactttttaacattggtgcatatttgcttgggatagagcttgtgtaatttaccaatcgtattgattgtaagtgattgtgccctgcagaggtatatttaacaagacaaaaataatcttggttaataaaggagcccatgagatttgagtcaggttgtaagtgaaatcacttacacttttggatagaatttatactcctgctcttataaatcagtggtagacttaccattttttaaagttttcttgcatttttttgtttttttattgccacagctccctattctttcttgcctgcctccacccccctgttcaggaaaaaaaaaaattgagccttaaagtgacagctgattttttaattgctgaattttgtgaaattttactttttccaagtgtttccaactttaaaaagagaagtgaagacaaataggttggaatggtgaagacaaatggattggaatttcacaggctgtgaataattccttaggatctggcaaaccgtgaagtcttatttgaagaccttatctcctgagagttcttttggagtaggaaaaagaaccctatttgaaatagaccgtttttctcttgtttttaatctgtttaatatttctgatttttaagcagctttcaaaacaagtgtggtggaaaaaaagaaatagtagtaggaagatgtttagggcagcagaactctgggtctaaataagtacatgttcccacttgttgccgatttttgagagtactagggccatctttctcaattttgtattatttgtgtgcatgtttatatcaaagatgcccattttgttaaaatgctatttcctttattaccttggaaactgactcagcctcatgttgctcctaattagtgtttaaggctcccatgagttgcagataaaatgatttattttaacaagtagaaggaggtgattcaccttttggattgtaaatatatgaaaatgtctacaaggtctttatctgctttctgtcagcatttatattaaatgataaattaatgaggaa

SEQ ID NO: 177085 - DNA, 3081 bp, Homo sapiens
  Payload ID: 14749
  Gene Symbol: RC3H2
  Gene Name: ring finger and CCCH-type domains 2
  ENST ID: ENST00000335387
  CDS Start-End: 174-1694
ctccgccgagctctgccccggcgagacgaggcgcctccgtcgccaagccgcgccgtcgcggggctcccgggagcggcccttagcgaccccgcccgggccccctcagcttacaaaacactacacagcaaaataatgatctgctagactgctaacccgagcatccagcttccacaatgcctgtgcaggcagctcaatggacagaatttctgtcctgtccaatctgctataatgaatttgatgagaatgtgcacaaacccatcagtttaggttgttcacacactgtttgcaagacctgcttgaataaacttcatcgaaaagcttgtccttttgaccagactgccatcaacacagatattgatgtacttcctgtcaacttcgcacttctccagttagttggagcccaggtaccagatcatcagtcaattaagttaagtaatctaggtgagaataaacactatgaggttgcaaagaaatgcgttgaggatttggcactctacttaaaaccactaagtggaggtaaaggtgtagctagcttgaaccagagtgcactgagccgtccaatgcaaaggaaactggtgacacttgtaaactgtcaactggtggaggaagaaggtcgtgtaagagccatgcgagcagctcgttcccttggagaaagaactgtaacagaactgatattacagcaccagaaccctcagcagttgtctgccaatctatgggccgctgtcagggctcgaggatgccagtttttagggccagctatgcaagaagaggccttgaagctggtgttactggcattagaagatggttctgccctctcaaggaaagttctggtactttttgttgtgcagagactagaaccaagatttcctcaggcatcaaaaacaagtattggtcatgttgtgcaactactgtatcgagcttcttgttttaaggttaccaaaagagatgaagactcttccctaatgcagctgaaggaggaatttcggagttatgaagcattacgcagagaacatgatgcccaaattgttcatattgccatggaagcaggactccgtatttcacctgaacagtggtcctctcttttgtatggtgatttggctcataaatcacacatgcagtctatcattgataagctacagtctccagagtcatttgcaaagagtgtccaggaattgacaattgttttgcaacgaacaggtgacccagctaacttaaatagactgaggcctcatttagagcttcttgcaaacatagaccctaatccagacgctgtttcaccaacttgggagcagctggaaaatgcaatggtagctgttaaaacagtagttcatggccttgtggacttcatacaaaattatagtagaaaaggccatgagacccctcagcctcagccaaacagcaaatacaagactagcatgtgccgagatttgcgacagcaagggggttgtccacgaggaacaaattgtacatttgcccattctcaggaagagcttgaaaagtgtaacccccgtggactatatcttcattgttgtctcctttcctcagtggctagcttgggcactgtacataatgagctctacaagcagcagcattgtgatagagagaagataagtgtgtgtgcagtgaaaagagcagaaacatgcttctcttctcagtttttttccccacttgaagtgcctagagaagaggattaaggagtcctaaggaaaaaagatgctgtttgtacccaatcgaactagttctatatacagaatttcacatcaagataatttgggagactccaggaaatacattcagcttgtccatacctgaaatagagctttttagctaaaaggggagcttttgagaaagttcgactaaaaaagtcagagaagaaactgtggtttcattgccattccaccctcaattagtgcccaggctgaaaatccattttcttctttctcataccttcaaacagacttcacattcttcatctgcagtacctagttcagaactttattatattttgccagacttgtaatagtagcagtaaaaataataatagccaaactaggtgtagtggctcatgcctgtattcccagcagtttgggaggcaaaggcaggaggataccttgagtccaggagtttgagaccagcctgggcaacatagtgagacctcacctctacaaaaaaataaacaaaattggctgagcatagtggcatacgcctgtcatcttagctactcaggaggctgaggtgggaggattgcttgaactcgggaggtcaggtctgccgtgaactgagattataccactgtattccaacccgggcagcagagcaagactctgtctcaaaaatataaataaataaaaataataaaataataaatatataaaatatcactcattcaaaaataataataatggcaaaattattggtcacatttttagtgtttcacatggtaatccagttggttttactgcttcagtggctttttatccagtatcttcctatatctcaatctgtcttttccatttccactattttctttttaaaatatgtgtgtctcctttaaattcttaattagttcctcagtacatcacagaatctcatcctgattttatcctctagctctactctgccatttgtatactttgtttttaaggtatattcaattaatcactgttgattactatataaatttcttttactcttcttttcacttgtctatattgtttattccatattgtattattttctctctcctctttatctggataactatttctaatcatactcagatattatcttccctccacagacttccctaggcagtgttaattgcatccttcaccatgctgccatagcactccatacatagtagtttaaaaattatggtatagttagctgggtgtggtggcaagcacctgtaatcccagctgctcgggaggctgaggcgggagaatggcttgaacttgggaggcagaggttgcagtgagccgagatggcgccactatactcctgtgtggacgacagagcaagattccgtctcaaaaaaataaatataaataaataaataaaaattatggtatagttataaaa

SEQ ID NO: 177086 - DNA, 3991 bp, Homo sapiens
  Payload ID: 14749
  Gene Symbol: RC3H2
  Gene Name: ring finger and CCCH-type domains 2
  Uniprot ID: Q9HBD1
  ENST ID: ENST00000357244
  CDS Start-End: 242-3817
gtcgcggccttcgccgccgccaacggggctgtccctgtagctcccgatggagtttgaggtcgtgaaacctccgccgagctctgccccggcgagacgaggcgcctccgtcgccaagccgcgccgtcgcggggctcccgggagcggcccttagcgaccccgcccgggccccctcagcttacaaaacactacacagcaaaataatgatctgctagactgctaacccgagcatccagcttccacaatgcctgtgcaggcagctcaatggacagaatttctgtcctgtccaatctgctataatgaatttgatgagaatgtgcacaaacccatcagtttaggttgttcacacactgtttgcaagacctgcttgaataaacttcatcgaaaagcttgtccttttgaccagactgccatcaacacagatattgatgtacttcctgtcaacttcgcacttctccagttagttggagcccaggtaccagatcatcagtcaattaagttaagtaatctaggtgagaataaacactatgaggttgcaaagaaatgcgttgaggatttggcactctacttaaaaccactaagtggaggtaaaggtgtagctagcttgaaccagagtgcactgagccgtccaatgcaaaggaaactggtgacacttgtaaactgtcaactggtggaggaagaaggtcgtgtaagagccatgcgagcagctcgttcccttggagaaagaactgtaacagaactgatattacagcaccagaaccctcagcagttgtctgccaatctatgggccgctgtcagggctcgaggatgccagtttttagggccagctatgcaagaagaggccttgaagctggtgttactggcattagaagatggttctgccctctcaaggaaagttctggtactttttgttgtgcagagactagaaccaagatttcctcaggcatcaaaaacaagtattggtcatgttgtgcaactactgtatcgagcttcttgttttaaggttaccaaaagagatgaagactcttccctaatgcagctgaaggaggaatttcggagttatgaagcattacgcagagaacatgatgcccaaattgttcatattgccatggaagcaggactccgtatttcacctgaacagtggtcctctcttttgtatggtgatttggctcataaatcacacatgcagtctatcattgataagctacagtctccagagtcatttgcaaagagtgtccaggaattgacaattgttttgcaacgaacaggtgacccagctaacttaaatagactgaggcctcatttagagcttcttgcaaacatagaccctaatccagacgctgtttcaccaacttgggagcagctggaaaatgcaatggtagctgttaaaacagtagttcatggccttgtggacttcatacaaaattatagtagaaaaggccatgagacccctcagcctcagccaaacagcaaatacaagactagcatgtgccgagatttgcgacagcaagggggttgtccacgaggaacaaattgtacatttgcccattctcaggaagagcttgaaaagtatcgattaaggaacaaaaagatcaatgccactgtaagaacgtttcctcttctaaataaagttggtgtaaacaacactgtcacaaccacagccggaaatgtcatttctgtcataggaagtactgaaacaacagggaaaattgttccaagtacaaacggaatttcaaatgcagaaaacagtgtttcccagctaatctcacgtagtactgacagtaccttaagagctctggagaccgtgaagaaagtgggaaaggttggcgctaatggtcagaatgctgctgggccctctgcagattctgtaactgaaaataaaattggttctccacccaagactcctgtaagtaatgtagcagctacctcagctgggccctctaatgttggaacagagctgaattctgtgcctcaaaaatccagcccatttctaactagagtaccagtatatcctccgcattctgaaaacattcagtattttcaagatccaaggactcagataccctttgaagtcccacagtacccacagacaggatactatccaccacctccaacggtaccagctggtgtggctccctgtgttcctcgctttgtgaggtccaataacgttccagagtcctccctcccacctgcttccatgccatatgccgatcattacagtacattttcccctcgagatcgaatgaattcttctccttaccagcctcctcctccgcagccgtatggaccagttcctccagtaccttctggaatgtatgctcctgtgtacgacagcaggcgcatctggcgcccacctatgtaccaacgagatgacattattagaagcaattctttacctccaatggatgtgatgcactcatctgtctatcagacatctttgcgggaaagatataactcattagatggatattattcggtggcttgtcagccaccaagtgagccaaggacaactgtgcctttaccaagggaaccttgtggtcatttgaagaccagttgcgaggagcagataagaagaaagccagatcagtgggcacagtaccacactcagaaagcacctcttgtctcttcaactcttcctgtggcaacacagtcaccaacaccaccttctcctctgttcagtgtagactttcgtgcggatttctcagagagtgtgagtggtacaaaatttgaagaagatcatctttcccattattctccctggtcttgtggcaccataggctcctgtataaatgccattgattcagagcccaaagatgtcattgctaattcaaatgctgtgttaatggacctggacagtggtgatgttaagagaagagtacatttatttgaaacccagagaaggacaaaagaagaagatccaataattccctttagtgatggacccatcatctcaaaatggggtgcgatttccagatcttcccgtacaggttaccataccacagatcctgtccaggccactgcttcccaaggaagtgcgactaagcccatcagtgtatcagattatgtcccttatgtcaatgctgttgattcaaggtggagttcatatggcaacgaggccacatcatcagcacactatgttgaaagggacagattcattgttactgatttatctggtcatagaaagcattccagtactggggaccttttgagccttgaacttcagcaggccaagagcaactcattacttcttcagagagaggccaatgctttggccatgcaacagaagtggaattccctggatgaaggccgtcaccttaccttaaaccttttaagcaaggaaattgaactaagaaatggagagttacagagtgattatacagaagatgcaacagatactaaacctgatagggatatcgagttagagctttcagcacttgatactgatgaacctgatggacaaagtgaaccaattgaagagatcttggacatacagcttggtatcagttctcaaaatgatcagttgctaaatggaatggcagtggaaaatgggcatccagtacagcagcaccaaaaggagccaccaaagcagaagaaacagagtttaggtgaagaccatgtgattctggaggagcaaaaaacaattctgccggtaacttcttgctttagccagccactcccagtgtctattagcaatgcaagttgcctccccatcaccacatctgtcagtgctggcaacctcattctgaaaactcatgttatgtctgaagataaaaacgactttttaaaacctgttgcaaatgggaagatggttaacagctgaaaggaggttcatctttcaaatttgtgaccacaccatggaagcatttacactagctttttatatatataatatatattatataatgtatattttttttaaaaaaaagatattactgggggcatccatttcctgtggactctttgatacttcaagccctcttgcattagcattatg

SEQ ID NO: 177087 - DNA, 9248 bp, Homo sapiens
  Payload ID: 14749
  Gene Symbol: RC3H2
  Gene Name: ring finger and CCCH-type domains 2
  Uniprot ID: Q9HBD1
  ENST ID: ENST00000373670
  CDS Start-End: 602-4177
agccaagtcttgtcagagatttcctctttcaggtggcaaagctgttttcttcacacttgagtctctacaatattgtttggatcagtagtttccaaagttcattaactcctggccatactttattatgttttggggtactggttatccaagggaaacacttttttaaacaacaaaacaaaaaaaccgcccagcagtccaaagtaatttgtgttcctaaaaatggaatatggaaagttaatttgcttgtttgatgtggtcgttgagaaaaatacataaaagctttgatgtttattatgtgagcaaccaatataaatacagtttagttgaaaggaacactattaaggtattgtttccaggcagaatttcagaaatgtaattaattcagcaaataggttttttaaaaaagacatccaaaggttataaaattatttagaagtattttaggtctgaagctgtaatagttgacttaagcaattaactcttcaaaggtgaatgatgaatatgtggttaattcatacttttgtccatttctagcttacaaaacactacacagcaaaataatgatctgctagactgctaacccgagcatccagcttccacaatgcctgtgcaggcagctcaatggacagaatttctgtcctgtccaatctgctataatgaatttgatgagaatgtgcacaaacccatcagtttaggttgttcacacactgtttgcaagacctgcttgaataaacttcatcgaaaagcttgtccttttgaccagactgccatcaacacagatattgatgtacttcctgtcaacttcgcacttctccagttagttggagcccaggtaccagatcatcagtcaattaagttaagtaatctaggtgagaataaacactatgaggttgcaaagaaatgcgttgaggatttggcactctacttaaaaccactaagtggaggtaaaggtgtagctagcttgaaccagagtgcactgagccgtccaatgcaaaggaaactggtgacacttgtaaactgtcaactggtggaggaagaaggtcgtgtaagagccatgcgagcagctcgttcccttggagaaagaactgtaacagaactgatattacagcaccagaaccctcagcagttgtctgccaatctatgggccgctgtcagggctcgaggatgccagtttttagggccagctatgcaagaagaggccttgaagctggtgttactggcattagaagatggttctgccctctcaaggaaagttctggtactttttgttgtgcagagactagaaccaagatttcctcaggcatcaaaaacaagtattggtcatgttgtgcaactactgtatcgagcttcttgttttaaggttaccaaaagagatgaagactcttccctaatgcagctgaaggaggaatttcggagttatgaagcattacgcagagaacatgatgcccaaattgttcatattgccatggaagcaggactccgtatttcacctgaacagtggtcctctcttttgtatggtgatttggctcataaatcacacatgcagtctatcattgataagctacagtctccagagtcatttgcaaagagtgtccaggaattgacaattgttttgcaacgaacaggtgacccagctaacttaaatagactgaggcctcatttagagcttcttgcaaacatagaccctaatccagacgctgtttcaccaacttgggagcagctggaaaatgcaatggtagctgttaaaacagtagttcatggccttgtggacttcatacaaaattatagtagaaaaggccatgagacccctcagcctcagccaaacagcaaatacaagactagcatgtgccgagatttgcgacagcaagggggttgtccacgaggaacaaattgtacatttgcccattctcaggaagagcttgaaaagtatcgattaaggaacaaaaagatcaatgccactgtaagaacgtttcctcttctaaataaagttggtgtaaacaacactgtcacaaccacagccggaaatgtcatttctgtcataggaagtactgaaacaacagggaaaattgttccaagtacaaacggaatttcaaatgcagaaaacagtgtttcccagctaatctcacgtagtactgacagtaccttaagagctctggagaccgtgaagaaagtgggaaaggttggcgctaatggtcagaatgctgctgggccctctgcagattctgtaactgaaaataaaattggttctccacccaagactcctgtaagtaatgtagcagctacctcagctgggccctctaatgttggaacagagctgaattctgtgcctcaaaaatccagcccatttctaactagagtaccagtatatcctccgcattctgaaaacattcagtattttcaagatccaaggactcagataccctttgaagtcccacagtacccacagacaggatactatccaccacctccaacggtaccagctggtgtggctccctgtgttcctcgctttgtgaggtccaataacgttccagagtcctccctcccacctgcttccatgccatatgccgatcattacagtacattttcccctcgagatcgaatgaattcttctccttaccagcctcctcctccgcagccgtatggaccagttcctccagtaccttctggaatgtatgctcctgtgtacgacagcaggcgcatctggcgcccacctatgtaccaacgagatgacattattagaagcaattctttacctccaatggatgtgatgcactcatctgtctatcagacatctttgcgggaaagatataactcattagatggatattattcggtggcttgtcagccaccaagtgagccaaggacaactgtgcctttaccaagggaaccttgtggtcatttgaagaccagttgcgaggagcagataagaagaaagccagatcagtgggcacagtaccacactcagaaagcacctcttgtctcttcaactcttcctgtggcaacacagtcaccaacaccaccttctcctctgttcagtgtagactttcgtgcggatttctcagagagtgtgagtggtacaaaatttgaagaagatcatctttcccattattctccctggtcttgtggcaccataggctcctgtataaatgccattgattcagagcccaaagatgtcattgctaattcaaatgctgtgttaatggacctggacagtggtgatgttaagagaagagtacatttatttgaaacccagagaaggacaaaagaagaagatccaataattccctttagtgatggacccatcatctcaaaatggggtgcgatttccagatcttcccgtacaggttaccataccacagatcctgtccaggccactgcttcccaaggaagtgcgactaagcccatcagtgtatcagattatgtcccttatgtcaatgctgttgattcaaggtggagttcatatggcaacgaggccacatcatcagcacactatgttgaaagggacagattcattgttactgatttatctggtcatagaaagcattccagtactggggaccttttgagccttgaacttcagcaggccaagagcaactcattacttcttcagagagaggccaatgctttggccatgcaacagaagtggaattccctggatgaaggccgtcaccttaccttaaaccttttaagcaaggaaattgaactaagaaatggagagttacagagtgattatacagaagatgcaacagatactaaacctgatagggatatcgagttagagctttcagcacttgatactgatgaacctgatggacaaagtgaaccaattgaagagatcttggacatacagcttggtatcagttctcaaaatgatcagttgctaaatggaatggcagtggaaaatgggcatccagtacagcagcaccaaaaggagccaccaaagcagaagaaacagagtttaggtgaagaccatgtgattctggaggagcaaaaaacaattctgccggtaacttcttgctttagccagccactcccagtgtctattagcaatgcaagttgcctccccatcaccacatctgtcagtgctggcaacctcattctgaaaactcatgttatgtctgaagataaaaacgactttttaaaacctgttgcaaatgggaagatggttaacagctgaaaggaggttcatctttcaaatttgtgaccacaccatggaagcatttacactagctttttatatatataatatatattatataatgtatattttttttaaaaaaaagatattactgggggcatccatttcctgtggactctttgatacttcaagccctcttgcattagcattatgaaaaaaaaaaagaaaatttactttactagggtaacatgttcactttccagaaatgattggaatttggacaacatttaacttaagcttcaagcagctttttatgagtttgtagcaatccggtgcagtaactgagccatttcctattttaaatggcttctatagaaaattaacaactcagttattaaactagcaggatcctacaatgatacatctagtgaaagtagacttagttaacttatttatttctattttatgtttcactgagagaagtttccatctcattccagctgctttatttatctttttcatggaactttgcatggatttctttttctttttttaattttgaagagtggagttagatgttcttaccatagaattttacagggttatatactagcattctttactgcattatatgtaggagtgtggtgcagtgcttttatctgtagcatataatttttttttaattttccatttttcaagagtagtttctgctttgttaatatttatacacaggctacttgttgaagtaattaattaaaaatataaccaagtgcctaagtctttcagctgatgtactagatattaaattctcctaagttatgcagaatcgtttttacaattttgataaattatgcactaatgtaatggcagttttttaaaatgcagatttaagcctgtacattattgaatctgatgacttggcaaaagaatcaggtgctttcagctttcttgagaaaaccctgtatgtagcgtttgcactgactaacaagatggtattgctgggtttttaatttaaactaattaatttggttgttcattgcattatcttggttaaatattgtttattgttacttcatgttggggtttagtttttcttgttttttgactgttaggttgataagactatgaactgtgtaatagtagaacagtggctaacatttattcatacttaagaacatgaataatttctgccttgctaaaatgtgactgaaatggttttgacttggcatctgaaagtatacaatgtgttcaacaagtcatgcatcagatttgtgggaggtattgtactgaaacctaaatttcagtcaacatttgaaaagaagagctgggcattccttcctggtgatctttacctatagtttatctatctgtttttcttctgtttctttaagattagtttgacttttattattatttttttaattaacttctgtgaagttgtttactctgaaaattgtactggaatattttaagccaagctgatctttcaccaggtgtactgtatgtaagggcttttcctgctagcaagatgcttaaacaggatcatgttattggtcgtctgagctatttagttgttttacaaaaccacagcattgtatcagataagattttgataaaaagttttgtgcacatttccaggggcgggagggttgacatttccctgaaatttcttgattagaatgagtaaatactggtgtttgatacctgtcttaatgaacatgctcataaggtgactgataagttgtaaatatacctgagaaacaaaggggtagttttgatattctggtgtcagtatggaagatcttacacatttatttaatactcaaatgtatgaagatgtttgtttgtagcataacaacagcacagtagccttgacttagtttcctttggttagtactgtaccttttttgccatggccagtgctccccatccctatgaagacattttatttatttcactctgtaacctgaaatgaataggaacaagggttttaaaccatgttacattaacttttctgacattataaattagcctagaatattacaggaacatgattgttatataatttatatcagaacctttctataaatatgtgcttattacatttgaaatgcttccaatgtactttatttgctgtttgtaattccaaaaaggatatgcaaaccagtctgtctatttcatggatatttaatagtgagatcttccatgttgaaggtaatgtatttttttttaagattttaaaattgctattttgttacaaaatagagacctattaacagtttgagagctccttatgtgccctcagggaaagaaccctctgtgcaacagaactacacaaaacatcttcagcacgttctgagggtgaatatatactacataaattgatcttgtgtatttaaccttatctttttaattttaaaattgaaattttgaaacttggttgtgctctgctggagggggttgggataaactgcttagatgtttgcctacttgtccagtgaaattacatttgcatcagtatatgtatatacctgccaaccttattggtatgtctcagaacatttatattaaaataatgcttgtcttgcagcaggtgatcccataaaacaataactccctgttcttaaaaacttactctctttttcactaacaacataggaattgtttctgtgttgagattattctgtgttgcatccattctctatgtagtggtcaccttctgtctgtcatggtgggcttaatgtgaagtaaagccattggttctctgccactttcgaagaaagggcagttcatctgatccttcttcagaatggtacctactgatatcatcgaggaaaatgttacaaatcagacctaggatatgactttttaaaattgaggcatttcccgtcatttggcctttttaccaacaagatgtgatgtacaaatttggaatcaaaggatacaaagcaacaagagaggaaatgtgtaatgtgggtaaccaaactgcatatgttacctattgtctaatcagaaaaaatagtctgaggtctggaaagcaggaaagtggtggttattttctttcattttttgtgtttttgttttttaatttctaagttccattctgaaatccatgtgccgcattcagttactgtggttgtagcatcagtttttttgtggtttcatttcattttatgaattcagaggaagttacatatatattttttctagttggtacctgaacaaagcagattcccttgcctttgctgccacgtcttattttcaatgccatgtgataaaccagtgtcatacatgaaagttgtgcattgtaattttcaaaaaaaagggagttcattaggccagtggcactgatttttccttcccatcatagctatttattctagtaagaggataataaaagaaatttcctatacaagaactgaaattttccatttgtatggatctagtcactttcagatttcaatttgaggttaagtatataaagcacatcccaattttatatgctgccttgagaaaattacaggatgcacggcaatttgtaggaatttcaaatgggatcatttaaacatttgaaaaattattttaaaaaccatctagtttgcttttggattttagacattaaagcctatgttgtcttgttaacaggggtggaatgtataaccatcagattcagcatgtgatttcacctttgaatctgagtatttcttccctatcttctttgagtcatttttggagcagactgtcaccagtattgataactaagcattaaagggaaaagttgcattgcaactatgcattggtttcctggaagaacttttcttttgttttagtgaatgaagaggcttgatgggatcacttactgtaactccttctacataaggaccccttctgcaagcagaacacaaaagaacatgctcaaggagtatcccattttctggataaattgaagaagtttgctagtaatgtctttatactagcgtcttccttgtatccctttgctggcaagggaatacaaggcgtcaagaccacagatcaaaacaccccacatttgagtggagtcttatttttactccaagagcagttattcccttctagtctaaaattggcagttttttcttttttttaataaaatttttaaaatattcccaaaccagtggaacacagacactggctgcacttagtactgccaaaagccaaggtcatttgcacatattccatcaacctgtcgagaattaggcctcactttataacccaaggcatggaagtgcatgcattctcttagctgggcaaacaattatactgtagttgtgatacaacacatgtggcttttatttgtactgcacatatccactgtacagccacttgggagtatcgtggttagcttgcagcaactgctgtctgcatttatactgtttattgcatattcttttccctggaagtgaaagagaaatgtttttcttgttgcattgattacattttataaatttgcttagctggaaagtttgggaaaagaggcctgtttgtcaattgtacaaccgattgtgaagctctagtgtgaatatttttacgtctgtattagacattttctttgcaaatctattgttcgattgaaatgtaaatgaaattaaagatggtgtacacccatcatgtaaaaagcaggcaccatctctaagatggatttaatgctcatttttaaggcatatactcagcttctatttaaaactataatttaaaataattctgtacaatgaaatggggaatatatatgggaataaattctattccatttatttcaatttgaatttccaaattgtaatgtttccctttgtgctataggaataggattaaatgggggaagactaggatttataaggcctgtatatggggggagggcagagatggaacaatgagggttgtgatgatagtgaatagcaaagagtgaattctgtgtgtttttgctgtagcactgaagtgaagagatattagctttggctgttcacaaaatagagcatcatgattttcagtgtttgagagaaaattgatggaaaaagtttgcagtacttgacatgtatttgcatgcacaaaataaaattatttgtccaccttaaaa

SEQ ID NO: 177088 - DNA, 666 bp, Homo sapiens
  Payload ID: 14749
  Gene Symbol: RC3H2
  Gene Name: ring finger and CCCH-type domains 2
  ENST ID: ENST00000398671
  CDS Start-End: 1-336
ttaatggacctggacagtggtgatgttaagagaagagtacatttatttgaaacccagagaaggacaaaagaagaagatccaataattccctttagtgatggacccatcatctcaaaatggggtgcgatttccagatcttcccgtacaggttaccataccacagatcctgtccaggccactgcttcccaaggaagtgcgactaagcccatcagtgtatcaggtggagttcatatggcaacgaggccacatcatcagcacactatgttgaaagggacagattcattgttactgatttatctggtcatagaaagcattccagtactggggaccttttgagccttgaacttcagcaggccaagagcaactcattacttcttcagagagaggccaatgctttggccatgcaacagaagtggaattccctggatgaaggccgtcaccttaccttaaaccttttaagcaaggaaattgaactaagaaatggagaggtaaagaaactgaacctttcggcttcatgcttaatgtatttgttttctgctgctgcatcttggttataccattactgagtgcattttggtgtgcctatctctgatggatgattgattgcttttaaaacttataacagaaataaaattgtaatcccagatttcttaaataattctttaa

SEQ ID NO: 177089 - DNA, 923 bp, Homo sapiens
  Payload ID: 14749
  Gene Symbol: RC3H2
  Gene Name: ring finger and CCCH-type domains 2
  ENST ID: ENST00000454740
  CDS Start-End: 1-566
cttatgtcaatgctgttgattcaaggtggagttcatatggcaacgaggccacatcatcagcacactatgttgaaagggacagattcattgttactgatttatctggtcatagaaagcattccagtactggggaccttttgagccttgaacttcagcaggccaagagcaactcattacttcttcagagagaggccaatgctttggccatgcaacagaagtggaattccctggatgaaggccgtcaccttaccttaaaccttttaagcaaggaaattgaactaagaaatggagagttacagagtgattatacagaagatgcaacagatactaaacctgatagggatatcgagttagagctttcagcacttgatactgatgaacctgatggacaaagtgaaccaattgaagagatcttggacatacagcttggtatcagttctcaaaatgatcagttgctaaatggaatggcagtggaaaatgggcatccagtacagcagcaccaaaaggagccaccaaagcagaagaaacagagtttagggaggagcaaaaaacaattctgccggtaacttcttgctttagccagccactcccagtgtctattagcaatgcaagttgcctccccatcaccacatctgtcagtgctggcaacctcattctgaaaactcatgttatgtctgaagataaaaacgactttttaaaacctgttgcaaatgggaagatggttaacagctgaaaggaggttcatctttcaaatttgtgaccacaccatggaagcatttacactagctttttatatatataatatatattatataatgtatattttttttaaaaaaaagatattactgggggcatccatttcctgtggactctttgatacttcaagccctcttgcattagcattatgaaaaaaaaaaagaaaa

SEQ ID NO: 177090 - DNA, 3623 bp, Homo sapiens
  Payload ID: 14749
  Gene Symbol: RC3H2
  Gene Name: ring finger and CCCH-type domains 2
  Uniprot ID: Q9HBD1
  ENST ID: ENST00000423239
  CDS Start-End: 300-3494
ccgtggtgaggaggaggaggaggaggaggcggaggtggagggaggaggaggaggccccgtcgcggccttcgccgccgccaacggggctgtccctgtagctcccgatggagtttgaggtcgtgaaacctccgccgagctctgccccggcgagacgaggcgcctccgtcgccaagccgcgccgtcgcggggctcccgggagcggcccttagcgaccccgcccgggccccctcagcttacaaaacactacacagcaaaataatgatctgctagactgctaacccgagcatccagcttccacaatgcctgtgcaggcagctcaatggacagaatttctgtcctgtccaatctgctataatgaatttgatgagaatgtgcacaaacccatcagtttaggttgttcacacactgtttgcaagacctgcttgaataaacttcatcgaaaagcttgtccttttgaccagactgccatcaacacagatattgatgtacttcctgtcaacttcgcacttctccagttagttggagcccaggtaccagatcatcagtcaattaagttaagtaatctaggtgagaataaacactatgaggttgcaaagaaatgcgttgaggatttggcactctacttaaaaccactaagtggaggtaaaggtgtagctagcttgaaccagagtgcactgagccgtccaatgcaaaggaaactggtgacacttgtaaactgtcaactggtggaggaagaaggtcgtgtaagagccatgcgagcagctcgttcccttggagaaagaactgtaacagaactgatattacagcaccagaaccctcagcagttgtctgccaatctatgggccgctgtcagggctcgaggatgccagtttttagggccagctatgcaagaagaggccttgaagctggtgttactggcattagaagatggttctgccctctcaaggaaagttctggtactttttgttgtgcagagactagaaccaagatttcctcaggcatcaaaaacaagtattggtcatgttgtgcaactactgtatcgagcttcttgttttaaggttaccaaaagagatgaagactcttccctaatgcagctgaaggaggaatttcggagttatgaagcattacgcagagaacatgatgcccaaattgttcatattgccatggaagcaggactccgtatttcacctgaacagtggtcctctcttttgtatggtgatttggctcataaatcacacatgcagtctatcattgataagctacagtctccagagtcatttgcaaagagtgtccaggaattgacaattgttttgcaacgaacaggtgacccagctaacttaaatagactgaggcctcatttagagcttcttgcaaacatagaccctaatccagacgctgtttcaccaacttgggagcagctggaaaatgcaatggtagctgttaaaacagtagttcatggccttgtggacttcatacaaaattatagtagaaaaggccatgagacccctcagcctcagccaaacagcaaatacaagactagcatgtgccgagatttgcgacagcaagggggttgtccacgaggaacaaattgtacatttgcccattctcaggaagagcttgaaaagtatcgattaaggaacaaaaagatcaatgccactgtaagaacgtttcctcttctaaataaagttggtgtaaacaacactgtcacaaccacagccggaaatgtcatttctgtcataggaagtactgaaacaacagggaaaattgttccaagtacaaacggaatttcaaatgcagaaaacagtgtttcccagctaatctcacgtagtactgacagtaccttaagagctctggagaccgtgaagaaagtgggaaaggttggcgctaatggtcagaatgctgctgggccctctgcagattctgtaactgaaaataaaattggttctccacccaagactcctgtaagtaatgtagcagctacctcagctgggccctctaatgttggaacagagctgaattctgtgcctcaaaaatccagcccatttctaactagagtaccagtatatcctccgcattctgaaaacattcagtattttcaagatccaaggactcagataccctttgaagtcccacagtacccacagacaggatactatccaccacctccaacggtaccagctggtgtggctccctgtgttcctcgctttgtgaggtccaataacgttccagagtcctccctcccacctgcttccatgccatatgccgatcattacagtacattttcccctcgagatcgaatgaattcttctccttaccagcctcctcctccgcagccgtatggaccagttcctccagtaccttctggaatgtatgctcctgtgtacgacagcaggcgcatctggcgcccacctatgtaccaacgagatgacattattagaagcaattctttacctccaatggatgtgatgcactcatctgtctatcagacatctttgcgggaaagatataactcattagatggatattattcggtggcttgtcagccaccaagtgagccaaggacaactgtgcctttaccaagggaaccttgtggtcatttgaagaccagttgcgaggagcagataagaagaaagccagatcagtgggcacagtaccacactcagaaagcacctcttgtctcttcaactcttcctgtggcaacacagtcaccaacaccaccttctcctctgttcagtgtagactttcgtgcggatttctcagagagtgtgagtggtacaaaatttgaagaagatcatctttcccattattctccctggtcttgtggcaccataggctcctgtataaatgccattgattcagagcccaaagatgtcattgctaattcaaatgctgtgttaatggacctggacagtggtgatgttaagagaagagtacatttatttgaaacccagagaaggacaaaagaagaagatccaataattccctttagtgatggacccatcatctcaaaatggggtgcgatttccagatcttcccgtacaggttaccataccacagatcctgtccaggccactgcttcccaaggaagtgcgactaagcccatcagtgtatcagattatgtcccttatgtcaatgctgttgattcaaggtggagttcatatggcaacgaggccacatcatcagcacactatgttgaaagggacagattcattgttactgatttatctggtcatagaaagcattccagtactggggaccttttgagccttgaacttcagcaggccaagagcaactcattacttcttcagagagaggccaatgctttggccatgcaacagaagtggaattccctggatgaaggccgtcaccttaccttaaaccttttaagcaaggaaattgaactaagaaatggagaggtaaagaaactgaacctttcggcttcatgcttaatgtatttgttttctgctgctgcatcttggttataccattactgagtgcattttggtgtgcctatctctgatggatgattgattgcttttaaaacttataacagaaataaaattgtaatcccagatttcttaaataattctttaactagatcatcgggatttttgtttttttga

SEQ ID NO: 177091 - DNA, 749 bp, Homo sapiens
  Payload ID: 14749
  Gene Symbol: RC3H2
  Gene Name: ring finger and CCCH-type domains 2
  Uniprot ID: Q9HBD1
  ENST ID: ENST00000471874
  CDS Start-End: 26-682
ctaacccgagcatccagcttccacaatgcctgtgcaggcagctcaatggacagaatttctgtcctgtccaatctgctataatgaatttgatgagaatgtgcacaaacccatcagtttaggttgttcacacactgtttgcaagacctgcttgaataaacttcatcgaaaagcttgtccttttgaccagactgccatcaacacagatattgatgtacttcctgtcaacttcgcacttctccagttagttggagcccaggtaccagatcatcagtcaattaagttaagtaatctaggtgagaataaacactatgaggttgcaaagaaatgcgttgaggatttggcactctacttaaaaccactaagtggaggtaaaggtgtagctagcttgaaccagagtgcactgagccgtccaatgcaaaggaaactggtgacacttgtaaactgtcaactggtggaggaagaaggtcgtgtaagagccatgcgagcagctcgttcccttggagaaagaactgtaacagaactgatattacagcaccagaaccctcagcagttgtctgccaatctatgggccgctgtcagggctcgaggatgccagtttttagggccaggtaagataggttactatcttaccttttttattagctattggggcttgaggatgccaatttctggagctcggtgaatcctgagactcaacccgtctttatatgtacaaatcttgatataattaaagataaatttgtttttgt

SEQ ID NO: 177092 - DNA, 5746 bp, Homo sapiens
  Payload ID: 14749
  Gene Symbol: RC3H2
  Gene Name: ring finger and CCCH-type domains 2
  Uniprot ID: Q9HBD1
  ENST ID: ENST00000498479
  CDS Start-End: 181-1617
gtgaaacctccgccgagctctgccccggcgagacgaggcgcctccgtcgccaagccgcgccgtcgcggggctcccgggagcggcccttagcgaccccgcccgggccccctcagcttacaaaacactacacagcaaaataatgatctgctagactgctaacccgagcatccagcttccacaatgcctgtgcaggcagctcaatggacagaatttctgtcctgtccaatctgctataatgaatttgatgagaatgtgcacaaacccatcagtttaggttgttcacacactgtttgcaagacctgcttgaataaacttcatcgaaaagcttgtccttttgaccagactgccatcaacacagatattgatgtacttcctgtcaacttcgcacttctccagttagttggagcccaggtaccagatcatcagtcaattaagttaagtaatctaggtgagaataaacactatgaggttgcaaagaaatgcgttgaggatttggcactctacttaaaaccactaagtggaggtaaaggtgtagctagcttgaaccagagtgcactgagccgtccaatgcaaaggaaactggtgacacttgtaaactgtcaactggtggaggaagaaggtcgtgtaagagccatgcgagcagctcgttcccttggagaaagaactgtaacagaactgatattacagcaccagaaccctcagcagttgtctgccaatctatgggccgctgtcagggctcgaggatgccagtttttagggccagctatgcaagaagaggccttgaagctggtgttactggcattagaagatggttctgccctctcaaggaaagttctggtactttttgttgtgcagagactagaaccaagatttcctcaggcatcaaaaacaagtattggtcatgttgtgcaactactgtatcgagcttcttgttttaaggttaccaaaagagatgaagactcttccctaatgcagctgaaggaggaatttcggagttatgaagcattacgcagagaacatgatgcccaaattgttcatattgccatggaagcaggactccgtatttcacctgaacagtggtcctctcttttgtatggtgatttggctcataaatcacacatgcagtctatcattgataagctacagtctccagagtcatttgcaaagagtgtccaggaattgacaattgttttgcaacgaacaggtgacccagctaacttaaatagactgaggcctcatttagagcttcttgcaaacatagaccctaatccagacgctgtttcaccaacttgggagcagctggaaaatgcaatggtagctgttaaaacagtagttcatggccttgtggacttcatacaaaattatagtagaaaaggccatgagacccctcagcctcagccaaacagcaaatacaagactagcatgtgccgagatttgcgacagcaagggggttgtccacgaggaacaaattgtacatttgcccattctcaggaagagcttgaaaagtatcgattaaggaacaaaaagatcaatgccactgaagtactgaaacaacagggaaaattgttccaagtacaaacggaatttcaaatgcagaaaacagtgtttcccagctaatctcacgtagtactgacagtaccttaagagctctggagaccgtgaagaaagtgggaaaggttggcgctaatggtcagaatgctgctgggccctctgcagattctgtaactgaaaataaaattggttctccacccaagactcctgtaagtaatgtagcagctacctcagctgggccctctaatgttggaacagagctgaattctgtgcctcaaaaatccagcccatttctaactagagtaccagtatatcctccgcattctgaaaacattcagtattttcaagatccaaggactcagataccctttgaagtcccacagtacccacagacaggatactatccaccacctccaacggtaccagctggtgtggctccctgtgttcctcgctttgtgaggtccaataacgttccagagtcctccctcccacctgcttccatgccatatgccgatcattacagtacattttcccctcgagatcgaatgaattcttctccttaccagcctcctcctccgcagccgtatggaccagttcctccagtaccttctggaatgtatgctcctgtgtacgacagcaggcgcatctggcgcccacctatgtaccaacgagatgacattattagaagcaattctttacctccaatggatgtgatgcactcatctgtctatcagacatctttgcgggaaagatataactcattagatggatattattcggtggcttgtcagccaccaagtgagccaaggacaactgtgcctttaccaagggaaccttgtggtcatttgaagaccagttgcgaggagcagataagaagaaagccagatcagtgggcacagtaccacactcagaaagcacctcttgtctcttcaactcttcctgtggcaacacagtcaccaacaccaccttctcctctgttcagtgtagactttcgtgcggatttctcagagagtgtgagtggtacaaaatttgaagaagatcatctttcccattattctccctggtcttgtggcaccataggctcctgtataaatgccattgattcagagcccaaagatgtcattgctaattcaaatgctgtgttaatggacctggacagtggtgatgttaagagaagagtacatttatttgaaacccagagaaggacaaaagaagaagatccaataattccctttagtgatggacccatcatctcaaaatggggtgcgatttccagatcttcccgtacaggttaccataccacagatcctgtccaggccactgcttcccaaggaagtgcgactaagcccatcagtgtatcagattatgtcccttatgtcaatgctgttgattcaaggtggagttcatatggcaacgaggccacatcatcagcacactatgttgaaagggacagattcattgttactgatttatctggtcatagaaagcattccagtactggggaccttttgagccttgaacttcagcaggccaagagcaactcattacttcttcagagagaggccaatgctttggccatgcaacagaagtggaattccctggatgaaggccgtcaccttaccttaaaccttttaagcaaggaaattgaactaagaaatggagagttacagagtgattatacagaagatgcaacagatactaaacctgatagggatatcgagttagagctttcagcacttgatactgatgaacctgatggacaaagtgaaccaattgaagagatcttggacatacagcttggtatcagttctcaaaatgatcagttgctaaatggaatggcagtggaaaatgggcatccagtacagcagcaccaaaaggagccaccaaagcagaagaaacagagtttaggtgaagaccatgtgattctggaggagcaaaaaacaattctgccggtaacttcttgctttagccagccactcccagtgtctattagcaatgcaagttgcctccccatcaccacatctgtcagtgctggcaacctcattctgaaaactcatgttatgtctgaagataaaaacgactttttaaaacctgttgcaaatgggaagatggttaacagctgaaaggaggttcatctttcaaatttgtgaccacaccatggaagcatttacactagctttttatatatataatatatattatataatgtatattttttttaaaaaaaagatattactgggggcatccatttcctgtggactctttgatacttcaagccctcttgcattagcattatgaaaaaaaaaaagaaaatttactttactagggtaacatgttcactttccagaaatgattggaatttggacaacatttaacttaagcttcaagcagctttttatgagtttgtagcaatccggtgcagtaactgagccatttcctattttaaatggcttctatagaaaattaacaactcagttattaaactagcaggatcctacaatgatacatctagtgaaagtagacttagttaacttatttatttctattttatgtttcactgagagaagtttccatctcattccagctgctttatttatctttttcatggaactttgcatggatttctttttctttttttaattttgaagagtggagttagatgttcttaccatagaattttacagggttatatactagcattctttactgcattatatgtaggagtgtggtgcagtgcttttatctgtagcatataatttttttttaattttccatttttcaagagtagtttctgctttgttaatatttatacacaggctacttgttgaagtaattaattaaaaatataaccaagtgcctaagtctttcagctgatgtactagatattaaattctcctaagttatgcagaatcgtttttacaattttgataaattatgcactaatgtaatggcagttttttaaaatgcagatttaagcctgtacattattgaatctgatgacttggcaaaagaatcaggtgctttcagctttcttgagaaaaccctgtatgtagcgtttgcactgactaacaagatggtattgctgggtttttaatttaaactaattaatttggttgttcattgcattatcttggttaaatattgtttattgttacttcatgttggggtttagtttttcttgttttttgactgttaggttgataagactatgaactgtgtaatagtagaacagtggctaacatttattcatacttaagaacatgaataatttctgccttgctaaaatgtgactgaaatggttttgacttggcatctgaaagtatacaatgtgttcaacaagtcatgcatcagatttgtgggaggtattgtactgaaacctaaatttcagtcaacatttgaaaagaagagctgggcattccttcctggtgatctttacctatagtttatctatctgtttttcttctgtttctttaagattagtttgacttttattattatttttttaattaacttctgtgaagttgtttactctgaaaattgtactggaatattttaagccaagctgatctttcaccaggtgtactgtatgtaagggcttttcctgctagcaagatgcttaaacaggatcatgttattggtcgtctgagctatttagttgttttacaaaaccacagcattgtatcagataagattttgataaaaagttttgtgcacatttccaggggcgggagggttgacatttccctgaaatttcttgattagaatgagtaaatactggtgtttgatacctgtcttaatgaacatgctcataaggtgactgataagttgtaaatatacctgagaaacaaaggggtagttttgatattctggtgtcagtatggaagatcttacacatttatttaatactcaaatgtatgaagatgtttgtttgtagcataacaacagcacagtagccttgacttagtttcctttggttagtactgtaccttttttgccatggccagtgctccccatccctatgaagacattttatttatttcactctgtaacctgaaatgaataggaacaagggttttaaaccatgttacattaacttttctgacattataaattagcctagaatattacaggaacatgattgttatataatttatatcagaacctttctataaatatgtgcttattacatttgaaa

SEQ ID NO: 177093 - DNA, 4686 bp, Homo sapiens
  Payload ID: 14750
  Gene Symbol: RCHY1
  Gene Name: ring finger and CHY zinc finger domain containing 1, E3 ubiquitin protein ligase
  Uniprot ID: Q96PM5
  ENST ID: ENST00000324439
  CDS Start-End: 400-1185
gagagagggaggacccgtcacaggtaacgatgcgcccagtgagcgtcctttcctctggggccaaccagcgtctccgcgccgctgccgccaacctcgcgccgaactacgccctgagatttgggcgggtagcgattgggggaaaacaggcaacctaagagttattaccgttagcagcgaagactgcgactaacgtcaacgacggagactgcgtctgccttcgcttccgcctcgtagccccgggaaccggaaatccgtctgccccgggtcacgtgcttaggagccatattgtcgctagtggccgctggggctgggaggggtgtgctagagaggcgcagcttctctgggcgtggtttttatcctgggggaaggatcggtggaatgtgaggggaggtggaggagatggcggcgacggcccgggaagatggcgccagcggtcaagagcgaggtcagcggggctgcgagcactatgacagaggatgtctcctaaaggcaccttgctgtgacaagctttatacttgccgcttgtgtcatgataacaatgaagatcatcaactagatcgctttaaagtgaaggaagtgcagtgcataaactgtgaaaaaattcaacatgcccaacagacttgtgaagaatgtagcacattgtttggagaatattattgcgatatatgccatttgtttgacaaagataagaagcagtatcactgtgaaaactgtggaatttgtaggattggtccaaaggaagattttttccattgtttgaaatgtaacttatgcctagctatgaatcttcaaggaagacacaagtgtattgaaaatgtgtcccgacagaattgtccaatatgtttggaggacattcacacatcccgtgttgttgctcatgtcttgccatgtggacatcttttacatagaacgtgttatgaagaaatgttgaaagaaggctacagatgtccattatgtatgcactctgctttagatatgaccaggtattggagacagctggatgatgaagtagcacagactcctatgccatcagaatatcagaacatgactgtggatattctctgcaatgactgtaatggacgatccactgttcagtttcatatattaggcatgaaatgtaagatttgtgaatcctataatactgctcaagctggaggacgtagaatttcactggatcagcaatgacgagcctacacagtactggagaacttggcattttctgatatagaaaaaggctttccttggtatcgtgttatcatgtgtcgtcatctatgcattagagttgatgtgttttgtactagtgtcacagcataaaatcatattacaagtacgtaaggattcagggtctcttgatagacttatcatagctctatattgaatgaaagccactgtgcttgtgttttgattggaaattcctttagtgtcagttttttggaagccaatgatgtttgccactgatacattcatagaagtgtattatattttcatgaagctttgctttaagtgacactacgcgtgcagttcatttctagttcttgatagaactgcacttaattttcagtagtagtcttgactttttaagggctgtgttatattaagttctcccttactgttaaaacctaattaaatatgctttagaattttctaagacagtcctctggatcctctaaatgtgaattttgatgtaataactgctaataaaattatattgaaactgttttatagaaagttttttccaaagttttctatgtttggctcaattagggcagtatcatcagttctataatgtaaaagaaattttctttcttttgaggtattccataaaagtagttgggaaaattattatgtaaaataataagactcttccaaagccttaataaaaacatcaacattgaaaacagttttttttaggttgcccaaaattatttcttcaaagagtcattcattccttcatttagcaagtatttattgagcaactgctatgtggcagatatgtttctagatgctgtagagacaacagtgaacaataaagataaaagtccttgtcctcacagcagtacattctattgttcatcatatttgatcaatgtactcatttttctttatgcaaggagtggatgtcttattgtaaatgaatagaatatttcttccctaagcgtgtgaaaataggggatggatgagtgggaagggcatgggatattcctggcaagatctctgatttcataatacttttttgggctcatgtagtggaattaaatatacctcttacttcaggaacaaagttaacaaatatgtttgatgatccagccgactttgacactgttatctccgtaatagctttaccattaggctaggatgtaaaatgtacatttatcagttgataagtacctattgagcaccagttgtatttccaactttgagctatttgaatcttctttgaataaggaagttagccttttaactagaaagcctaagagttctggcacatttatttcttcttttgttgaaatttattcacctagataaaggcagcagtttgggactcagatctttattttatcccaccttcttgtcttctgtattccactcttcttatgttctttcccttcatctgtttccttggcctggccagagcagcagtgctgatcttcatttgggaaaggatgttcctgggtattaccaattagtatacagataagtaaagactagttttccagatctaatacttttttttgaagtggttttgctctgtcatttaggctagagtgtagtgaagtgatcgtagctcactgcagccttgacttcctgggctgaactgatccttccacctcagcctcctgagtagctgggactacaggtgtgtgccaccatgcccagctaatttttaattgttttgtagaaacaaagtccaggctggtcttgaactcctgggctcaagcatttctcctacctcggccttccaagggctaggattacaggcatgagccactgtgcttggtccagatgtattactttttatgtttggtattattctgccaaaccaatcatgttattgtttttaatcattgaatcattggatctttaaataggagtgagtatataataataaggctcttctgttttcaacatctgtgctgggtcatgcattagcattaattactacaatgattctgtggggtaagtgttgtcctcatagacaagaaagctgaggtttagaggttaaaatgacacattgggggtaaataacagacactatatgttggagttgggaatcagatccaagtttgactccaaacccacttttaccacattgcttttgatctaaacttctattttgctaaaatacccctcacagctagtcatccatatcattgaagcgctcatgatttgatagattaacctttcatttttttaggtgactctagttagaaagtcttatttcacaatctgattgtttctttaacttaggatccaaacatgtccaaaataatgcagagtacatatgcaatcactcgtttatgctgtctagtcatgcacttaaagcaattttcaaatgtactcaaagtctctaggcttcggtacccagggttgcttcaagtatttgttcatgacacgtcaactcgatgattaaaatccttcaacacttctcattcacaataagaataaaatctacatcccttaccattcagtatgcaaaacttaaaatacataactttacccttaaatattttttctttctctgacttcataagtataggttatacctctataagaaagaaggtaaaaaactctcaacaatcccttctttcagagagaactactgttaacattttaacagacaacttcattcttttcctattcttttttataatgcttacaggaatgttaaatacttagacagatcttaagtacactagaattatctgtccctgaaataagttaggttgccctgccgcagaatttgtatctatagtttatttggattatttttgaaaaaagtaaaataacaatacccttacgaattttttggtgcatagcatctcagcttcttttatcattaaagatgtatgtataaaaaaaaaatgagtgtatatcaagttgttcatttcttagtttctggggtcttcttaaccagtacatagaactctttatgaattaactttagcttatgttggaagtagtagtttgtttatagtgtcatggattttaaaatcaaactcagtttttatttcttcactaaaacctattttcatatgatatacatgttaaatttcccttttattttggtcatgcatcaaaataaatttactaagtactaaagagccaacattattttataagtgcctggcaataggtattcactagttgaatagtttaatttgaaatgaattaattttaaatgggagttgttcaaaactatgccactttttcttttgtcctttgtgttattaaaatttaattgataattgtgtatattatatatatggagtacaatgtgatgttttgatatatgtttacagtgtagaatgattaaatcaatgtaataaatttattgcctcataccattttttgtggtaaaaaaaccacttaaaatctactcttaatatttttgaaatgtacaatgcattatttattatactcaccattctgtgtaatagatcagtaaagtttattcctcttgtctaa

SEQ ID NO: 177094 - DNA, 1735 bp, Homo sapiens
  Payload ID: 14750
  Gene Symbol: RCHY1
  Gene Name: ring finger and CHY zinc finger domain containing 1, E3 ubiquitin protein ligase
  Uniprot ID: Q96PM5
  ENST ID: ENST00000380840
  CDS Start-End: 1-666
atggcggcgacggcccgggaagatggcgccagcggtcaagagcgaggtcagcggggctgcgagcactatgacagaggatgtctcctaaaggcccaacagacttgtgaagaatgtagcacattgtttggagaatattattgcgatatatgccatttgtttgacaaagataagaagcagtatcactgtgaaaactgtggaatttgtaggattggtccaaaggaagattttttccattgtttgaaatgtaacttatgcctagctatgaatcttcaaggaagacacaagtgtattgaaaatgtgtcccgacagaattgtccaatatgtttggaggacattcacacatcccgtgttgttgctcatgtcttgccatgtggacatcttttacatagaacgtgttatgaagaaatgttgaaagaaggctacagatgtccattatgtatgcactctgctttagatatgaccaggtattggagacagctggatgatgaagtagcacagactcctatgccatcagaatatcagaacatgactgtggatattctctgcaatgactgtaatggacgatccactgttcagtttcatatattaggcatgaaatgtaagatttgtgaatcctataatactgctcaagctggaggacgtagaatttcactggatcagcaatgacgagcctacacagtactggagaacttggcattttctgatatagaaaaaggctttccttggtatcgtgttatcatgtgtcgtcatctatgcattagagttgatgtgttttgtactagtgtcacagcataaaatcatattacaagtacgtaaggattcagggtctcttgatagacttatcatagctctatattgaatgaaagccactgtgcttgtgttttgattggaaattcctttagtgtcagttttttggaagccaatgatgtttgccactgatacattcatagaagtgtattatattttcatgaagctttgctttaagtgacactacgcgtgcagttcatttctagttcttgatagaactgcacttaattttcagtagtagtcttgactttttaagggctgtgttatattaagttctcccttactgttaaaacctaattaaatatgctttagaattttctaagacagtcctctggatcctctaaatgtgaattttgatgtaataactgctaataaaattatattgaaactgttttatagaaagttttttccaaagttttctatgtttggctcaattagggcagtatcatcagttctataatgtaaaagaaattttctttcttttgaggtattccataaaagtagttgggaaaattattatgtaaaataataagactcttccaaagccttaataaaaacatcaacattgaaaacagttttttttaggttgcccaaaattatttcttcaaagagtcattcattccttcatttagcaagtatttattgagcaactgctatgtggcagatatgtttctagatgctgtagagacaacagtgaacaataaagataaaagtccttgtcctcacagcagtacattctattgttcatcatatttgatcaatgtactcatttttctttatgcaaggagtggatgtcttattgtaaatgaatagaatatttcttccctaagcgtgtgaaaataggggatggatgagtgggaagggcatgggatattcctggcaagatctctgatttcataatacttttttgggctcatgtagtggaatt

SEQ ID NO: 177095 - DNA, 759 bp, Homo sapiens
  Payload ID: 14750
  Gene Symbol: RCHY1
  Gene Name: ring finger and CHY zinc finger domain containing 1, E3 ubiquitin protein ligase
  Uniprot ID: Q96PM5
  ENST ID: ENST00000513257
  CDS Start-End: 1-759
atggcggcgacggcccgggaagatggcgccagcggtcaagagcgaggtcagcggggctgcgagcactatgacagaggatgtctcctaaaggcaccttgctgtgacaagctttatacttgccgcttgtgtcatgataacaatgaagatcatcaactagatcgctttaaagtgaaggaagtgcagtgcataaactgtgaaaaaattcaacatgcccaacagacttgtgaagaatgtagcacattgtttggagaatattattgcgatatatgccatttgtttgacaaagataagaagcagtatcactgtgaaaactgtggaatttgtaggattggtccaaaggaagattttttccattgtttgaaatgtaacttatgcctagctatgaatcttcaaggaagacacaagtgtattgaaaatgtgtcccgacagaattgtccaatatgtttggaggacattcacacatcccgtgttgttgctcatgtcttgccatgtggacatcttttacatagaggctacagatgtccattatgtatgcactctgctttagatatgaccaggtattggagacagctggatgatgaagtagcacagactcctatgccatcagaatatcagaacatgactgtggatattctctgcaatgactgtaatggacgatccactgttcagtttcatatattaggcatgaaatgtaagatttgtgaatcctataatactgctcaagctggaggacgtagaatttcactggatcagcaatga

SEQ ID NO: 177096 - DNA, 1123 bp, Homo sapiens
  Payload ID: 14750
  Gene Symbol: RCHY1
  Gene Name: ring finger and CHY zinc finger domain containing 1, E3 ubiquitin protein ligase
  ENST ID: ENST00000504085
  CDS Start-End: 118-441
atattgtcgctagtggccgctggggctgggaggggtgtgctagagaggcgcagcttctctgggcgtggtttttatcctgggggaaggatcggtggaatgtgaggggaggtggaggagatggcggcgacggcccgggaagatggcgccagcggtcaagagcgaggtcagcggggctgcgagcactatgacagaggatgtctcctaaaggcaccttgctgtgacaagctttatacttgccgcttgtgtcatgataacaatgaagatcatcaactagatcgctttaaagtgaaggaagtgcagtgcataaactgtgaaaaaattcaacatgcccaacagacttgtgaagaatgtagcacattgtttggagaatattattgcgatatatgccatttgtttgacaaagataagaagcagtatcactgtgaaaactgtggaatttgattggtccaaaggaagattttttccattgtttgaaatgtaacttatgcctagctatgaatcttcaaggaagacacaagtgtattgaaaatgtgtcccgacagaattgtccaatatgtttggaggacattcacacatcccgtgttgttgctcatgtcttgccatgtggacatcttttacatagaacgtgttatgaagaaatgttgaaagagtgagtgtttgggattttaaaaataattaggctacagatgtccattatgtatgcactctgctttagatatgaccaggtattggagacagctggatgatgaagtagcacagactcctatgccatcagaatatcagaacatgactgtggatattctctgcaatgactgtaatggacgatccactgttcagtttcatatattaggcatgaaatgtaagatttgtgaatcctataatactgctcaagctggaggacgtagaatttcactggatcagcaatgacgagcctacacagtactggagaacttggcattttctgatatagaaaaaggctttccttggtatcgtgttatcatgtgtcgtcatctatgcattagagttgatgtgttttgtactagtgtcacagcataaaatcatattacaagtacgtaaggattcagggtctcttgatagacttatcatagctctatattgaatg

SEQ ID NO: 177097 - DNA, 1011 bp, Homo sapiens
  Payload ID: 14750
  Gene Symbol: RCHY1
  Gene Name: ring finger and CHY zinc finger domain containing 1, E3 ubiquitin protein ligase
  Uniprot ID: Q96PM5
  ENST ID: ENST00000512706
  CDS Start-End: 167-886
ctgccccgggtcacgtgcttaggagccatattgtcgctagtggccgctggggctgggaggggtgtgctagagaggcgcagcttctctgggcgtggtttttatcctgggggaaggatcggtggaatgtgaggggaggtggaggagatggcggcgacggcccgggaagatggcgccagcggtcaagagcgaggcaccttgctgtgacaagctttatacttgccgcttgtgtcatgataacaatgaagatcatcaactagatcgctttaaagtgaaggaagtgcagtgcataaactgtgaaaaaattcaacatgcccaacagacttgtgaagaatgtagcacattgtttggagaatattattgcgatatatgccatttgtttgacaaagataagaagcagtatcactgtgaaaactgtggaatttgtaggattggtccaaaggaagattttttccattgtttgaaatgtaacttatgcctagctatgaatcttcaaggaagacacaagtgtattgaaaatgtgtcccgacagaattgtccaatatgtttggaggacattcacacatcccgtgttgttgctcatgtcttgccatgtggacatcttttacatagaacgtgttatgaagaaatgttgaaagaaggctacagatgtccattatgtatgcactctgctttagatatgaccaggtattggagacagctggatgatgaagtagcacagactcctatgccatcagaatatcagaacatgactgtggatattctctgcaatgactgtaatggacgatccactgttcagtttcatatattaggcatgaaatgtaagatttgtgaatcctataatactgctcaagctggaggacgtagaatttcactggatcagcaatgacgagcctacacagtactggagaacttggcattttctgatatagaaaaaggctttccttggtatcgtgttatcatgtgtcgtcatctatgcattagagttgatgtgttttgtactagtgtcacagc

SEQ ID NO: 177098 - DNA, 650 bp, Homo sapiens
  Payload ID: 14750
  Gene Symbol: RCHY1
  Gene Name: ring finger and CHY zinc finger domain containing 1, E3 ubiquitin protein ligase
  Uniprot ID: Q96PM5
  ENST ID: ENST00000507014
  CDS Start-End: 12-650
aggtggaggagatggcggcgacggcccgggaagatggcgccagcggtcaagagcgaggtcagcggggctgcgagcactatgacagaggatgtctcctaaaggcccaacagacttgtgaagaatgtagcacattgtttggagaatattattgcgatatatgccatttgtttgacaaagataagaagcagtatcactgtgaaaactgtggaatttgtaggattggtccaaaggaagattttttccattgtttgaaatgtaacttatgcctagctatgaatcttcaaggaagacacaagtgtattgaaaatgtgtcccgacagaattgtccaatatgtttggaggacattcacacatcccgtgttgttgctcatgtcttgccatgtggacatcttttacatagaggctacagatgtccattatgtatgcactctgctttagatatgaccaggtattggagacagctggatgatgaagtagcacagactcctatgccatcagaatatcagaacatgactgtggatattctctgcaatgactgtaatggacgatccactgttcagtttcatatattaggcatgaaatgtaagatttgtgaatcctataatactgctcaagctggaggacgtagaatttcactggatcagcaatga

SEQ ID NO: 177099 - DNA, 1304 bp, Homo sapiens
  Payload ID: 14750
  Gene Symbol: RCHY1
  Gene Name: ring finger and CHY zinc finger domain containing 1, E3 ubiquitin protein ligase
  Uniprot ID: Q96PM5
  ENST ID: ENST00000505105
  CDS Start-End: 27-593
gtggaatgtgaggggaggtggaggagatggcggcgacggcccgggaagatggcgccagcggtcaagagcgaggtcagcggggctgcgagcactatgacagaggatgtctcctaaaggcaccttgctgtgacaagctttatacttgccgcttgtgtcatgataacaatgaagatcatcaactagatcgctttaaagtgaaggaagtgcagtgcataaactgtgaaaaaattcaacatgcccaacagacttgtgaagaatgtagcacattgtttggagaatattattgcgatatatgccatttgtttgacaaagataagaagcagtatcactgtgaaaactgtggaatttgtaggattggtccaaaggaagattttttccattgtttgaaatgtaacttatgcctagctatgaatcttcaaggaagacacaagtgtattgaaaatgtgtcccgacagaattgtccaatatgtttggaggacattcacacatcccgtgttgttgctcatgtcttgccatgtggacatcttttacatagaacgtgttatgaagaaatgttgaaagaatatgaccaggtattggagacagctggatgatgaagtagcacagactcctatgccatcagaatatcagaacatgactgtggatattctctgcaatgactgtaatggacgatccactgttcagtttcatatattaggcatgaaatgtaagatttgtgaatcctataatactgctcaagctggaggacgtagaatttcactggatcagcaatgacgagcctacacagtactggagaacttggcattttctgatatagaaaaaggctttccttggtatcgtgttatcatgtgtcgtcatctatgcattagagttgatgtgttttgtactagtgtcacagcataaaatcatattacaagtacgtaaggattcagggtctcttgatagacttatcatagctctatattgaatgaaagccactgtgcttgtgttttgattggaaattcctttagtgtcagttttttggaagccaatgatgtttgccactgatacattcatagaagtgtattatattttcatgaagctttgctttaagtgacactacgcgtgcagttcatttctagttcttgatagaactgcacttaattttcagtagtagtcttgactttttaagggctgtgttatattaagttctcccttactgttaaaacctaattaaatatgctttagaattttctaagacagtcctctggatcctctaaatgtgaattttgatgtaataactgctaataaaattatattgaaac

SEQ ID NO: 177100 - DNA, 728 bp, Homo sapiens
  Payload ID: 14750
  Gene Symbol: RCHY1
  Gene Name: ring finger and CHY zinc finger domain containing 1, E3 ubiquitin protein ligase
  ENST ID: ENST00000513909
  CDS Start-End: 1-336
agcggtcaagagcgaggtcagcggggctgcgagcactatgacagaggatgtctcctaaaggtgacgccttctatggactcttccctgacaagcttccgtcaggcaccttgctgtgacaagctttatacttgccgcttgtgtcatgataacaatgaagatcatcaactagatcgctttaaagtgaaggaagtgcagtgcataaactgtgaaaaaattcaacatgcccaacagacttgtgaagaatgtagcacattgtttggagaatattattgcgatatatgccatttgtttgacaaagataagaagcagtatcactgtgaaaactgtggaatttgattggtccaaaggaagattttttccattgtttgaaatgtaacttatgcctagctatgaatcttcaaggaagacacaagtgtattgaaaatgtgtcccgacagaattgtccaatatgtttggaggacattcacacatcccgtgttgttgctcatgtcttgccatgtggacatcttttacatagaacgtgttatgaagaaatgttgaaagaaggctacagatgtccattatgtatgcactctgctttagatatgaccaggtattggagacagctggatgatgaagtagcacagactcctatgccatcagaatatcagaacatgactgtggatattctctgcaatgactgtaatggacgatccactgttcagtttcatatattaggcatgaaatgt

SEQ ID NO: 177101 - DNA, 7293 bp, Homo sapiens
  Payload ID: 14751
  Gene Symbol: RFFL
  Gene Name: ring finger and FYVE-like domain containing E3 ubiquitin protein ligase
  Uniprot ID: Q8WZ73
  ENST ID: ENST00000315249
  CDS Start-End: 224-1315
ggccgggccgggccggctggggatgggtgggagggggggccgacttcctggggccgcccgtgaggatgtcgcgaccgcccccgggtgcccctcagccccagagacgccgccgcggcggagtccgcagcctccctgcctgaggcgtccgcggccgggatccggcccctcccctcgcctcctctcctaggtgccggccgggagggcggccgcagcagattttatcatgtgggcaacctgctgcaactggttctgcctggatggacagcctgaggaggtcccaccaccccagggagccaggatgcaggcctattccaaccctgggtacagctccttcccttccccaacaggcttggaaccaagctgcaagtcctgtggggctcactttgcaaacacggccaggaagcagacctgcttggactgtaagaaaaatttttgcatgacctgttcgagccaagtagggaatgggccccgcctctgccttctctgccaacggtttcgagctacagcctttcagcgagaggagctcatgaagatgaaggtgaaggacttgagggactatctcagcctccatgacatctctaccgaaatgtgccgggagaaagaagagctggtgctcttggtccttggccagcagcctgtaatctcccaggaggacaggactcgtgcctccaccttgtccccagactttcctgagcagcaggccttcctgacccagcctcactccagcatggttccacctacctcacccaacctcccctcttcatctgcacaagccacctctgttcccccagcccaggttcaggagaatcagcaggccaatggccatgtgtctcaggatcaagaggaacccgtctacctggagagcgtggccagagtacctgctgaggatgagacccagtctattgactcagaggacagctttgtcccaggccgaagggcctctctgtctgacctgactgacctggaggacattgaaggcctgacagtgcggcagctgaaagagatcttggctcgcaactttgtcaactacaagggctgctgtgagaagtgggagctgatggagagagtgacccggctatacaaggatcagaaaggactccagcacctggtcagtggtgccgaagaccaaaacgggggagcagtaccatcaggcttggaggagaacctgtgtaagatctgcatggactcacccattgactgtgttcttctggagtgtggccacatggtaacctgtaccaagtgtggcaagcgcatgaatgaatgtcccatctgccggcagtatgtaatccgagctgtgcatgtcttccggtcctgagagcttgcatcggtttcttcagtgccttacagggaaatagcctggggtgtctgggctcagggttggccagcttgcagaggagcaagctagtagaaatattgcagggttcccaaaaccaggtcaagcaagatgccatgtcacccctgagcatgcctgtcttcccaggggtgtacctcttggctggcaaagcccaaggccagtgggaacttgtataaatcacatgggtatgttcttggttcagtgatcttggagtgatgatggtaactgatgaacagagaactttccagaacttgggtcctgtcttcctccctgaacctagacagtttcacccctcctcctgtacccaacccatccccaccccatatgggagatgcttgcccatgtgtttcatcaatcagaagtcctcctccccagcacattcggatttaaatttctggtctctccggctttctgtgctttaactatctttgctaaagtctcttgctacattgcctaaatccatttgtttctttggaccaaaaatgttagtttaccagaccgatagtggtccttaggacagattttagaccagtaaacttatctttggtgagaaatgaaatacaaatgctatagaaaaatttcaaagttgttaaaagccacttcattaaatgctgggattggaagctgttggtctcctgacctgactctgggagccaacaaaacatcaggctcccaaactgctgggaaatttgtttctgtctgcaagggatagtgcgtgcataatccctgctgctgcttctcttgggacctgatttgcaccatccttagtttatgcggaaaggggaagcaatgggtggaggcagtggccttctccttaattttggcttggcttctgatccttttcccaactagaagtcttaagccacttttcgctgaaaatgaaatccctcccttatccatggtagttttaaatttggtttcattgaagaaatagatttaggcaaagagcctgtgctcttctctggccagactgctgttgaagttcctggagagcaaatgttaagacagagcacttaagagctttcaggaggtactgaatgagactggattctgttgtaagccgacagttcaagtctttatttcccaggttggtggggagtgaggagaccctactttcattccctttcctagcccactgatttttgggggcaggtcagggagaaagcattttttttttttttttgagtctcactctgttgcccaggctggagtgcagtggtacagtcttggcttactgcaacctccacctcccaggttcaagctattctcctgccttagcctccagagtagctgggattataggcgcccaccaccacaccaggctaatttttgtatttttagtagagacggggttttaccatgttcaccaggctggtcttgaactcttgaccttatgatccgcccgcctcagcttcccaaagtgctgggattacaggcgtgagccaccacacccagcaggagaaaccattttctaggctctttaggaaggaccatgcaatgagtaggtgatgtatttgagccctcacagtctttacacccctagaggagctggaggacttaagagtttgctgcagaagcgtggccaagcacaaaacacatgatcaggaaagcagagtgttttcccattaccaatggatgaactatgcaaaccctaaacgccttggcagacacctcccaccccttacccctcccatgcagctgaaaaatctgagactagaaccaatcatgactctggatggcagagggaaacctctaaagggacttattacattggtacagacatatttatgctttcttccatcaccaaccactaaacccctttggaggaatgaaataactgcataaactagtcaactgaacactgggccacttacctcaatgttatacaaagtcctggatgatttgattctgaaccacagcctttgcaggagttgggggaatcagatttgctcatgaagacatccctttccacttttgtcatgggcagtaaatactatagtttacaatgcctaccaattagcaaaggatcattcattcagctactcagttcctctgtaaaacaggtctatgtatgtgcaattcagctaagatctagcagtaacttaagggcagaagctggctctctacttacaacctgctttctctgctgaagccttacctcctcttcagtttccctcctagacacaaatcgaaaataatatactgatagctggttagtaacctcagtaagaattaaaactgaggttgtttactcattttgcctttaaatcttttatccccttttggtgaaggtttccctttaggaaaaaaggtgtcaaacaaccctgattttttttttttttgcatcatttttattacaccaaattaaagttgggagttccaagatcccattccagttaatatttaaccaaggtctaaaatttgattttttttaaatctttgaatcctcccttctgcccctcatggatccttggttttaatgatatggaaacatctaattcttagaattattccgtagcttttgctgattactctgagatttcagttaagacttgtttcaaaagacagatagctgactggttcataatacattggaatagttggatccaaactaataagaataagctgtacaggaactagtgctcaatatacattgtataaatttgtggaaatctcttggatgtgaattgttacttcaagtggcttttattaagattttctcagacttacttggaggttaaagcaaacccaaatgtgtattattttgttacagagctctgctttataattttgtaataaagtttcaatacagacacctgtcctgtctggtgcgaggatgttagaggttgataggactgacaaaagagcctgacagtggttcatgctataatttccacactttaggaggccaaggtgggaagactgcttgagctcaggagtttgagaccaacctgggcaatgtagtgagaccttgtctctacttaaaaaaacaaacaagggccgggtgcggtggctcacgcctgtaatcccagcactttgggaggctgaggcgggcagatcacgaggtcaggagatcgagaccaccctggctaacacggtgaaaccccgtctctactaaaaatacaaaaaattagccaggcgtggtggcgggtgcctgtagtcccagctactcgggaggctgaggcaggagaatggtgtgaacccgggaggcggagcttgcagtgagccaagattgcgccactgcagtccggcctgggcgaaagagcgagactctgtctcaaaaaacaaaacaaaaaaaaacacaaacaaaaaacccaaaaaaaccaaaaaattagccgtgcatggtggtgcatgtgggtagtcccaactacttggaaggctgaggtgggaggatcacttgagccaggagattgaagctgcagtgagctctgatcgccaccgcactccagccagggtgacagagtgagaccctgtattaaaaaaaaaaaaaaattgacaactgataaaccacaagctaatcctgggatgtgcacatggcctgggattagcctgtggttgggccaagtgaccttggtcaagatgctcagtgttgttgtaactaactaacttgctcaagaccacaaatgtaatatatggaagaggccatggaacaacctagaagagaatgagagctgggtaggtaaaggatgaatcccaagaccaattgggttgaagcaccaagtgagttcagatatttacactgatctagaagagatgggccttaaagaactgaaatctgaggacagttagtatgcccagttaggtcttcaggttaccctgggagatacatggtaccttttggatacagctgtagtacagctggactatggctcagaaaaggttggcccaggctgggcgccatggctcacgcctgtaatcccagcactttgggaggctgaggtgcgtggatgactcgaggccaggagtttgagaccagtctggacaacatggcgaaacgtggtctctactaaaaatacaaaaacttagctgcgagtgatggtgtgtgcctgtttgttaagtcttagccacttgggaggctgaggcatgagaattgcttgtgaacccgggaagcagaggttgcagtgagctgagattgcaccactgcactccagcctgaatgacagagcaagagtctgtttaaaaaaaaaaaaaaggttggcccagcctcgtgacagactgctgtgtgtgcgcaggcttgtacaaacctccctgaccaggcgcccaaggagcagggaaaagactactgagaatgcagcccctgggagaacaagattatgtgtccatctgctgtgactgagaagagaaaggaatcttgccaaaagggcataaaggatcgaggatgagccacaacactttgctcacattgccctagggagctgacctgttcagcacccagtgatgacctctgcttgatgccagccagcagcatgtagaggttcagaagagggaggcctccagcattctgctggagagatttatgatgatgatgttgagggctgcattgaaatacatgaaagaaatacatgaaaggatacaaaatagtatatacagtcagatctcagcagcaaagactggaagaaaatacataaaaaaccactgacattgaaatggcaataacacacactaaggcagagaagggacaagatgatcacctgcagccagcagaggccctttcctgtgagtgtgcactctgggtgtaagcaaccaataagggcaagtggggctgggtccaggttggagaggacagtgcctttggcaggatcctgaggagacagccttgttctgctgccctgtccggttgtttgtttggcctgaggctgaagagagaaatggaaatctatgtaggtcagtactcaaaggaggagcagctttttgtctccatagaggatggaataaaaagtatcttattcctaatactgaagcaaggctgaatggtgcctattcaaaaacaccaaatgtcctgggctagagtcaggaaagtaaacccctcccccgtgctgtccctactcccccaacatacacattttaaacagtaggtggaagccaaagtcaatcagatcaaagttgggggggggcggtggggtggccagggggcgcagtggtccttgatcttataggtccagagcctgttaatttgttcataaggtgagaactgaccctcaagagctggaaggattgggacatggcagccagtttacaaccatatggtgtcctgatgagcctgcactcagagtggagtgttggctggaacatgcacacctgcaactgagggttctaaagtcataggttaggcccttctcccgggtagggtctggacatgcacaccaggagtgacgttcccaactctagataactatgtgctaggctctgggctaagtgctttacataatgttgctcaggacaacaggacaaccctatgatttaggtgcacccattctacttggagggattgaggcttagatgttaacgtaacttgcctaaggttagagccattaagtttcaggagtctgatctgaactccgtctacacctgcactgtccagtgtggtagtcactagtgacatgtgaccatttgaagttgaattaaaataagaacttcagttccttagttgtgccagcttcatttcaattgctcagcagctgtctgtggctagtttggttggatactgcagatttatggatatttccactgctgcaaaaagttctattgaatagcacttgtctacactaaattgtctctcttccttttgttcttcaaataaatcagcctcaggtagcacaggagctgttctttgtaagcaggttgtatggatctgttctcaggtgtggatttttatttttttccctgcagatatggagtatattttctttaagaaattaaaaactaagaagaaaatgcca

SEQ ID NO: 177102 - DNA, 4227 bp, Homo sapiens
  Payload ID: 14751
  Gene Symbol: RFFL
  Gene Name: ring finger and FYVE-like domain containing E3 ubiquitin protein ligase
  Uniprot ID: Q8WZ73
  ENST ID: ENST00000394597
  CDS Start-End: 286-1377
aggttgcagttgactgcggttggttcaggctgagttgtttgggaagtacaaattttgcccagcgtgagtcagcactgccctgggtaaactccctgctgtgttgcaatcttgcttaccaaagatacatccccaggcggcaccattcacttcacatgaaagccgctgctcttggttcctgagatgatctcatctgaacatggctccagcgacctcagccacaggaactagagacagcttgctttctgtcgtggcaatgttttgaaactggcaaaatcagattttatcatgtgggcaacctgctgcaactggttctgcctggatggacagcctgaggaggtcccaccaccccagggagccaggatgcaggcctattccaaccctgggtacagctccttcccttccccaacaggcttggaaccaagctgcaagtcctgtggggctcactttgcaaacacggccaggaagcagacctgcttggactgtaagaaaaatttttgcatgacctgttcgagccaagtagggaatgggccccgcctctgccttctctgccaacggtttcgagctacagcctttcagcgagaggagctcatgaagatgaaggtgaaggacttgagggactatctcagcctccatgacatctctaccgaaatgtgccgggagaaagaagagctggtgctcttggtccttggccagcagcctgtaatctcccaggaggacaggactcgtgcctccaccttgtccccagactttcctgagcagcaggccttcctgacccagcctcactccagcatggttccacctacctcacccaacctcccctcttcatctgcacaagccacctctgttcccccagcccaggttcaggagaatcagcaggccaatggccatgtgtctcaggatcaagaggaacccgtctacctggagagcgtggccagagtacctgctgaggatgagacccagtctattgactcagaggacagctttgtcccaggccgaagggcctctctgtctgacctgactgacctggaggacattgaaggcctgacagtgcggcagctgaaagagatcttggctcgcaactttgtcaactacaagggctgctgtgagaagtgggagctgatggagagagtgacccggctatacaaggatcagaaaggactccagcacctggtcagtggtgccgaagaccaaaacgggggagcagtaccatcaggcttggaggagaacctgtgtaagatctgcatggactcacccattgactgtgttcttctggagtgtggccacatggtaacctgtaccaagtgtggcaagcgcatgaatgaatgtcccatctgccggcagtatgtaatccgagctgtgcatgtcttccggtcctgagagcttgcatcggtttcttcagtgccttacagggaaatagcctggggtgtctgggctcagggttggccagcttgcagaggagcaagctagtagaaatattgcagggttcccaaaaccaggtcaagcaagatgccatgtcacccctgagcatgcctgtcttcccaggggtgtacctcttggctggcaaagcccaaggccagtgggaacttgtataaatcacatgggtatgttcttggttcagtgatcttggagtgatgatggtaactgatgaacagagaactttccagaacttgggtcctgtcttcctccctgaacctagacagtttcacccctcctcctgtacccaacccatccccaccccatatgggagatgcttgcccatgtgtttcatcaatcagaagtcctcctccccagcacattcggatttaaatttctggtctctccggctttctgtgctttaactatctttgctaaagtctcttgctacattgcctaaatccatttgtttctttggaccaaaaatgttagtttaccagaccgatagtggtccttaggacagattttagaccagtaaacttatctttggtgagaaatgaaatacaaatgctatagaaaaatttcaaagttgttaaaagccacttcattaaatgctgggattggaagctgttggtctcctgacctgactctgggagccaacaaaacatcaggctcccaaactgctgggaaatttgtttctgtctgcaagggatagtgcgtgcataatccctgctgctgcttctcttgggacctgatttgcaccatccttagtttatgcggaaaggggaagcaatgggtggaggcagtggccttctccttaattttggcttggcttctgatccttttcccaactagaagtcttaagccacttttcgctgaaaatgaaatccctcccttatccatggtagttttaaatttggtttcattgaagaaatagatttaggcaaagagcctgtgctcttctctggccagactgctgttgaagttcctggagagcaaatgttaagacagagcacttaagagctttcaggaggtactgaatgagactggattctgttgtaagccgacagttcaagtctttatttcccaggttggtggggagtgaggagaccctactttcattccctttcctagcccactgatttttgggggcaggtcagggagaaagcattttttttttttttttgagtctcactctgttgcccaggctggagtgcagtggtacagtcttggcttactgcaacctccacctcccaggttcaagctattctcctgccttagcctccagagtagctgggattataggcgcccaccaccacaccaggctaatttttgtatttttagtagagacggggttttaccatgttcaccaggctggtcttgaactcttgaccttatgatccgcccgcctcagcttcccaaagtgctgggattacaggcgtgagccaccacacccagcaggagaaaccattttctaggctctttaggaaggaccatgcaatgagtaggtgatgtatttgagccctcacagtctttacacccctagaggagctggaggacttaagagtttgctgcagaagcgtggccaagcacaaaacacatgatcaggaaagcagagtgttttcccattaccaatggatgaactatgcaaaccctaaacgccttggcagacacctcccaccccttacccctcccatgcagctgaaaaatctgagactagaaccaatcatgactctggatggcagagggaaacctctaaagggacttattacattggtacagacatatttatgctttcttccatcaccaaccactaaacccctttggaggaatgaaataactgcataaactagtcaactgaacactgggccacttacctcaatgttatacaaagtcctggatgatttgattctgaaccacagcctttgcaggagttgggggaatcagatttgctcatgaagacatccctttccacttttgtcatgggcagtaaatactatagtttacaatgcctaccaattagcaaaggatcattcattcagctactcagttcctctgtaaaacaggtctatgtatgtgcaattcagctaagatctagcagtaacttaagggcagaagctggctctctacttacaacctgctttctctgctgaagccttacctcctcttcagtttccctcctagacacaaatcgaaaataatatactgatagctggttagtaacctcagtaagaattaaaactgaggttgtttactcattttgcctttaaatcttttatccccttttggtgaaggtttccctttaggaaaaaaggtgtcaaacaaccctgattttttttttttttgcatcatttttattacaccaaattaaagttgggagttccaagatcccattccagttaatatttaaccaaggtctaaaatttgattttttttaaatctttgaatcctcccttctgcccctcatggatccttggttttaatgatatggaaacatctaattcttagaattattccgtagcttttgctgattactctgagatttcagttaagacttgtttcaaaagacagatagctgactggttcataatacattggaatagttggatccaaactaataagaataagctgtacaggaactagtgctcaatatacattgtataaatttgtggaaatctcttggatgtgaattgttacttcaagtggcttttattaagattttctcagacttacttggaggttaaagcaaacccaaatgtgtattattttgttacagagctctgctttataattttgtaataaagtttcaataca

SEQ ID NO: 177103 - DNA, 2030 bp, Homo sapiens
  Payload ID: 14751
  Gene Symbol: RFFL
  Gene Name: ring finger and FYVE-like domain containing E3 ubiquitin protein ligase
  Uniprot ID: Q8WZ73
  ENST ID: ENST00000447669
  CDS Start-End: 585-1676
gggccgggccggctggggatgggtgggagggggggccgacttcctggggccgcccgtgaggatgtcgcgaccgcccccgggtgcccctcagccccagagacgccgccgcggcggagtccgcagcctccctgcctgaggcgtccgcggccgggatccggcccctcccctcgcctcctctcctaggtgccggccgggagggcggccgcagcagaactttgggggaagtgagaactgtgagcacaataatcttcagagaatgcacagtcctttgggtatttgtctactcatcagctgcttagtcagatggagtgttttcctaagtactactgaagtacacagttcagtctttattttgaaatctctccttctgccttctctccctcttccattactttgattaccttgatgggacattcaagctgtgcagtcgtatccttttatttctatagcctgcagaaaccaggttgaagattaactgtaggtgaacaggtaatcttatctacttggctagaaatcacccttcaagatgaaacacgtgttgacaaaggccccctagacttggggacatgaacaaagattttatcatgtgggcaacctgctgcaactggttctgcctggatggacagcctgaggaggtcccaccaccccagggagccaggatgcaggcctattccaaccctgggtacagctccttcccttccccaacaggcttggaaccaagctgcaagtcctgtggggctcactttgcaaacacggccaggaagcagacctgcttggactgtaagaaaaatttttgcatgacctgttcgagccaagtagggaatgggccccgcctctgccttctctgccaacggtttcgagctacagcctttcagcgagaggagctcatgaagatgaaggtgaaggacttgagggactatctcagcctccatgacatctctaccgaaatgtgccgggagaaagaagagctggtgctcttggtccttggccagcagcctgtaatctcccaggaggacaggactcgtgcctccaccttgtccccagactttcctgagcagcaggccttcctgacccagcctcactccagcatggttccacctacctcacccaacctcccctcttcatctgcacaagccacctctgttcccccagcccaggttcaggagaatcagcaggccaatggccatgtgtctcaggatcaagaggaacccgtctacctggagagcgtggccagagtacctgctgaggatgagacccagtctattgactcagaggacagctttgtcccaggccgaagggcctctctgtctgacctgactgacctggaggacattgaaggcctgacagtgcggcagctgaaagagatcttggctcgcaactttgtcaactacaagggctgctgtgagaagtgggagctgatggagagagtgacccggctatacaaggatcagaaaggactccagcacctggtcagtggtgccgaagaccaaaacgggggagcagtaccatcaggcttggaggagaacctgtgtaagatctgcatggactcacccattgactgtgttcttctggagtgtggccacatggtaacctgtaccaagtgtggcaagcgcatgaatgaatgtcccatctgccggcagtatgtaatccgagctgtgcatgtcttccggtcctgagagcttgcatcggtttcttcagtgccttacagggaaatagcctggggtgtctgggctcagggttggccagcttgcagaggagcaagctagtagaaatattgcagggttcccaaaaccaggtcaagcaagatgccatgtcacccctgagcatgcctgtcttcccaggggtgtacctcttggctggcaaagcccaaggccagtgggaacttgtataaatcacatgggtatgttcttggttcagtgatcttggagtgatgatggtaactgatgaacagagaactttccagaacttgggtcctgtcttcctccctgaacctagacagtttcacccctcctcctgtacccaacccatcc

SEQ ID NO: 177104 - DNA, 559 bp, Homo sapiens
  Payload ID: 14751
  Gene Symbol: RFFL
  Gene Name: ring finger and FYVE-like domain containing E3 ubiquitin protein ligase
  ENST ID: ENST00000414419
  CDS Start-End: 104-559
gtcctcgattatccccaagcgccctgcagaccggcaggtctagttggcttgtggggaaaagatacctctttgtacgtcagaagaaactgaggcagattttatcatgtgggcaacctgctgcaactggttctgcctggatggacagcctgaggaggtcccaccaccccagggagccaggatgcaggcctattccaaccctgggtacagctccttcccttccccaacaggcttggaaccaagctgcaagtcctgtggggctcactttgcaaacacggccaggaagcagacctgcttggactgtaagaaaaatttttgcatgacctgttcgagccaagtagggaatgggccccgcctctgccttctctgccaacggtttcgagctacagcctttcagcgagaggagctcatgaagatgaaggtgaaggacttgagggactatctcagcctccatgacatctctaccgaaatgtgccgggagaaagaagagctggtgctcttggtccttggccagcagcctgtaatctcccaggaggacaggactcgtgcctccaccttgtcc

SEQ ID NO: 177105 - DNA, 1217 bp, Homo sapiens
  Payload ID: 14751
  Gene Symbol: RFFL
  Gene Name: ring finger and FYVE-like domain containing E3 ubiquitin protein ligase
  Uniprot ID: Q8WZ73
  ENST ID: ENST00000413582
  CDS Start-End: 91-1158
aaggagttcaagttgcttgccagactaacttacttttaaaagtaagcagccttccaagttaagagatgattttaaatttcagattttatcatgtgggcaacctgctgcaactggttctgcctggatggacagcctgaggaggtcccaccaccccagggagccaggatgcaggcctattccaaccctgggtacagctccttcccttccccaacaggcttggaaccaagctgcaagtcctgtggggctcactttgcaaacacggccaggaagcagacctgcttggactgtaagaaaaatttttgcatgacctgttcgagccaagtagggaatgggccccgcctctgccttctctgccaacggtttcgagctacagcctttcagcgagaggagctcatgaagatgaaggtgaaggacttgagggactatctcagcctccatgacatctctaccgaaatgtgccgggagaaagaagagctggtgctcttggtccttggccagcagcctgtaatctcccaggaggacaggactcgtgcctccaccttgtccccagactttcctgagcagcaggccttcctgacccagcctcactccagcatggttccacctacctcacccaacctcccctcttcatctgcacaagccacctctgttcccccagcccaggttcaggagaatcagcaggccaatggccatgtgtctcaggatcaagaggaacccgtctacctggagagcgtggccagagtacctgctgaggatgagacccagtctattgactcagaggacagctttgtcccaggccgaagggcctctctgtctgacctgactgacctggaggacattgaaggcctgacagtgcggcagctgaaagagatcttggctcgcaactttgtcaactacaagggctgctgtgagaagtgggagctgatggagagagtgacccggctatacaaggatcagaaaggactccagcacctggggggagcagtaccatcaggcttggaggagaacctgtgtaagatctgcatggactcacccattgactgtgttcttctggagtgtggccacatggtaacctgtaccaagtgtggcaagcgcatgaatgaatgtcccatctgccggcagtatgtaatccgagctgtgcatgtcttccggtcctgagagcttgcatcggtttcttcagtgccttacagggaaatagcctggggtgtctgggctca

SEQ ID NO: 177106 - DNA, 1706 bp, Homo sapiens
  Payload ID: 14751
  Gene Symbol: RFFL
  Gene Name: ring finger and FYVE-like domain containing E3 ubiquitin protein ligase
  Uniprot ID: Q8WZ73
  ENST ID: ENST00000415395
  CDS Start-End: 326-1417
gtcagggtgggtacctcaggcaggtttgctggaaaattccagtaaacagtttcaaaggagttcaagttgcttgccagactaacttacttttaaaagtaagcagccttccaagttaagagatgattttaaatttcagggaaagtggaagaggagaccctagcaggcttcaagcaagctctgtaggacagcagttagacactgtttttgaggactaaattgccaagtctgtcttttaagaagagggtgaggggagtttgggaaggaatgttcaagccctgagtgaagatccaataattttctttcaagatcagaaggagattttatcatgtgggcaacctgctgcaactggttctgcctggatggacagcctgaggaggtcccaccaccccagggagccaggatgcaggcctattccaaccctgggtacagctccttcccttccccaacaggcttggaaccaagctgcaagtcctgtggggctcactttgcaaacacggccaggaagcagacctgcttggactgtaagaaaaatttttgcatgacctgttcgagccaagtagggaatgggccccgcctctgccttctctgccaacggtttcgagctacagcctttcagcgagaggagctcatgaagatgaaggtgaaggacttgagggactatctcagcctccatgacatctctaccgaaatgtgccgggagaaagaagagctggtgctcttggtccttggccagcagcctgtaatctcccaggaggacaggactcgtgcctccaccttgtccccagactttcctgagcagcaggccttcctgacccagcctcactccagcatggttccacctacctcacccaacctcccctcttcatctgcacaagccacctctgttcccccagcccaggttcaggagaatcagcaggccaatggccatgtgtctcaggatcaagaggaacccgtctacctggagagcgtggccagagtacctgctgaggatgagacccagtctattgactcagaggacagctttgtcccaggccgaagggcctctctgtctgacctgactgacctggaggacattgaaggcctgacagtgcggcagctgaaagagatcttggctcgcaactttgtcaactacaagggctgctgtgagaagtgggagctgatggagagagtgacccggctatacaaggatcagaaaggactccagcacctggtcagtggtgccgaagaccaaaacgggggagcagtaccatcaggcttggaggagaacctgtgtaagatctgcatggactcacccattgactgtgttcttctggagtgtggccacatggtaacctgtaccaagtgtggcaagcgcatgaatgaatgtcccatctgccggcagtatgtaatccgagctgtgcatgtcttccggtcctgagagcttgcatcggtttcttcagtgccttacagggaaatagcctggggtgtctgggctcagggttggccagcttgcagaggagcaagctagtagaaatattgcagggttcccaaaaccaggtcaagcaagatgccatgtcacccctgagcatgcctgtcttcccaggggtgtacctcttggctggcaaagcccaaggccagtgggaacttgtataaatcacatgggtatgttcttggttcagtgatcttggagtgatgatggtaactgatgaacagagaactttccagaa

SEQ ID NO: 177107 - DNA, 398 bp, Homo sapiens
  Payload ID: 14751
  Gene Symbol: RFFL
  Gene Name: ring finger and FYVE-like domain containing E3 ubiquitin protein ligase
  ENST ID: ENST00000582308
  CDS Start-End: 16-398
gcaccagattttatcatgtgggcaacctgctgcaactggttctgcctggatggacagcctgaggaggtcccaccaccccagggagccaggatgcaggcctattccaaccctgggtacagctccttcccttccccaacaggcttggaaccaagctgcaagtcctgtggggctcactttgcaaacacggccaggaaggccaatggccatgtgtctcaggatcaagaggaacccgtctacctggagagcgtggccagagtacctgctgaggatgagacccagtctattgactcagaggacagctttgtcccaggccgaagggcctctctgtctgacctgactgacctggaggacattgaaggcctgacagtgcggcagctgaaagagatcttggctcgcaa

SEQ ID NO: 177108 - DNA, 424 bp, Homo sapiens
  Payload ID: 14751
  Gene Symbol: RFFL
  Gene Name: ring finger and FYVE-like domain containing E3 ubiquitin protein ligase
  ENST ID: ENST00000581039
  CDS Start-End: 1-424
ccacctctgttcccccagcccaggttcaggagaatcagcagtctattgactcagaggacagctttgtcccaggccgaagggcctctctgtctgacctgactgacctggaggacattgaaggcctgacagtgcggcagctgaaagagatcttggctcgcaactttgtcaactacaagggctgctgtgagaagtgggagctgatggagagagtgacccggctatacaaggatcagaaaggactccagcacctggtcagtggtgccgaagaccaaaacgggggagcagtaccatcaggcttggaggagaacctgtgtaagatctgcatggactcacccattgactgtgttcttctggagtgtggccacatggtaacctgtaccaagtgtggcaagcgcatgaatgaatgtcccatctgccggcagta

SEQ ID NO: 177109 - DNA, 4039 bp, Homo sapiens
  Payload ID: 14751
  Gene Symbol: RFFL
  Gene Name: ring finger and FYVE-like domain containing E3 ubiquitin protein ligase
  Uniprot ID: Q8WZ73
  ENST ID: ENST00000584655
  CDS Start-End: 200-1183
gggtgggagggggggccgacttcctggggccgcccgtgaggatgtcgcgaccgcccccgggtgcccctcagccccagagacgccgccgcggcggagtccgcagcctccctgcctgaggcgtccgcggccgggatccggcccctcccctcgcctcctctcctaggtgccggccgggagggcggccgcagcagattttatcatgtgggcaacctgctgcaactggttctgcctggatggacagcctgaggaggtcccaccaccccagggagccaggatgcaggcctattccaaccctgggtacagctccttcccttccccaacaggcttggaaccaagctgcaagtcctgtggggctcactttgcaaacacggccaggaagcagacctgcttggactgtaagaaaaatttttgcatgacctgttcgagccaagtagggaatgggccccgcctctgccttctctgccaacggtttcgagctacagcctttcagcgagaggagctcatgaagatgaaggtgaaggacttgagggactatctcagcctccatgacatctctaccgaaatgtgccgggagaaagaagagctggtgctcttggtccttggccagcagcctgtaatctcccaggaggacaggactcgtgcctccaccttgtccccagactttcctgagcagcaggccttcctgacccagcctcactccagcatggttccacctacctcacccaacctcccctcttcatctgcacaagccacctctgttcccccagcccaggttcaggagaatcagcagtctattgactcagaggacagctttgtcccaggccgaagggcctctctgtctgacctgactgacctggaggacattgaaggcctgacagtgcggcagctgaaagagatcttggctcgcaactttgtcaactacaagggctgctgtgagaagtgggagctgatggagagagtgacccggctatacaaggatcagaaaggactccagcacctggggggagcagtaccatcaggcttggaggagaacctgtgtaagatctgcatggactcacccattgactgtgttcttctggagtgtggccacatggtaacctgtaccaagtgtggcaagcgcatgaatgaatgtcccatctgccggcagtatgtaatccgagctgtgcatgtcttccggtcctgagagcttgcatcggtttcttcagtgccttacagggaaatagcctggggtgtctgggctcagggttggccagcttgcagaggagcaagctagtagaaatattgcagggttcccaaaaccaggtcaagcaagatgccatgtcacccctgagcatgcctgtcttcccaggggtgtacctcttggctggcaaagcccaaggccagtgggaacttgtataaatcacatgggtatgttcttggttcagtgatcttggagtgatgatggtaactgatgaacagagaactttccagaacttgggtcctgtcttcctccctgaacctagacagtttcacccctcctcctgtacccaacccatccccaccccatatgggagatgcttgcccatgtgtttcatcaatcagaagtcctcctccccagcacattcggatttaaatttctggtctctccggctttctgtgctttaactatctttgctaaagtctcttgctacattgcctaaatccatttgtttctttggaccaaaaatgttagtttaccagaccgatagtggtccttaggacagattttagaccagtaaacttatctttggtgagaaatgaaatacaaatgctatagaaaaatttcaaagttgttaaaagccacttcattaaatgctgggattggaagctgttggtctcctgacctgactctgggagccaacaaaacatcaggctcccaaactgctgggaaatttgtttctgtctgcaagggatagtgcgtgcataatccctgctgctgcttctcttgggacctgatttgcaccatccttagtttatgcggaaaggggaagcaatgggtggaggcagtggccttctccttaattttggcttggcttctgatccttttcccaactagaagtcttaagccacttttcgctgaaaatgaaatccctcccttatccatggtagttttaaatttggtttcattgaagaaatagatttaggcaaagagcctgtgctcttctctggccagactgctgttgaagttcctggagagcaaatgttaagacagagcacttaagagctttcaggaggtactgaatgagactggattctgttgtaagccgacagttcaagtctttatttcccaggttggtggggagtgaggagaccctactttcattccctttcctagcccactgatttttgggggcaggtcagggagaaagcattttttttttttttttgagtctcactctgttgcccaggctggagtgcagtggtacagtcttggcttactgcaacctccacctcccaggttcaagctattctcctgccttagcctccagagtagctgggattataggcgcccaccaccacaccaggctaatttttgtatttttagtagagacggggttttaccatgttcaccaggctggtcttgaactcttgaccttatgatccgcccgcctcagcttcccaaagtgctgggattacaggcgtgagccaccacacccagcaggagaaaccattttctaggctctttaggaaggaccatgcaatgagtaggtgatgtatttgagccctcacagtctttacacccctagaggagctggaggacttaagagtttgctgcagaagcgtggccaagcacaaaacacatgatcaggaaagcagagtgttttcccattaccaatggatgaactatgcaaaccctaaacgccttggcagacacctcccaccccttacccctcccatgcagctgaaaaatctgagactagaaccaatcatgactctggatggcagagggaaacctctaaagggacttattacattggtacagacatatttatgctttcttccatcaccaaccactaaacccctttggaggaatgaaataactgcataaactagtcaactgaacactgggccacttacctcaatgttatacaaagtcctggatgatttgattctgaaccacagcctttgcaggagttgggggaatcagatttgctcatgaagacatccctttccacttttgtcatgggcagtaaatactatagtttacaatgcctaccaattagcaaaggatcattcattcagctactcagttcctctgtaaaacaggtctatgtatgtgcaattcagctaagatctagcagtaacttaagggcagaagctggctctctacttacaacctgctttctctgctgaagccttacctcctcttcagtttccctcctagacacaaatcgaaaataatatactgatagctggttagtaacctcagtaagaattaaaactgaggttgtttactcattttgcctttaaatcttttatccccttttggtgaaggtttccctttaggaaaaaaggtgtcaaacaaccctgattttttttttttttgcatcatttttattacaccaaattaaagttgggagttccaagatcccattccagttaatatttaaccaaggtctaaaatttgattttttttaaatctttgaatcctcccttctgcccctcatggatccttggttttaatgatatggaaacatctaattcttagaattattccgtagcttttgctgattactctgagatttcagttaagacttgtttcaaaagacagatagctgactggttcataatacattggaatagttggatccaaactaataagaataagctgtacaggaactagtgctcaatatacattgtataaatttgtggaaatctcttggatgtgaattgttacttcaagtggcttttattaagattttctcagacttacttggaggttaaagcaaacccaaatgtgtattattttgttacagagctctgctttataattttgtaataaagtttcaatacagacacc

SEQ ID NO: 177110 - DNA, 596 bp, Homo sapiens
  Payload ID: 14751
  Gene Symbol: RFFL
  Gene Name: ring finger and FYVE-like domain containing E3 ubiquitin protein ligase
  ENST ID: ENST00000581265
  CDS Start-End: 99-281
agcctccctgcctgaggcgtccgcggccgggatccggcccctcccctcgcctcctctcctaggtgccggccgggagggcggccgcagcagattttatcatgtgggcaacctgctgcaactggttctgcctggatggacagcctgaggaggtcccaccaccccagggagccaggatgcaggcctattccaaccctgggtacagctccttcccttccccaacaggcttggaaccaagctgcaagtcctgtggggctcactttgcaaacacggccaggaagtagtgctcaagatcacatagttattaaatgacagagccgggattcaaacccaggtccttgattccaaagcccctcccagaagacattcagcatgtcgagtagaagatgacagttacaggcctgggtgcctagaaaagcatggcaatgattaaaataagcagacctgcttggactgtaagaaaaatttttgcatgacctgttcgagccaagtagggaatgggccccgcctctgccttctctgccaacggtttcgagctacagcctttcagcgagaggagctcatgaagatgaaggtgaaggacttgagggactatctca

SEQ ID NO: 177111 - DNA, 3547 bp, Homo sapiens
  Payload ID: 14752
  Gene Symbol: RSPRY1
  Gene Name: ring finger and SPRY domain containing 1
  Uniprot ID: Q96DX4
  ENST ID: ENST00000394420
  CDS Start-End: 317-2047
actgagggagggctggggcggtacgaagcgggggtgggctctgcgcgtaatggcagcgccgtggcctcgcgtccatctttgccgttctctcggacctgtcacaaaggagtcgcgccgccgccgccgccccctccctccggtgggcccgggaggtagagaaaaactgccattggatgtccagaatcccctgtagttgataatgttgggaataagctctgcaactttctttggcattcagttgttaaaaacaaataggatgcaaattcctcaactccaggttatgaaaacagtacttggaaaactgaaaactacctaaatgatcgtctttggttgggccgtgttcttagcgagcagaagccttggccagggtctgttgttgactctcgaagagcacatagcccacttcctagggactggaggtgccgctactaccatgggtaattcctgtatctgccgagatgacagtggaacagatgacagtgttgacacccaacagcaacaggccgagaacagtgcagtacccactgctgacacaaggagccaaccacgggaccctgttcggccaccaaggaggggccgaggacctcatgagccaaggagaaagaaacaaaatgtggatgggctagtgttggacacactggcagtaatacggactcttgtagataatgatcaggaacctccctattcaatgataacattacacgaaatggcagaaacagatgaaggatggttggatgttgtccagtctttaattagagttattccactggaagatccactgggaccagctgttataacattgttactagatgaatgtccattgcccactaaagatgcactccagaaattgactgaaattctcaatttaaatggagaagtagcttgccaggactcaagccatcctgccaaacacaggaacacatctgcagtcctaggctgcttggccgagaaactagcaggtcctgcaagtataggtttacttagcccaggaatactggaatacttgctacagtgtctgaagttacagtcccaccccacagtcatgctttttgcacttatcgcactggaaaagtttgcacagacaagtgaaaataaattgactatttctgaatccagtattagtgaccggcttgtcacattggagtcctgggctaatgatcctgattatctgaaacgtcaagttggtttctgtgcccagtggagcttagacaatctctttttaaaagaaggtagacagctgacctatgagaaagtgaacttgagtagcattagggccatgctgaatagcaatgatgtcagcgagtacctgaagatctcacctcatggcttagaggctcgctgtgatgcctcctcttttgaaagtgtgcgttgcaccttttgtgtggatgccggggtatggtactatgaagtaacagtggtcacttctggcgtcatgcagattggctgggccactcgagacagcaaattcctcaatcatgaaggctacggcattggggatgatgaatactcctgtgcgtatgatggctgccggcagctgatttggtacaatgccagaagtaagcctcacatacacccatgctggaaagaaggagatacagtaggatttctgttagacttgaatgaaaagcaaatgatcttctttttaaatggcaaccagctgcctcctgaaaagcaagtcttttcatctactgtatctggattttttgctgcagctagtttcatgtcatatcaacaatgtgagttcaattttggagcaaaaccattcaaatacccaccatctatgaaatttagcacttttaatgactacgccttcctaacagctgaagaaaaaatcattttgccaaggcacaggcgtcttgctctgttgaagcaagtcagtatccgagaaaactgctgttccctttgttgtgatgaggtagcagacacacaattgaagccatgtggacacagtgacctgtgcatggattgtgccttgcagctggagacctgcccattgtgtcgtaaagaaatagtatctagaatcagacagatttctcatatttcatgacacatgtgaagaggcatcgtggacttttttctactcaattccagccaatgttgaaaagaaaaagaaaaaaaaaactctctaatcagttgtacacacattgaaacttatagccatggccagattttatgctaaaaatggtagtttgtcaaagacaaaattctcttagaatctaatccaacttgccagccctgagaaaatcccttttaaggccaaggaaagctgaatgctagcagccaggcctgtggtacttccatgagaaaccatagcagacaatgccctcccaagtactgaaatcacactggaatcccccttgttgggttcatttgattgtttaacacaggatgtgttgtgtcattctgaagtttttatttggggcagaagtctttatggagatgtaaatgacagcgtttctgggttatgcataacttctcactggtcagagacaccggtgtgtcaagcatggatattgcattgcaagacttgaatctataaaaattagaatcacacagtcagtactacaagcaaaacagagaacctgaaagaaggtgcacagactgtaagaaaaaacccaagtttgtgatatttcagtgattccaaagaacattctaggttttttgtttgtttttttgttttttgggttttttttttttactgcagaaaattggtggtattttcacattcatagtgtttctatccaatttcagtacccacatttaatgaggaaaaaatgttttaccaatgaaggaggaattcttaaattagctgtaatgttaggttggagaaaatttggtatttagggtattttcaaggtaccatcaaatcagatttctgtttttttgttaaaaaaaatttttttaatcagtattgtttttacaagtaatatactttgaaactcttgaactaatagtctcaaaaactctagaggacagtctgagaacacgtatttctattgttctaaataaatacatgtttttgaatagttcaatcatgaattattgactatgtcttcatcaaaagtgttaatccctctcagggtctctggtgaagaccttcaagagtttggttttttctcccaggaaattggaaggtagaattgtaaattcatagaacttcttttataatggtgtacctcagcagctgcctttcaatttatgccaagtccttacagagtttatacttgaatagtaaatatgtcttctgagttttacagtgtcttaaactcaatgcacatttttttttcttctttttccaccccttcttgtttgtagttcattatacctgtcctattacagaactgatttccttcctggctgtacatgttggggtgctggatttttttccgtgtctttagtcttccataaatccacacacacacacacacacaaaaaatatatatatatataaatatatatgtaggatacatgttctcttctttagcttgtggtgaatacagtaatttgcattgaagaataaaacatctgttgccttttttgactaaga

SEQ ID NO: 177112 - DNA, 3586 bp, Homo sapiens
  Payload ID: 14752
  Gene Symbol: RSPRY1
  Gene Name: ring finger and SPRY domain containing 1
  Uniprot ID: Q96DX4
  ENST ID: ENST00000537866
  CDS Start-End: 874-2604
gcgcgtaatggcagcgccgtggcctcgcgtccatctttgccgttctctcggacctgtcacaaaggagtcgcgccgccgccgccgccccctccctccggtgggcccgggaggtagagaaagtcagtgccacagcccgaccgcgctgctctgagccctgggcacgcggaacgggagggagtctgagggttggggacgtctgtgagggaggggaacagccgctcgagcctggggcgggcggaccggactggggccggggtaggctctggaaagggcccgggagagaggtggcgttggtcagaacctgagaaacagccgagaggttttccaccgaggcccgcgcttgagggatctgaagaggttcctagaagagggtgttccctctttcgggggtcctcaccagaagaggttcttgggggtcgcccttctgaggaggctgcggctaacagggcccaggtgagaggcagctatctatctcctggggtggctcctggtaccgatggggtcctgacctactcaggggtgcccgggatagaaagggtagatgaagggacgctttaggagggttctttttgtggagtttacggtctaggtggcacggatgaggcatacctccccggggagatttagaaacgccttgggatagagagagaatggggctaggaagcaggagctagaactagcggaatgtcctactacggaagccggagctgaaaattggaactgccattggatgtccagaatcccctgtagttgataatgttgggaataagctctgcaactttctttggcattcagttgttaaaaacaaataggatgcaaattcctcaactccaggttatgaaaacagtacttggaaaactgaaaactacctaaatgatcgtctttggttgggccgtgttcttagcgagcagaagccttggccagggtctgttgttgactctcgaagagcacatagcccacttcctagggactggaggtgccgctactaccatgggtaattcctgtatctgccgagatgacagtggaacagatgacagtgttgacacccaacagcaacaggccgagaacagtgcagtacccactgctgacacaaggagccaaccacgggaccctgttcggccaccaaggaggggccgaggacctcatgagccaaggagaaagaaacaaaatgtggatgggctagtgttggacacactggcagtaatacggactcttgtagataatgatcaggaacctccctattcaatgataacattacacgaaatggcagaaacagatgaaggatggttggatgttgtccagtctttaattagagttattccactggaagatccactgggaccagctgttataacattgttactagatgaatgtccattgcccactaaagatgcactccagaaattgactgaaattctcaatttaaatggagaagtagcttgccaggactcaagccatcctgccaaacacaggaacacatctgcagtcctaggctgcttggccgagaaactagcaggtcctgcaagtataggtttacttagcccaggaatactggaatacttgctacagtgtctgaagttacagtcccaccccacagtcatgctttttgcacttatcgcactggaaaagtttgcacagacaagtgaaaataaattgactatttctgaatccagtattagtgaccggcttgtcacattggagtcctgggctaatgatcctgattatctgaaacgtcaagttggtttctgtgcccagtggagcttagacaatctctttttaaaagaaggtagacagctgacctatgagaaagtgaacttgagtagcattagggccatgctgaatagcaatgatgtcagcgagtacctgaagatctcacctcatggcttagaggctcgctgtgatgcctcctcttttgaaagtgtgcgttgcaccttttgtgtggatgccggggtatggtactatgaagtaacagtggtcacttctggcgtcatgcagattggctgggccactcgagacagcaaattcctcaatcatgaaggctacggcattggggatgatgaatactcctgtgcgtatgatggctgccggcagctgatttggtacaatgccagaagtaagcctcacatacacccatgctggaaagaaggagatacagtaggatttctgttagacttgaatgaaaagcaaatgatcttctttttaaatggcaaccagctgcctcctgaaaagcaagtcttttcatctactgtatctggattttttgctgcagctagtttcatgtcatatcaacaatgtgagttcaattttggagcaaaaccattcaaatacccaccatctatgaaatttagcacttttaatgactacgccttcctaacagctgaagaaaaaatcattttgccaaggcacaggcgtcttgctctgttgaagcaagtcagtatccgagaaaactgctgttccctttgttgtgatgaggtagcagacacacaattgaagccatgtggacacagtgacctgtgcatggattgtgccttgcagctggagacctgcccattgtgtcgtaaagaaatagtatctagaatcagacagatttctcatatttcatgacacatgtgaagaggcatcgtggacttttttctactcaattccagccaatgttgaaaagaaaaagaaaaaaaaaactctctaatcagttgtacacacattgaaacttatagccatggccagattttatgctaaaaatggtagtttgtcaaagacaaaattctcttagaatctaatccaacttgccagccctgagaaaatcccttttaaggccaaggaaagctgaatgctagcagccaggcctgtggtacttccatgagaaaccatagcagacaatgccctcccaagtactgaaatcacactggaatcccccttgttgggttcatttgattgtttaacacaggatgtgttgtgtcattctgaagtttttatttggggcagaagtctttatggagatgtaaatgacagcgtttctgggttatgcataacttctcactggtcagagacaccggtgtgtcaagcatggatattgcattgcaagacttgaatctataaaaattagaatcacacagtcagtactacaagcaaaacagagaacctgaaagaaggtgcacagactgtaagaaaaaacccaagtttgtgatatttcagtgattccaaagaacattctaggttttttgtttgtttttttgttttttgggttttttttttttactgcagaaaattggtggtattttcacattcatagtgtttctatccaatttcagtacccacatttaatgaggaaaaaatgttttaccaatgaaggaggaattcttaaattagctgtaatgttaggttggagaaaatttggtatttagggtattttcaaggtaccatcaaatcagatttctgtttttttgttaaaaaaaatttttttaatcagtattgtttttacaagtaatatactttgaaactcttgaactaatagtctcaaaaactctagaggacagtctgagaacacgtatttctattgttctaaataaatacatgtttttgaatagtt

SEQ ID NO: 177113 - DNA, 579 bp, Homo sapiens
  Payload ID: 14752
  Gene Symbol: RSPRY1
  Gene Name: ring finger and SPRY domain containing 1
  ENST ID: ENST00000561641
  CDS Start-End: 63-579
ggatgcaaattcctcaactccaggttatgaaaacagtacttggaaaactgaaaactacctaaatgatcgtctttggttgggccgtgttcttagcgagcagaagccttggccagggtctgttgttgactctcgaagagcacatagcccacttcctagggactggaggtgccgctactaccatgggtaattcctgtatctgccgagatgacagtggaacagatgacagtgttgacacccaacagcaacaggccgagaacagtgcagtacccactgctgacacaaggagccaaccacgggaccctgttcggccaccaaggaggggccgaggacctcatgagccaaggagaaagaaacaaaatgtggatgggctagtgttggacacactggcagtaatacggactcttgtagataaaagaaaacttcaaaatgaagatgcgtatataggcccttgcttccataagtcctcaaccgggattgtcgtctctcttcctggcatttctctgagtgatcaggaacctccctattcaatgataacattacacgaaatggcagaaacagatgaaggatggttggatgttg

SEQ ID NO: 177114 - DNA, 548 bp, Homo sapiens
  Payload ID: 14752
  Gene Symbol: RSPRY1
  Gene Name: ring finger and SPRY domain containing 1
  ENST ID: ENST00000562959
  CDS Start-End: 413-548
ctaggggactgagggagggctggggcggtacgaagcgggggtgggctctgcgcgtaatggcagcgccgtggcctcgcgtccatctttgccgttctctcggacctgtcacaaaggagtcgcgccgccgccgccgccccctccctccggtgggcccgggaggtagagaaagtggcacggatgaggcatacctccccggggagatttagaaacgccttgggatagagagagaatggggctaggaagcaggagctagaactagcggaatgtcctactacggaagccggagctgaaaattggaagaaaacttcaaaatgaagatgcgtatataggcccttgcttccataagtcctcaaccgggattgtcgtctctcttcctggcatttctctgagtgatcaggaacctccctattcaatgataacattacacgaaatggcagaaacagatgaaggatggttggatgttgtccagtctttaattagagttattccactggaagatccactgggaccagctgttataacattgttactagatgaatgtccattgc

SEQ ID NO: 177115 - DNA, 654 bp, Homo sapiens
  Payload ID: 14752
  Gene Symbol: RSPRY1
  Gene Name: ring finger and SPRY domain containing 1
  ENST ID: ENST00000568505
  CDS Start-End: 292-654
ggcggtacgaagcgggggtgggctctgcgcgtaatggcagcgccgtggcctcgcgtccatctttgccgttctctcggacctgtcacaaaggagtcgcgccgccgccgccgccccctccctccggtgggcccgggagaactgccattggatgtccagaatcccctgtagttgataatgttgggaataagctctgcaactttctttggcattcagttgttaaaaacaaataggatgcaaattcctcaactccaggttatgaaaacagtacttggaaaactgaaaactacctaaatgatcgtctttggttgggccgtgttcttagcgagcagaagccttggccagggtctgttgttgactctcgaagagcacatagcccacttcctagggactggaggtgccgctactaccatgggtaattcctgtatctgccgagatgacagtggaacagatgacagtgttgacacccaacagcaacaggccgagaacagtgcagtacccactgctgacacaaggagccaaccacgggaccctgttcggccaccaaggaggggccgaggacctcatgagccaaggagaaagaaacaaaatgtggatgggctagtgttggacacactggcagtaatacggactcttgtagataatgatcaggaacct

SEQ ID NO: 177116 - DNA, 743 bp, Homo sapiens
  Payload ID: 14752
  Gene Symbol: RSPRY1
  Gene Name: ring finger and SPRY domain containing 1
  ENST ID: ENST00000564435
  CDS Start-End: 305-743
ttcctaggggactgagggagggctggggcggtacgaagcgggggtgggctctgcgcgtaatggcagcgccgtggcctcgcgtccatctttgccgttctctcggacctgtcacaaaggagtcgcgccgccgccgccgccccctccctccgaactgccattggatgtccagaatcccctgtagttgataatgttgggaataagctctgcaactttctttggcattcagttgttaaaaacaaataggatgcaaattcctcaactccaggttatgaaaacagtacttggaaaactgaaaactacctaaatgatcgtctttggttgggccgtgttcttagcgagcagaagccttggccagggtctgttgttgactctcgaagagcacatagcccacttcctagggactggaggtgccgctactaccatgggtaattcctgtatctgccgagatgacagtggaacagatgacagtgttgacacccaacagcaacaggccgagaacagtgcagtacccactgctgacacaaggagccaaccacgggaccctgttcggccaccaaggaggggccgaggacctcatgagccaaggagaaagaaacaaaatgtggatgggctagtgttggacacactggcagtaatacggactcttgtagataatgatcaggaacctccctattcaatgataacattacacgaaatggcagaaacagatgaaggatggttggatgttgtccagtctttaatta

SEQ ID NO: 177117 - DNA, 692 bp, Homo sapiens
  Payload ID: 14752
  Gene Symbol: RSPRY1
  Gene Name: ring finger and SPRY domain containing 1
  ENST ID: ENST00000562439
  CDS Start-End: 255-692
agacttgattgggccattcacgcctcaggatgaggactggccagtctgcgcctggagggcgggccggtcccgctgatcacgtgacacgatttttgaaagaactgccattggatgtccagaatcccctgtagttgataatgttgggaataagctctgcaactttctttggcattcagttgttaaaaacaaataggatgcaaattcctcaactccaggttatgaaaacagtacttggaaaactgaaaactacctaaatgatcgtctttggttgggccgtgttcttagcgagcagaagccttggccagggtctgttgttgactctcgaagagcacatagcccacttcctagggactggaggtgccgctactaccatgggtaattcctgtatctgccgagatgacagtggaacagatgacagtgttgacacccaacagcaacaggccgagaacagtgcagtacccactgctgacacaaggagccaaccacgggaccctgttcggccaccaaggaggggccgaggacctcatgagccaaggagaaagaaacaaaatgtggatgggctagtgttggacacactggcagtaatacggactcttgtagataatgatcaggaacctccctattcaatgataacattacacgaaatggcagaaacagatgaaggatggttggatgttgtccagtctttaatt

SEQ ID NO: 177118 - DNA, 2124 bp, Homo sapiens
  Payload ID: 14753
  Gene Symbol: RFWD2
  Gene Name: ring finger and WD repeat domain 2, E3 ubiquitin protein ligase
  Uniprot ID: Q8NHY2
  ENST ID: ENST00000308769
  CDS Start-End: 1-2124
atgtctggtagccgccaggccgggtcgggctccgctgggacaagccccgggtcctcggcggcctcctcggtgacttccgcctcctcgtctttatcctcttccccgtcgccgccttccgtggcggtttcggcggcagcgctggtgtccggcggggtggcccaggccgccggctcgggcggcctcgggggcccggtgcggcctgtgttggtggcgcccgccgtatcgggtagcggcggcggggcggtgtccacgggcctgtcccggcacagctgcgcggccaggcccagcgccggcgtaggaggcagcagctccagcctaggcagcggcagcaggaagcgacctctcctcgcccccctctgcaacgggctcatcaactcctacgaggacaaaagcaacgacttcgtatgccccatctgctttgatatgattgaagaagcatacatgacaaaatgtggccacagcttttgctacaagtgtattcatcagagtttggaggacaataatagatgtcccaagtgtaactatgttgtggacaatattgaccatctgtatcctaatttcttggtgaatgaactcattcttaaacagaagcaaagatttgaggaaaagaggttcaaattggaccactcaaatggccacaggtggcagatatttcaagattggttgggaactgaccaagataaccttgatttggccaatgtcaatcttatgttggagttactagtgcagaagaagaaacaactggaagcagaatcacatgcagcccaactacagattcttatggaattcctcaaggttgcaagaagaaataagagagaggaaatgagtggcttatactctcctgtcagtgaggatagcacagtgcctcaatttgaagctccttctccatcacacagtagtattattgattccacagaatacagccaacctccaggtttcagtggcagttctcagacaaagaaacagccttggtataatagcacgttagcatcaagacgaaaacgacttactgctcattttgaagacttggagcagtgttacttttctacaaggatgtctcgtatctcagatgacagtcgaactgcaagccagttggatgaatttcaggaatgcttgtccaagtttactcgatataattcagtacgacctttagccacattgtcatatgctagtgatctctataatggttccagtatagtctctagtattgaatttgaccgggattgtgactattttgcgattgctggagttacaaagaagattaaagtctatgaatatgacactgtcatccaggatgcagtggatattcattaccctgagaatgaaatgacctgcaattcgaaaatcagctgtatcagttggagtagttaccataagaacctgttagctagcagtgattatgaaggcactgttattttatgggatggattcacaggacagaggtcaaaggtctatcaggagcatgagaagaggtgttggagtgttgactttaatttgatggatcctaaactcttggcttcaggttctgatgatgcaaaagtgaagctgtggtctaccaatctagacaactcagtggcaagcattgaggcaaaggctaatgtgtgctgtgttaaattcagcccctcttccagataccatttggctttcggctgtgcagatcactgtgtccactactatgatcttcgtaacactaaacagccaatcatggtattcaaaggacaccgtaaagcagtctcttatgcaaagtttgtgagtggtgaggaaattgtctctgcctcaacagacagtcagctaaaactgtggaatgtagggaaaccatactgcctacgttccttcaagggtcatatcaatgaaaaaaactttgtaggcctggcttccaatggagattatatagcttgtggaagtgaaaataactctctctacctgtactataaaggactttctaagactttgctaacttttaagtttgatacagtcaaaagtgttctcgacaaagaccgaaaagaagatgatacaaatgaatttgttagtgctgtgtgctggagggcactaccagatggggagtccaatgtgctgattgctgctaacagtcagggtacaattaaggtgctagaattggtatga

SEQ ID NO: 177119 - DNA, 2022 bp, Homo sapiens
  Payload ID: 14753
  Gene Symbol: RFWD2
  Gene Name: ring finger and WD repeat domain 2, E3 ubiquitin protein ligase
  ENST ID: ENST00000367666
  CDS Start-End: 1-1701
gcatacatgacaaaatgtggccacagcttttgctacaagtgtattcatcagagtttggaggacaataatagatgtcccaagtgtaactatgttgtggacaatattgaccatctgtatcctaatttcttggtgaatgaactcattcttaaacagaagcaaagatttgaggaaaagaggttcaaattggaccactcagtgagtagcaccaatggccacaggtggcagatatttcaagattggttgggaactgaccaagataaccttgatttggccaatgtcaatcttatgttggagttactagtgcagaagaagaaacaactggaagcagaatcacatgcagcccaactacagattcttatggaattcctcaaggttgcaagaagaaataagagagaggaaatgagtggcttatactctcctgtcagtgaggatagcacagtgcctcaatttgaagctccttctccatcacacagtagtattattgattccacagaatacagccaacctccaggtttcagtggcagttctcagacaaagaaacagccttggtataatagcacgttagcatcaagacgaaaacgacttactgctcattttgaagacttggagcagtgttacttttctacaaggatgtctcgtatctcagatgacagtcgaactgcaagccagttggatgaatttcaggaatgcttgtccaagtttactcgatataattcagtacgacctttagccacattgtcatatgctagtgatctctataatggttccagtatagtctctagtattgaatttgaccgggattgtgactattttgcgattgctggagttacaaagaagattaaagtctatgaatatgacactgtcatccaggatgcagtggatattcattaccctgagaatgaaatgacctgcaattcgaaaatcagctgtatcagttggagtagttaccataagaacctgttagctagcagtgattatgaaggcactgttattttatgggatggattcacaggacagaggtcaaaggtctatcaggagcatgagaagaggtgttggagtgttgactttaatttgatggatcctaaactcttggcttcaggttctgatgatgcaaaagtgaagctgtggtctaccaatctagacaactcagtggcaagcattgaggcaaaggctaatgtgtgctgtgttaaattcagcccctcttccagataccatttggctttcggctgtgcagatcactgtgtccactactatgatcttcgtaacactaaacagccaatcatggtattcaaaggacaccgtaaagcagtctcttatgcaaagtttgtgagtggtgaggaaattgtctctgcctcaacagacagtcagctaaaactgtggaatgtagggaaaccatactgcctacgttccttcaagggtcatatcaatgaaaaaaactttgtaggcctggcttccaatggagattatatagcttgtggaagtgaaaataactctctctacctgtactataaaggactttctaagactttgctaacttttaagtttgatacagtcaaaagtgttctcgacaaagaccgaaaagaagatgatacaaatgaatttgttagtgctgtgtgctggagggcactaccagatggggagtccaatgtgctgattgctgctaacagtcagggtacaattaaggtgctagaattggtatgaagggttaactcaagtcaaattgtacttgatcctgctgaaatacatctgcagctgacaatgagagaagaaacagaaaatgtcatgtgatgtctctccccaaagtcatcatgggttttggatttgttttgaatatttttttctttttttcttttccctcctttatgacctttgggacattgggaatacccagccaactctccaccatcaatgtaactccatggacattgctgctcttggtggtgttatctaatttttgtgatagggaaacaaattcttttgaataaaaataaataacaaaacaataaaagtttattgagccac

SEQ ID NO: 177120 - DNA, 2034 bp, Homo sapiens
  Payload ID: 14753
  Gene Symbol: RFWD2
  Gene Name: ring finger and WD repeat domain 2, E3 ubiquitin protein ligase
  ENST ID: ENST00000367667
  CDS Start-End: 1-340
cgccggcgtaggaggcagcagctccagcctaggcagcggcagcaggaagcgacctctcctcgcccccctctgcaacgggctcatcaactcctacgaggacaaaagcaacgacttcgtatgccccatctgctttgatatgattgaagaagcatacatgacaaaatgtggccacagcttttgctacaagtgtattcatcagagtttggaggacaataatagatgtcccaagtgtaactatgttgtggacaatattgaccatctgtatcctaatttcttgggaatcacatgcagcccaactacagattcttatggaattcctcaaggttgcaagaagaaataagagagagcaactggaacagatccagaaggagctaagtgttttggaagaggatattaagagagtggaagaaatgagtggcttatactctcctgtcagtgaggatagcacagtgcctcaatttgaagctccttctccatcacacagtagtattattgattccacagaatacagccaacctccaggtttcagtggcagttctcagacaaagaaacagccttggtataatagcacgttagcatcaagacgaaaacgacttactgctcattttgaagacttggagcagtgttacttttctacaaggatgtctcgtatctcagatgacagtcgaactgcaagccagttggatgaatttcaggaatgcttgtccaagtttactcgatataattcagtacgacctttagccacattgtcatatgctagtgatctctataatggttccagtatagtctctagtattgaatttgaccgggattgtgactattttgcgattgctggagttacaaagaagattaaagtctatgaatatgacactgtcatccaggatgcagtggatattcattaccctgagaatgaaatgacctgcaattcgaaaatcagctgtatcagttggagtagttaccataagaacctgttagctagcagtgattatgaaggcactgttattttatgggatggattcacaggacagaggtcaaaggtctatcaggagcatgagaagaggtgttggagtgttgactttaatttgatggatcctaaactcttggcttcaggttctgatgatgcaaaagtgaagctgtggtctaccaatctagacaactcagtggcaagcattgaggcaaaggctaatgtgtgctgtgttaaattcagcccctcttccagataccatttggctttcggctgtgcagatcactgtgtccactactatgatcttcgtaacactaaacagccaatcatggtattcaaaggacaccgtaaagcagtctcttatgcaaagtttgtgagtggtgaggaaattgtctctgcctcaacagacagtcagctaaaactgtggaatgtagggaaaccatactgcctacgttccttcaagggtcatatcaatgaaaaaaactttgtaggcctggcttccaatggagattatatagcttgtggaagtgaaaataactctctctacctgtactataaaggactttctaagactttgctaacttttaagtttgatacagtcaaaagtgttctcgacaaagaccgaaaagaagatgatacaaatgaatttgttagtgctgtgtgctggagggcactaccagatggggagtccaatgtgctgattgctgctaacagtcagggtacaattaaggtgctagaattggtatgaagggttaactcaagtcaaattgtacttgatcctgctgaaatacatctgcagctgacaatgagagaagaaacagaaaatgtcatgtgatgtctctccccaaagtcatcatgggttttggatttgttttgaatatttttttctttttttcttttccctcctttatgacctttgggacattgggaatacccagccaactctccaccatcaatgtaactccatggacattgctgctcttggtggtgttatctaatttttgtgatagggaaacaaattcttttgaataaaaataaataacaaaacaataaaagtttattgagccaca

SEQ ID NO: 177121 - DNA, 3033 bp, Homo sapiens
  Payload ID: 14753
  Gene Symbol: RFWD2
  Gene Name: ring finger and WD repeat domain 2, E3 ubiquitin protein ligase
  Uniprot ID: Q8NHY2
  ENST ID: ENST00000367669
  CDS Start-End: 516-2711
cacctataccattcattccagtctcctcaattctttcactgtattaagacggcctgccctctggcacgttttctggaacgaaagcggcttgggacagacagactcccttcgccagggagccccgaccccgagggcgcgccctgagcgtctgagcgcagccccgctgcgtccccagttgtatcccccgccacgcccgcctcttccgccgctcgcgcgcgcgcgcacggccggccacggcgcgccggggttggctgctacagggaccgcggtggcggcggcggcctcgacagcggtagtgccttctactccgcttttttagtttcctccgccccctcccgtgggacgctgttgtgtggctgccttaaaaaaaaacgcaactttattgttcctcagccccacctccggctcggcgggcgtcctcaggatgcactgaggctgaggggaggggaggcggcggagggtcgaggtcgcggtccctctcctccgagcgcccggctggaggggagggagtcacgatgtctggtagccgccaggccgggtcgggctccgctgggacaagccccgggtcctcggcggcctcctcggtgacttccgcctcctcgtctttatcctcttccccgtcgccgccttccgtggcggtttcggcggcagcgctggtgtccggcggggtggcccaggccgccggctcgggcggcctcgggggcccggtgcggcctgtgttggtggcgcccgccgtatcgggtagcggcggcggggcggtgtccacgggcctgtcccggcacagctgcgcggccaggcccagcgccggcgtaggaggcagcagctccagcctaggcagcggcagcaggaagcgacctctcctcgcccccctctgcaacgggctcatcaactcctacgaggacaaaagcaacgacttcgtatgccccatctgctttgatatgattgaagaagcatacatgacaaaatgtggccacagcttttgctacaagtgtattcatcagagtttggaggacaataatagatgtcccaagtgtaactatgttgtggacaatattgaccatctgtatcctaatttcttggtgaatgaactcattcttaaacagaagcaaagatttgaggaaaagaggttcaaattggaccactcagtgagtagcaccaatggccacaggtggcagatatttcaagattggttgggaactgaccaagataaccttgatttggccaatgtcaatcttatgttggagttactagtgcagaagaagaaacaactggaagcagaatcacatgcagcccaactacagattcttatggaattcctcaaggttgcaagaagaaataagagagagcaactggaacagatccagaaggagctaagtgttttggaagaggatattaagagagtggaagaaatgagtggcttatactctcctgtcagtgaggatagcacagtgcctcaatttgaagctccttctccatcacacagtagtattattgattccacagaatacagccaacctccaggtttcagtggcagttctcagacaaagaaacagccttggtataatagcacgttagcatcaagacgaaaacgacttactgctcattttgaagacttggagcagtgttacttttctacaaggatgtctcgtatctcagatgacagtcgaactgcaagccagttggatgaatttcaggaatgcttgtccaagtttactcgatataattcagtacgacctttagccacattgtcatatgctagtgatctctataatggttccagtatagtctctagtattgaatttgaccgggattgtgactattttgcgattgctggagttacaaagaagattaaagtctatgaatatgacactgtcatccaggatgcagtggatattcattaccctgagaatgaaatgacctgcaattcgaaaatcagctgtatcagttggagtagttaccataagaacctgttagctagcagtgattatgaaggcactgttattttatgggatggattcacaggacagaggtcaaaggtctatcaggagcatgagaagaggtgttggagtgttgactttaatttgatggatcctaaactcttggcttcaggttctgatgatgcaaaagtgaagctgtggtctaccaatctagacaactcagtggcaagcattgaggcaaaggctaatgtgtgctgtgttaaattcagcccctcttccagataccatttggctttcggctgtgcagatcactgtgtccactactatgatcttcgtaacactaaacagccaatcatggtattcaaaggacaccgtaaagcagtctcttatgcaaagtttgtgagtggtgaggaaattgtctctgcctcaacagacagtcagctaaaactgtggaatgtagggaaaccatactgcctacgttccttcaagggtcatatcaatgaaaaaaactttgtaggcctggcttccaatggagattatatagcttgtggaagtgaaaataactctctctacctgtactataaaggactttctaagactttgctaacttttaagtttgatacagtcaaaagtgttctcgacaaagaccgaaaagaagatgatacaaatgaatttgttagtgctgtgtgctggagggcactaccagatggggagtccaatgtgctgattgctgctaacagtcagggtacaattaaggtgctagaattggtatgaagggttaactcaagtcaaattgtacttgatcctgctgaaatacatctgcagctgacaatgagagaagaaacagaaaatgtcatgtgatgtctctccccaaagtcatcatgggttttggatttgttttgaatatttttttctttttttcttttccctcctttatgacctttgggacattgggaatacccagccaactctccaccatcaatgtaactccatggacattgctgctcttggtggtgttatctaatttttgtgatagggaaacaaattcttttgaataaaaataaataacaaaacaataaaagtttattgagccaca

SEQ ID NO: 177122 - DNA, 975 bp, Homo sapiens
  Payload ID: 14753
  Gene Symbol: RFWD2
  Gene Name: ring finger and WD repeat domain 2, E3 ubiquitin protein ligase
  Uniprot ID: Q8NHY2
  ENST ID: ENST00000474194
  CDS Start-End: 106-579
cgggcgtcctcaggatgcactgaggctgaggggaggggaggcggcggagggtcgaggtcgcggtccctctcctccgagcgcccggctggaggggagggagtcacgatgtctggtagccgccaggccgggtcgggctccgctgggacaagccccgggtcctcggcggcctcctcggtgacttccgcctcctcgtctttatcctcttccccgtcgccgccttccgtggcggtttcggcggcagcgctggtgtccggcggggtggcccaggccgccggctcgggcggcctcgggggcccggtgcggcctgtgttggtggcgcccgccgtatcgggtagcggcggcggggcggtgtccacgggcctgtcccggcacagctgcgcggccaggcccagcgccggcgtaggaggcagcagctccagcctaggcagcggcagcaggaagcgacctctcctcgcccccctctgcaacgggctcatcaactcctacgaggacaaaagcaacgacttcgtatgccccatctgctttgatatgattgaagaagcatacatgacaaaatgtggccacagcttttgtgaatgaactcattcttaaacagaagcaaagatttgaggaaaagaggttcaaattggaccactcagtgagtagcaccaatggccacaggtggcagatatttcaagattggttgggaactgaccaagataaccttgatttggccaatgtcaatcttatgttggagttactagtgcagaagaagaaacaactggaagcagaatcacatgcagcccaactacagattcttatggaattcctcaaggttgcaagaagaaataagagagagcaactggaacagatccagaaggagctaagtgttttggaagaggatattaagagagtggaagaaatgagtggcttatactctcctgtcagtgaggatagcacagtgcctcaatttgaagctccttctccatcacacag

SEQ ID NO: 177123 - DNA, 617 bp, Homo sapiens
  Payload ID: 14753
  Gene Symbol: RFWD2
  Gene Name: ring finger and WD repeat domain 2, E3 ubiquitin protein ligase
  ENST ID: ENST00000498306
  CDS Start-End: 50-617
ggagtagcgaggcagggtggggataataaagagccccatctgctttgatatgattgaagaagcatacatgacaaaatgtggccacagcttttgctacaagtgtattcatcagagtttggaggacaataatagatgtcccaagtgtaactatgttgtggacaatattgaccatctgtatcctaatttcttggtgaatgaactcattcttaaacagaagcaaagatttgaggaaaagaggttcaaattggaccactcagtgagtagcaccaatggccacaggtggcagatatttcaagattggttgggaactgaccaagataaccttgatttggccaatgtcaatcttatgttggagttactagtgcagaagaagaaacaactggaagcagaatcacatgcagcccaactacagattcttatggaattcctcaaggttgcaagaagaaataagagagaggaaatgagtggcttatactctcctgtcagtgaggatagcacagtgcctcaatttgaagctccttctccatcacacagtagtattattgattccacagaatacagccaacctccaggtttcagtggcagttctcagacaaagaaacagccttggtataata

SEQ ID NO: 177124 - DNA, 741 bp, Homo sapiens
  Payload ID: 14753
  Gene Symbol: RFWD2
  Gene Name: ring finger and WD repeat domain 2, E3 ubiquitin protein ligase
  ENST ID: ENST00000459744
  CDS Start-End: 1-741
tgagtggcttatactctcctgtcagtgaggatagcacagtgcctcaatttgaagctccttctccatcacacagccttgaattcagttctgatatgcacaggatctttgtcaatggaatacttattattagtattattgattccacagaatacagccaacctccaggtttcagtggcagttctcagacaaagaaacagccttggtataatagcacgttagcatcaagacgaaaacgacttactgctcattttgaagacttggagcagtgttacttttctacaaggatgtctcgtatctcagatgacagtcgaactgcaagccagttggatgaatttcaggaatgcttgtccaagtttactcgatataattcagtacgacctttagccacattgtcatatgctagtgatctctataatggttccagtatagtctctagtattgaatttgaccgggattgtgactattttgcgattgctggagttacaaagaagattaaagtctatgaatatgacactgtcatccaggatgcagtggatattcattaccctgagaatgaaatgacctgcaattcgaaaatcagctgtatcagttggagtagttaccataagaacctgttagctagcagtgattatgaaggcactgttattttatgggatggattcacaggacagaggtcaaaggtctatcaggagcatgagaagaggtgttggagtgttgactttaatttgatggatcctaaac

SEQ ID NO: 177125 - DNA, 773 bp, Homo sapiens
  Payload ID: 14753
  Gene Symbol: RFWD2
  Gene Name: ring finger and WD repeat domain 2, E3 ubiquitin protein ligase
  ENST ID: ENST00000491600
  CDS Start-End: 109-315
agagggaatcgagcgtttgcaggcattcgagctcctggttggtggggtgaaggaatgttggagtagcgaggcagggtggggataataaagagccccatctgctttgatatgattgaagaagcatacatgacaaaatgtggccacagcttttgctacaagtgtattcatcagagtttggaggacaataatagatgtcccaagtgtaactatgttgtggacaatattgaccatctgtatcctaatttcttggtgtgcatactctgtctgctcctctctgcctcccttggttttgaatgctctctttccctctcctgatcctgaaaggctgattcagtgaatgaactcattcttaaacagaagcaaagatttgaggaaaagaggttcaaattggaccactcagtgagtagcaccaatggccacaggtggcagatatttcaagattggttgggaactgaccaagataaccttgatttggccaatgtcaatcttatgttggagttactagtgcagaagaagaaacaactggaagcagaatcacatgcagcccaactacagattcttatggaattcctcaaggttgcaagaagaaataagagagagcaactggaacagatccagaaggagctaagtgttttggaagaggatattaagagagtggaagaaatgagtggcttatactctcctgtcagtgaggatagcacagtgcctcaatttgaagctccttctccatcacacagtagtattattgattccacagaatacagccaacctcc

SEQ ID NO: 177126 - DNA, 4957 bp, Homo sapiens
  Payload ID: 14754
  Gene Symbol: RFWD3
  Gene Name: ring finger and WD repeat domain 3
  Uniprot ID: Q6PCD5
  ENST ID: ENST00000361070
  CDS Start-End: 99-2423
aagtggcagttggcgtaggtgcattcggagtgcggccgaggtaactaccgagtcttcggcgggctcgcgagcccggccgcggcctgctggtttcagtgatggctcatgaagcaatggaatatgatgttcaggtgcagttaaatcatgccgaacaacagccagctcctgctggcatggccagcagccaagggggaccagccctcctccagcctgttcctgctgatgtggtcagcagccagggggtaccatccatcctccagccagctcctgctgaggtgatcagcagccaagcgacaccacccctgctccagcctgctccgcaactgtctgttgacctgacagaagtggaggtcttgggagaagacactgtggagaacatcaatccaagaacttcagaacaacataggcagggatctgatggtaatcacaccatcccagcatcttcgttgcattcaatgaccaacttcatcagcggactgcagagacttcatggcatgctggaattcctgagaccttcatcttcaaaccacagtgtagggccaatgagaacaagaaggagggtatctgcttcacggagggcaagagccggagggtctcagaggacagacagtgccaggttgagagcaccattggatgcttactttcaggtgagcaggacccagcctgacttgccagctaccacttatgattcagagactaggaatcctgtatctgaagagttgcaggtgtctagtagttctgattctgacagtgacagctctgcagagtatggaggggttgttgaccaggcagaggaatctggagctgtcattttagaagagcaactagcaggtgtctcagcagagcaagaagttacatgtatcgatggaggcaagaccctccccaaacagccatctccccagaagtctgagcctctgctaccttctgcttctatggatgaggaagaaggggacacttgtacaatatgtctggaacagtggaccaatgctggggaccaccggctctcagcattacgctgtgggcatctctttgggtataggtgcatttccacgtggcttaaaggacaagtacgaaaatgtccccagtgcaacaagaaagccaggcacagtgacattgtcgtcctttatgcccgaaccctgagagctttggacactagtgaacaggagcgcatgaaaagttccctactgaaggaacagatgctaaggaaacaggccgagttagaatcagcacagtgccgactccaactgcaggtcctcactgataagtgcactaggcttcaaaggcgtgttcaggacttgcaaaaacttacgtcacatcaaagtcagaatttacagcaacccaggggctcccaagcatgggtcctgagctgctcaccctccagccagggccagcacaagcacaagtaccacttccaaaagaccttcacagtatctcaggcaggaaactgccggatcatggcatactgtgatgctctgagctgcctggtgatatcacagccttctcctcaggcctcttttcttccaggctttggtgttaagatgttgagtactgccaacatgaagagcagtcagtacattccgatgcatggcaaacagatccgtggactggcgtttagcagttacctcagaggcttgctactctctgcttccctagacaacactattaaactgaccagcctggagacaaataccgtggtccagacttataatgctggacgtcctgtctggagctgttgctggtgtcttgatgaggctaactacatctatgctggactggccaatggttcaattctggtatatgacgtgcgaaacacgagcagtcatgtgcaggagttagtagctcagaaagccagatgcccactggtctccctgtcatacatgcccagagctgcctcagctgcatttccatatggtggggtgctggctggaaccttggaggatgcttcattctgggaacagaaaatggacttttctcattggcctcatgtgctgcccttggagccagggggctgcatagactttcagacagagaacagctcccggcactgtcttgtgacctacaggcctgataaaaatcacaccaccatacgaagtgtgctgatggaaatgtcctaccgactggatgacactggaaatccaatctgctcctgccagcctgtacatacattttttggaggacctacttgcaaactattgaccaaaaatgccattttccaaagcccagagaatgatggcaacatcctggtgtgtactggggatgaagcagcaaattctgccctgctgtgggatgctgccagtggctcgttgctccaggacctacagaccgatcagcctgtgttggacatctgcccatttgaggtgaaccgtaacagctacttggctaccttaacagagaagatggtccacatctataagtgggagtgactgtggtctcgaaaccttgaaggcatgctgctggttagatgttgtttgctagcgcctagcagccccaagcaagatccctgtttattgtctgcagtctagaacattgggaatcatggtttgtttgcattagtatgattctaggaccctaggtcactgagacactacagattgtgtatctgttatgtccactaaaagagtaattgatgggtactttatctacattatccatttcttgggtttaaagccttcattaaccattattgtatgttggaaattcttattttctttattttctgtgtgactttctggaccttagagagtgtcctctcatcatctaggatgtgagtgggcatcaagcattttctggggaatatgacatcccatctgagttgtcctgtcacttaagtatccttgaagggactaaccatcgtcttggtactgatttgatgcaacgtagatgtaaaagagtattattcagttgaacacaagagggcactgtagaaccttgtgtccggtttatttctgaccttgaaggctgacaatcttttagtaacttgtctcatctccacacaagtgtgtgatagcacacctgggtgtgctttgtggcaataacacttgtgttccaggtgtgaagtgctgggacattggcaggcccagtgatggaagcagctagtgaacgattccctttgctaatgcctagtgcattaagttcattgctttgcgaaaggtaaggaaagaggccagttgtttgagcggtggggaagattttgttttttctagccagcttaggatctcaggattggttttatccaagctagtgctttgaagaacactatctcttgccaggaaaagatgagtgataggtcaaagcttttacttgagtctcccctagtgtcagagatcaggagaaaagacataagagaatttacaaaagctattcagactgctattgaaaacatgagaagaacttgtctcccattttgagagttcctatctaaataaagccaattcctcagactgaggggctgttcttaagtgttctttatacattccagttatccagttaaagccttccccatgtgaagctgatgtttgattccagtttcctttgatttgcctccctaaccttttctagggctcagtttgtatttctttgccttgcctcagactactttgccaacccacttccacaacagaatatgcttcaagatgtgggcaggtcagtgtcctgttcatgggagaaaatggcttaacagtctgattttctcaaatgattattgaagagttgttatcgtttttattataaaacacttctgacctgtcaattcaagagctgtttctaggatctttctctccggcaaggggttgttgcactagatttccccagagttccaagttctagttgtgccttttaatgaccctttaatattttaggacataattttttccttttttaaatttttttgtagaaatagatgtttcactacgttgtccaggctggtcttggactcctggcctcaagcaatcctcccacctcagcctcctaaagtgccaaaattataggcgtgagccactgcacccggcccctatttgaagacgtcttttgtaaaagctagcttctagaacctgagaaaagctcttttctcagaggagatactccttttgatatgttaatgattaagagtggttgcccaggcctagtttcagtggcagaataggattggaattaaaaagcagaactcatctggcttcagcagattgccaccaagaggatacaggtggtcaggtcctggctggctttgtctttgggcctgggcaggcttaggatttgactttctttgaagtacctgatgctgattgattccactaatagtaggaagcaagagacttaactatgagggacgttatgtgaatcttaagtcttaccagtccttgcattagtacattaaatttggatgttttggaagcaaattcatacgatcgtgagtgatttctccaaagaaaaaaagccttgtccagcctgaccaacatggtgaaaccccatctctactaaaaatacaaaaattaactgggtgcagtggtgcgcatgcctgtagtcccagctacttgggaggctgaggcaggagaattgcttgaaccctgggaggcagaggttgcagtgagtcgagatcgcgccactgcactccagcctcggtgacagagcaagactccatctcaaaaaaaacaaacaaacaaaaaaaaaccctgatgccattcccagtccccgttgtaggacatcacatttataaatccaggctttagtcttctgggctccaccagtctctgccccaccatattcctttgtcactacctctaagtttttttccccacttgaggatttggagttaaacgaactcaaaatgtcttgtcattgtatgtattcttgcccctgctttgaaaacagggccatgggaactctgtttatgccctgttttaatgtttctgttttatgttttactgttaatatgaaaataaagaatttgctatgtataatg

SEQ ID NO: 177127 - DNA, 586 bp, Homo sapiens
  Payload ID: 14754
  Gene Symbol: RFWD3
  Gene Name: ring finger and WD repeat domain 3
  ENST ID: ENST00000572337
  CDS Start-End: 513-586
attcggagtgcggccgaggtaactaccgagtcttcggcgggctcgcgagcccggccgcggcctgctggtttcagacggagtcttactctctctcccggtctggagtgcagtggcgtgatctcggctcaatgtaacctccactctccgggttcaaggggttctcctgcctcagcctcccaagtagctaggaccacaggttgagagcaccattggatgcttactttcaggtgagcaggacccagcctgacttgccagctaccacttatgattcagagactaggaatcctgtatctgaagagttgcaggtgtctagtagttctgattctgacagtgacagctctgcagagtatggaggggttgttgaccaggcagaggaatctggagctgtcattttagaagagcaactagcaggtgtctcagcagagcaagaagttacatgtatcgatggaggcaagaccctccccaaacagccatctccccagaagtctgagcctctgctaccttctgcttctatggatgaggaagaaggggacacttgtacaatatgtctggaacagtggaccaatgctggggaccaccggctctc

SEQ ID NO: 177128 - DNA, 528 bp, Homo sapiens
  Payload ID: 14754
  Gene Symbol: RFWD3
  Gene Name: ring finger and WD repeat domain 3
  ENST ID: ENST00000576652
  CDS Start-End: 161-528
aactaccgagtcttcggcgggctcgcgagcccggccgcggcctgctggtttcagagatgggaatttcactgtgttgcccaagctggtctggaacaccagagcacggagtcttactctctctcccggtctggagtgcagtggcgtgatctcggctcaattgatggctcatgaagcaatggaatatgatgttcaggtgcagttaaatcatgccgaacaacagccagctcctgctggcatggccagcagccaagggggaccagccctcctccagcctgttcctgctgatgtggtcagcagccagggggtaccatccatcctccagccagctcctgctgaggtgatcagcagccaagcgacaccacccctgctccagcctgctccgcaactgtctgttgacctgacagaagtggaggtcttgggagaagacactgtggagaacatcaatccaagaacttcagaacaacataggcagggatctgatggtaatcacaccatcccagcatcttcgttgcattcaatgaccaactt

SEQ ID NO: 177129 - DNA, 599 bp, Homo sapiens
  Payload ID: 14754
  Gene Symbol: RFWD3
  Gene Name: ring finger and WD repeat domain 3
  ENST ID: ENST00000572990
  CDS Start-End: 148-599
agttggcgtaggtgcattcggagtgcggccgaggtaactaccgagtcttcggcgggctcgcgagcccggccgcggcctgctggtttcagacggagtcttactctctctcccggtctggagtgcagtggcgtgatctcggctcaattgatggctcatgaagcaatggaatatgatgttcaggtgcagttaaatcatgccgaacaacagccagctcctgctggcatggccagcagccaagggggaccagccctcctccagcctgttcctgctgatgtggtcagcagccagggggtaccatccatcctccagccagctcctgctgaggtgatcagcagccaagcgacaccacccctgctccagcctgctccgcaactgtctgttgacctgacagaagtggaggtcttgggagaagacactgtggagaacatcaatccaagaacttcagaacaacataggcagggatctgatggtaatcacaccatcccagcatcttcgttgcattcaatgaccaacttcatcagcggactgcagagacttcatggcatgctggaattcctgagaccttcatcttcaaaccacagtgtagggccaatgagaac

SEQ ID NO: 177130 - DNA, 3033 bp, Homo sapiens
  Payload ID: 14754
  Gene Symbol: RFWD3
  Gene Name: ring finger and WD repeat domain 3
  Uniprot ID: Q6PCD5
  ENST ID: ENST00000571750
  CDS Start-End: 210-2534
ggcgtaggtgcattcggagtgcggccgaggtaactaccgagtcttcggcgggctcgcgagcccggccgcggcctgctggtttcagacggagtcttactctctctcccggtctggagtgcagtggcgtgatctcggctcaatgtaacctccactctccgggttcaaggggttctcctgcctcagcctcccaagtagctaggaccacagtgatggctcatgaagcaatggaatatgatgttcaggtgcagttaaatcatgccgaacaacagccagctcctgctggcatggccagcagccaagggggaccagccctcctccagcctgttcctgctgatgtggtcagcagccagggggtaccatccatcctccagccagctcctgctgaggtgatcagcagccaagcgacaccacccctgctccagcctgctccgcaactgtctgttgacctgacagaagtggaggtcttgggagaagacactgtggagaacatcaatccaagaacttcagaacaacataggcagggatctgatggtaatcacaccatcccagcatcttcgttgcattcaatgaccaacttcatcagcggactgcagagacttcatggcatgctggaattcctgagaccttcatcttcaaaccacagtgtagggccaatgagaacaagaaggagggtatctgcttcacggagggcaagagccggagggtctcagaggacagacagtgccaggttgagagcaccattggatgcttactttcaggtgagcaggacccagcctgacttgccagctaccacttatgattcagagactaggaatcctgtatctgaagagttgcaggtgtctagtagttctgattctgacagtgacagctctgcagagtatggaggggttgttgaccaggcagaggaatctggagctgtcattttagaagagcaactagcaggtgtctcagcagagcaagaagttacatgtatcgatggaggcaagaccctccccaaacagccatctccccagaagtctgagcctctgctaccttctgcttctatggatgaggaagaaggggacacttgtacaatatgtctggaacagtggaccaatgctggggaccaccggctctcagcattacgctgtgggcatctctttgggtataggtgcatttccacgtggcttaaaggacaagtacgaaaatgtccccagtgcaacaagaaagccaggcacagtgacattgtcgtcctttatgcccgaaccctgagagctttggacactagtgaacaggagcgcatgaaaagttccctactgaaggaacagatgctaaggaaacaggccgagttagaatcagcacagtgccgactccaactgcaggtcctcactgataagtgcactaggcttcaaaggcgtgttcaggacttgcaaaaacttacgtcacatcaaagtcagaatttacagcaacccaggggctcccaagcatgggtcctgagctgctcaccctccagccagggccagcacaagcacaagtaccacttccaaaagaccttcacagtatctcaggcaggaaactgccggatcatggcatactgtgatgctctgagctgcctggtgatatcacagccttctcctcaggcctcttttcttccaggctttggtgttaagatgttgagtactgccaacatgaagagcagtcagtacattccgatgcatggcaaacagatccgtggactggcgtttagcagttacctcagaggcttgctactctctgcttccctagacaacactattaaactgaccagcctggagacaaataccgtggtccagacttataatgctggacgtcctgtctggagctgttgctggtgtcttgatgaggctaactacatctatgctggactggccaatggttcaattctggtatatgacgtgcgaaacacgagcagtcatgtgcaggagttagtagctcagaaagccagatgcccactggtctccctgtcatacatgcccagagctgcctcagctgcatttccatatggtggggtgctggctggaaccttggaggatgcttcattctgggaacagaaaatggacttttctcattggcctcatgtgctgcccttggagccagggggctgcatagactttcagacagagaacagctcccggcactgtcttgtgacctacaggcctgataaaaatcacaccaccatacgaagtgtgctgatggaaatgtcctaccgactggatgacactggaaatccaatctgctcctgccagcctgtacatacattttttggaggacctacttgcaaactattgaccaaaaatgccattttccaaagcccagagaatgatggcaacatcctggtgtgtactggggatgaagcagcaaattctgccctgctgtgggatgctgccagtggctcgttgctccaggacctacagaccgatcagcctgtgttggacatctgcccatttgaggtgaaccgtaacagctacttggctaccttaacagagaagatggtccacatctataagtgggagtgactgtggtctcgaaaccttgaaggcatgctgctggttagatgttgtttgctagcgcctagcagccccaagcaagatccctgtttattgtctgcagtctagaacattgggaatcatggtttgtttgcattagtatgattctaggaccctaggtcactgagacactacagattgtgtatctgttatgtccactaaaagagtaattgatgggtactttatctacattatccatttcttgggtttaaagccttcattaaccattattgtatgttggaaattcttattttctttattttctgtgtgactttctggaccttagagagtgtcctctcatcatctaggatgtgagtgggcatcaagcattttctggggaatatgacatcccatctgagttgtcctgtcacttaagtatccttgaagggactaaccatcgtcttggtactgatttgatgcaacgtagatgtaaaagagtattattcagttgaacacaagagggcactgt

SEQ ID NO: 177131 - DNA, 706 bp, Homo sapiens
  Payload ID: 14754
  Gene Symbol: RFWD3
  Gene Name: ring finger and WD repeat domain 3
  ENST ID: ENST00000575113
  CDS Start-End: 358-706
gatcactgaaggagccgagttcgctgctgcggggcctgccctggccggggtgggaggtcgcccggcccttcccccgagagcctagcctcgggctcctcagcggcgttgcctgcgcccgctctgagcgccgattacttcatcactttaaagttgatggaagaacttcatttttaatttcatcacggaaactgtggagtaaagacttgtattatccctgttttacaggagaacaaacggagtcttactctctctcccggtctggagtgcagtggcgtgatctcggctcaatgtaacctccactctccgggttcaaggggttctcctgcctcagcctcccaagtagctaggaccacagtgatggctcatgaagcaatggaatatgatgttcaggtgcagttaaatcatgccgaacaacagccagctcctgctggcatggccagcagccaagggggaccagccctcctccagcctgttcctgctgatgtggtcagcagccagggggtaccatccatcctccagccagctcctgctgaggtgatcagcagccaagcgacaccacccctgctccagcctgctccgcaactgtctgttgacctgacagaagtggaggtcttgggagaagacactgtggagaacatcaatccaagaacttcagaacaacataggcagggatctgatggtaatcacaccatcccagcatcttcgt

SEQ ID NO: 177132 - DNA, 3282 bp, Homo sapiens
  Payload ID: 14755
  Gene Symbol: RNF6
  Gene Name: ring finger protein (C3H2C3 type) 6
  Uniprot ID: Q9Y252
  ENST ID: ENST00000346166
  CDS Start-End: 163-2220
gcttccttgtgagaatctaggtctctaagggaagcgttacttgaggctcggttgggaagagatgggcagctctcaaaaaaggcacaaacaattgaaggatggataccatggcatatgttaaaagcgtgttgaaaggaaaataagaaagccaggaatctcaggatgaatcagtctagatcgagatcagatggtggcagtgaagaaaccttacctcaagaccataatcatcatgaaaatgagagaagatggcagcaagagcgtctccacagagaagaggcctattatcagtttattaatgaactcaatgatgaagattatcggcttatgagagaccataatcttttaggcacccctggagaaataacatcagaagaactgcaacagcggttagatggcgtcaaggaacaactagcatctcagcctgacttgagagatggaacgaattacagagactcagaagtccctagagaaagttcacatgaagattctcttctagaatggttgaacacctttcggcgcacaggaaatgcaactcgaagtggacaaaatgggaaccaaacttggagagctgtgagtcgaacaaacccgaacaatggagagtttcggtttagtttggaaatccacgtaaatcatgaaaatagaggatttgaaattcatggagaagattatacagacattccactttcagatagtaacagagatcatactgcaaataggcaacaaaggtcaactagtcctgtggctaggcgaacaagaagccaaacctcagtgaatttcaatggtagtagttccaacattccaaggactaggcttgcttcaagggggcaaaatccagctgaaggatctttctcaacattgggaaggttaagaaatggaattgggggagcagctggcattcctcgagctaacgcttcacgcactaatttcagtagtcacacaaaccaatcaggtggtagtgaactcaggcaaagggaggggcaacggtttggagcagcacatgtttgggaaaatggggctagaagtaatgttacagtgaggaatacaaaccaaagattagagccaataagattacgatctacttccaatagtcgaagccgttcaccaattcagagacagagtggcactgtttatcataattcccaaagggaaagtagaccagtacagcaaaccactagaagatctgttaggaggagaggtagaactcgagtctttttagagcaagatagagaacgagaacgcagaggtactgcatataccccattctctaattcaaggcttgtgtcaagaataacagtagaagaaggagaagaatccagcagatcctcaactgctgtacgacgacatccaacaatcacactggaccttcaagtgagaaggatccgtcctggagaaaatagagatcgggatagtattgcaaatagaactcgatccagagtagggctagcagaaaatacagtcactattgaaagcaatagtgggggctttcgccgaaccatttctcgtttagagcggtcaggtattcgaacctatgttagtaccataacagttcctcttcgtaggatttctgagaatgagcttgttgagccatcatcagtggctcttcggtcaattttaaggcagatcatgactgggtttggagaactgagttctctaatggaggccgattctgagtcagaacttcaaagaaatggccagcatttaccagacatgcactcagaactgagtaacttaggtacagataacaacaggagccagcacagggaaggttcctctcaagacaggcaggcccaaggagacagcactgaaatgcatggtgaaaacgagaccacccagcctcatactcgaaacagtgacagtaggggtggcaggcagttgcgaaatccaaacaatttagttgaaactggaacactacccattcttcgccttgctcacttttttttactaaatgaaagtgatgatgatgatcgaatacgtggtttaaccaaagagcagattgacaatctttccaccaggcactatgagcataacagtattgatagtgaactaggtaaaatctgtagtgtttgtattagtgactatgtaactggaaacaagctcaggcaattaccttgcatgcatgaatttcacattcattgtattgaccgatggctctcagagaattgcacttgtccgatctgtcggcagcctgttttagggtctaacatagcaaacaatgggtaaggtgatgggatctactcaaatactgttttttagtagaactgaatgttcaagcattgttttgctgagttatttgtgattagctaaccaggatgaaaaataacagattatatatagtttgaactatttttcgtgtgcttttttaaacttgttaaaaagaaatttatataaaatttaaaatacaaatgttaaattatccagaaatacagaatagttaatattgctagaaccaaataacctctaaaatgtttttattttggtaattttgtcatgctaagcacttttgtatctgcacaattcagtaggttaagaatcaatcttctttttcttaatagtacagcagactttagcttcaagtttcataggcttagtacttatatctagacatttgtgtctaaataagcttttcattaactttttattttaaggacagtatcttttcatgaaagagtatttggctgaatgtttgctatatatatgttacttgaaatgttaaatttaatatgcagcataccataggtgtatatataggtatataattttaaggttaaaatattcagtctacaagtttggttcttatttaagcttttgggctaatactgcatatggcacaatgtttaatattggcaagttcatctcagagaaaggggattcagatataattttaaagtagagataatttactgaagcgtctctgacaatctaacttattagacagcaagcaatatataatactgaaaaagtattcagaaatggaaaatttacatcatataggttatttaacttgtgttcagcctttttgtaacttttttgaaagtgcaaacaattctttggattattaaataaggtatacagtatgcatggtttctcaaatttagttttaaaatctaaaagtctataaagaatcagatgcataggcaatatgttaagttcacttggaggctaaaaatctccagtgaaaacaaaacgaaaacctttaagagaatgtagagtttatataaacacaaagtatgcattgaagatctgtttctaccaataaacattaaaacaaagactgtatgtgaa

SEQ ID NO: 177133 - DNA, 3398 bp, Homo sapiens
  Payload ID: 14755
  Gene Symbol: RNF6
  Gene Name: ring finger protein (C3H2C3 type) 6
  Uniprot ID: Q9Y252
  ENST ID: ENST00000381570
  CDS Start-End: 292-2349
gggaaagaaaccagtagcgggacggagggcgggggtggcaagaaagtcaaggtttagaagtaagccggagacgcctaaccctggtaacatccgaatgggaacgggataggaaggaaggcctttgagagaggaggcgtaaacccaggaacagtgacagtgtaggacgaaaggcctaagtttgttgcggaagatgggcagctctcaaaaaaggcacaaacaattgaaggatggataccatggcatatgttaaaagcgtgttgaaaggaaaataagaaagccaggaatctcaggatgaatcagtctagatcgagatcagatggtggcagtgaagaaaccttacctcaagaccataatcatcatgaaaatgagagaagatggcagcaagagcgtctccacagagaagaggcctattatcagtttattaatgaactcaatgatgaagattatcggcttatgagagaccataatcttttaggcacccctggagaaataacatcagaagaactgcaacagcggttagatggcgtcaaggaacaactagcatctcagcctgacttgagagatggaacgaattacagagactcagaagtccctagagaaagttcacatgaagattctcttctagaatggttgaacacctttcggcgcacaggaaatgcaactcgaagtggacaaaatgggaaccaaacttggagagctgtgagtcgaacaaacccgaacaatggagagtttcggtttagtttggaaatccacgtaaatcatgaaaatagaggatttgaaattcatggagaagattatacagacattccactttcagatagtaacagagatcatactgcaaataggcaacaaaggtcaactagtcctgtggctaggcgaacaagaagccaaacctcagtgaatttcaatggtagtagttccaacattccaaggactaggcttgcttcaagggggcaaaatccagctgaaggatctttctcaacattgggaaggttaagaaatggaattgggggagcagctggcattcctcgagctaacgcttcacgcactaatttcagtagtcacacaaaccaatcaggtggtagtgaactcaggcaaagggaggggcaacggtttggagcagcacatgtttgggaaaatggggctagaagtaatgttacagtgaggaatacaaaccaaagattagagccaataagattacgatctacttccaatagtcgaagccgttcaccaattcagagacagagtggcactgtttatcataattcccaaagggaaagtagaccagtacagcaaaccactagaagatctgttaggaggagaggtagaactcgagtctttttagagcaagatagagaacgagaacgcagaggtactgcatataccccattctctaattcaaggcttgtgtcaagaataacagtagaagaaggagaagaatccagcagatcctcaactgctgtacgacgacatccaacaatcacactggaccttcaagtgagaaggatccgtcctggagaaaatagagatcgggatagtattgcaaatagaactcgatccagagtagggctagcagaaaatacagtcactattgaaagcaatagtgggggctttcgccgaaccatttctcgtttagagcggtcaggtattcgaacctatgttagtaccataacagttcctcttcgtaggatttctgagaatgagcttgttgagccatcatcagtggctcttcggtcaattttaaggcagatcatgactgggtttggagaactgagttctctaatggaggccgattctgagtcagaacttcaaagaaatggccagcatttaccagacatgcactcagaactgagtaacttaggtacagataacaacaggagccagcacagggaaggttcctctcaagacaggcaggcccaaggagacagcactgaaatgcatggtgaaaacgagaccacccagcctcatactcgaaacagtgacagtaggggtggcaggcagttgcgaaatccaaacaatttagttgaaactggaacactacccattcttcgccttgctcacttttttttactaaatgaaagtgatgatgatgatcgaatacgtggtttaaccaaagagcagattgacaatctttccaccaggcactatgagcataacagtattgatagtgaactaggtaaaatctgtagtgtttgtattagtgactatgtaactggaaacaagctcaggcaattaccttgcatgcatgaatttcacattcattgtattgaccgatggctctcagagaattgcacttgtccgatctgtcggcagcctgttttagggtctaacatagcaaacaatgggtaaggtgatgggatctactcaaatactgttttttagtagaactgaatgttcaagcattgttttgctgagttatttgtgattagctaaccaggatgaaaaataacagattatatatagtttgaactatttttcgtgtgcttttttaaacttgttaaaaagaaatttatataaaatttaaaatacaaatgttaaattatccagaaatacagaatagttaatattgctagaaccaaataacctctaaaatgtttttattttggtaattttgtcatgctaagcacttttgtatctgcacaattcagtaggttaagaatcaatcttctttttcttaatagtacagcagactttagcttcaagtttcataggcttagtacttatatctagacatttgtgtctaaataagcttttcattaactttttattttaaggacagtatcttttcatgaaagagtatttggctgaatgtttgctatatatatgttacttgaaatgttaaatttaatatgcagcataccataggtgtatatataggtatataattttaaggttaaaatattcagtctacaagtttggttcttatttaagcttttgggctaatactgcatatggcacaatgtttaatattggcaagttcatctcagagaaaggggattcagatataattttaaagtagagataatttactgaagcgtctctgacaatctaacttattagacagcaagcaatatataatactgaaaaagtattcagaaatggaaaatttacatcatataggttatttaacttgtgttcagcctttttgtaacttttttgaaagtgcaaacaattctttggattattaaataaggtatacagtatgcatggtttctcaaatttagttttaaaatctaaaagtctataaagaatcagatgcataggcaatatgttaagttcacttggaggctaaaaatctccagtgaaaacaaaacgaaaacctttaagagaatgtagagtttatataaacacaaagtatgcattgaagatctgtttctaccaataaacattaaaacaaa

SEQ ID NO: 177134 - DNA, 3706 bp, Homo sapiens
  Payload ID: 14755
  Gene Symbol: RNF6
  Gene Name: ring finger protein (C3H2C3 type) 6
  Uniprot ID: Q9Y252
  ENST ID: ENST00000381588
  CDS Start-End: 593-2650
agagttaagtgctgggacttcccaagcctggaaagcagaccgtgtctctgcaactacgcggctgccacgagcgctgagcggccgggcatttggcctcgaggaggaggcactgtaagggcggcgcaagagggcggaacgcgggacgccaggcaccctagctcccgacggacgcagttttcagttgcacgggcgagctccgggccggctgcggagcgactccccgccgccaagtgggcggcgtggctgtcgggaaagaagggctggggcctgccgttcttcctcccgagtatcccctccagctggacgaccccacgctgcagcacgggcttccggcttctctcctcagtggccaattcgagggcacagcgggctccggaggcgcggcggcaagcctatcccgcctcccaaccacagcctccagcacccgagagaacggccgcccacagcacacgttctccggacaggagggcgaaggcccaagacctggagagatgggcagctctcaaaaaaggcacaaacaattgaaggatggataccatggcatatgttaaaagcgtgttgaaaggaaaataagaaagccaggaatctcaggatgaatcagtctagatcgagatcagatggtggcagtgaagaaaccttacctcaagaccataatcatcatgaaaatgagagaagatggcagcaagagcgtctccacagagaagaggcctattatcagtttattaatgaactcaatgatgaagattatcggcttatgagagaccataatcttttaggcacccctggagaaataacatcagaagaactgcaacagcggttagatggcgtcaaggaacaactagcatctcagcctgacttgagagatggaacgaattacagagactcagaagtccctagagaaagttcacatgaagattctcttctagaatggttgaacacctttcggcgcacaggaaatgcaactcgaagtggacaaaatgggaaccaaacttggagagctgtgagtcgaacaaacccgaacaatggagagtttcggtttagtttggaaatccacgtaaatcatgaaaatagaggatttgaaattcatggagaagattatacagacattccactttcagatagtaacagagatcatactgcaaataggcaacaaaggtcaactagtcctgtggctaggcgaacaagaagccaaacctcagtgaatttcaatggtagtagttccaacattccaaggactaggcttgcttcaagggggcaaaatccagctgaaggatctttctcaacattgggaaggttaagaaatggaattgggggagcagctggcattcctcgagctaacgcttcacgcactaatttcagtagtcacacaaaccaatcaggtggtagtgaactcaggcaaagggaggggcaacggtttggagcagcacatgtttgggaaaatggggctagaagtaatgttacagtgaggaatacaaaccaaagattagagccaataagattacgatctacttccaatagtcgaagccgttcaccaattcagagacagagtggcactgtttatcataattcccaaagggaaagtagaccagtacagcaaaccactagaagatctgttaggaggagaggtagaactcgagtctttttagagcaagatagagaacgagaacgcagaggtactgcatataccccattctctaattcaaggcttgtgtcaagaataacagtagaagaaggagaagaatccagcagatcctcaactgctgtacgacgacatccaacaatcacactggaccttcaagtgagaaggatccgtcctggagaaaatagagatcgggatagtattgcaaatagaactcgatccagagtagggctagcagaaaatacagtcactattgaaagcaatagtgggggctttcgccgaaccatttctcgtttagagcggtcaggtattcgaacctatgttagtaccataacagttcctcttcgtaggatttctgagaatgagcttgttgagccatcatcagtggctcttcggtcaattttaaggcagatcatgactgggtttggagaactgagttctctaatggaggccgattctgagtcagaacttcaaagaaatggccagcatttaccagacatgcactcagaactgagtaacttaggtacagataacaacaggagccagcacagggaaggttcctctcaagacaggcaggcccaaggagacagcactgaaatgcatggtgaaaacgagaccacccagcctcatactcgaaacagtgacagtaggggtggcaggcagttgcgaaatccaaacaatttagttgaaactggaacactacccattcttcgccttgctcacttttttttactaaatgaaagtgatgatgatgatcgaatacgtggtttaaccaaagagcagattgacaatctttccaccaggcactatgagcataacagtattgatagtgaactaggtaaaatctgtagtgtttgtattagtgactatgtaactggaaacaagctcaggcaattaccttgcatgcatgaatttcacattcattgtattgaccgatggctctcagagaattgcacttgtccgatctgtcggcagcctgttttagggtctaacatagcaaacaatgggtaaggtgatgggatctactcaaatactgttttttagtagaactgaatgttcaagcattgttttgctgagttatttgtgattagctaaccaggatgaaaaataacagattatatatagtttgaactatttttcgtgtgcttttttaaacttgttaaaaagaaatttatataaaatttaaaatacaaatgttaaattatccagaaatacagaatagttaatattgctagaaccaaataacctctaaaatgtttttattttggtaattttgtcatgctaagcacttttgtatctgcacaattcagtaggttaagaatcaatcttctttttcttaatagtacagcagactttagcttcaagtttcataggcttagtacttatatctagacatttgtgtctaaataagcttttcattaactttttattttaaggacagtatcttttcatgaaagagtatttggctgaatgtttgctatatatatgttacttgaaatgttaaatttaatatgcagcataccataggtgtatatataggtatataattttaaggttaaaatattcagtctacaagtttggttcttatttaagcttttgggctaatactgcatatggcacaatgtttaatattggcaagttcatctcagagaaaggggattcagatataattttaaagtagagataatttactgaagcgtctctgacaatctaacttattagacagcaagcaatatataatactgaaaaagtattcagaaatggaaaatttacatcatataggttatttaacttgtgttcagcctttttgtaacttttttgaaagtgcaaacaattctttggattattaaataaggtatacagtatgcatggtttctcaaatttagttttaaaatctaaaagtctataaagaatcagatgcataggcaatatgttaagttcacttggaggctaaaaatctccagtgaaaacaaaacgaaaacctttaagagaatgtagagtttatataaacacaaagtatgcattgaagatctgtttctaccaataaacattaaaacaaagactgta

SEQ ID NO: 177135 - DNA, 1752 bp, Homo sapiens
  Payload ID: 14756
  Gene Symbol: RING1
  Gene Name: ring finger protein 1
  Uniprot ID: Q06587
  ENST ID: ENST00000374656
  CDS Start-End: 209-1429
gtgacgtagggccccagcgcccgggccatggcggcggcggtggcgggagctgctgtctgagcagcggttgcggaccgagcgaacttggcccaggagcccgggcctagggagaggcgcggcggcggcgggagcgcgaacggctggagctggccttcttcgccttctcctcggctgtggagccctggtggggggtctgcgcccggtcaccatgacgacgccggcgaatgcccagaatgccagcaaaacgtgggaactgagtctgtatgagctgcaccggaccccgcaggaagccataatggatggcacagagattgctgtttcccctcggtcactgcattcagaactcatgtgccctatctgcctggacatgctgaagaatacgatgaccaccaaggagtgcctccacagattctgctctgactgcattgtcacagccctacggagcgggaacaaggagtgtcctacctgccgaaagaagctggtgtccaagcgatccctacggccagaccccaactttgatgccctgatctctaagatctatcctagccgggaggaatacgaggcccatcaagaccgagtgcttatccgcctgagccgcctgcacaaccagcaggcattgagctccagcattgaggaggggctacgcatgcaggccatgcacagggcccagcgtgtgaggcggccgataccagggtcagatcagaccacaacgatgagtgggggggaaggagagcccggggagggagaaggggatggagaagatgtgagctcagactccgcccctgactctgccccaggccctgctcccaagcgaccccgtggagggggcgcaggggggagcagtgtagggacagggggaggcggcactggtggggtgggtgggggtgccggttcggaagactctggtgaccggggagggactctgggagggggaacgctgggccccccaagccctcctggggcccccagccccccagagccaggtggagaaattgagctcgtgttccggccccaccccctgctcgtggagaagggagaatactgccagacgaggtatgtgaagacaactgggaatgccacagtggaccacctctccaagtacttggccctgcgcattgccctcgagcggaggcaacagcaggaagcaggggagccaggagggcctggagggggcgcctctgacaccggaggacctgatgggtgtggcggggagggtgggggtgccggaggaggtgacggtcctgaggagcctgctttgcccagcctggagggcgtcagtgaaaagcagtacaccatctacatcgcacctggaggcggggcgttcacgacgttgaatggctcgctgaccctggagctggtgaatgagaaattctggaaggtgtcccggccactggagctgtgctatgctcccaccaaggatccaaagtgaccccaccaggggacagccagaggaaggggaccatggggtatccctgtgtcctggtctatcaccccagcttctttgtcccccagtacccccagcccagccagccaataagaggacacaaatgaggacacgtggcttttatacaaagtatctatatgagattcttctatattgtacagagtggggcaaaacacgcccccatctgctgccttttctattgccctgcaacgtcccatctatacgaggtgttggagaaggtgaagaaccctcccattcacgcccgcctaccaacaacaaacgtgcttttttcctctttgaaacctgca

SEQ ID NO: 177136 - DNA, 1752 bp, Homo sapiens
  Payload ID: 14756
  Gene Symbol: RING1
  Gene Name: ring finger protein 1
  Uniprot ID: Q06587
  ENST ID: ENST00000383212
  CDS Start-End: 209-1429
gtgacgtagggccccagcgcccgggccatggcggcggcggtggcgggagctgctgtctgagcagcggttgcggaccgagcgaacttggcccaggagcccgggcctagggagaggcgcggcggcggcgggagcgcgaacggctggagctggccttcttcgccttctcctcggctgtggagccctggtggggggtctgcgcccggtcaccatgacgacgccggcgaatgcccagaatgccagcaaaacgtgggaactgagtctgtatgagctgcaccggaccccgcaggaagccataatggatggcacagagattgctgtttcccctcggtcactgcattcagaactcatgtgccctatctgcctggacatgctgaagaatacgatgaccaccaaggagtgcctccacagattctgctctgactgcattgtcacagccctacggagcgggaacaaggagtgtcctacctgccgaaagaagctggtgtccaagcgatccctacggccagaccccaactttgatgccctgatctctaagatctatcctagccgggaggaatacgaggcccatcaagaccgagtgcttatccgcctgagccgcctgcacaaccagcaggcattgagctccagcattgaggaggggctacgcatgcaggccatgcacagggcccagcgtgtgaggcggccgataccagggtcagatcagaccacaacgatgagtgggggggaaggagagcccggggagggagaaggggatggagaagatgtgagctcagactccgcccctgactctgccccaggccctgctcccaagcgaccccgtggagggggcgcaggggggagcagtgtagggacagggggaggcggcactggtggggtgggtgggggtgccggttcggaagactctggtgaccggggagggactctgggagggggaacgctgggccccccaagccctcctggggcccccagccccccagagccaggtggagaaattgagctcgtgttccggccccaccccctgctcgtggagaagggagaatactgccagacgaggtatgtgaagacaactgggaatgccacagtggaccacctctccaagtacttggccctgcgcattgccctcgagcggaggcaacagcaggaagcaggggagccaggagggcctggagggggcgcctctgacaccggaggacctgatgggtgtggcggggagggtgggggtgccggaggaggtgatggtcctgaggagcctgctttgcccagcctggagggcgtcagtgaaaagcagtacaccatctacatcgcacctggaggcggggcgttcacgacgttgaatggctcgctgaccctggagctggtgaatgagaaattctggaaggtgtcccggccactggagctgtgctatgctcccaccaaggatccaaagtgaccccaccaggggacagccagaggaaggggaccatggggtatccctgtgtcctggtctatcaccccagcttctttgtcccccagtacccccagcccagccagccaataagaggacacaaatgaggacacgtggcttttatacaaagtatctatatgagattcttctatattgtacagagtggggcaaaacacgcccccatctgctgccttttctattgccctgcaacgtcccatctatacgaggtgttggagaaggtgaagaaccctcccattcacgcccgcctaccaacaacaaacgtgcttttttcctctttgaaacctgca

SEQ ID NO: 177137 - DNA, 1752 bp, Homo sapiens; identical to SEQ ID NO: 177135
  Payload ID: 14756
  Gene Symbol: RING1
  Gene Name: ring finger protein 1
  Uniprot ID: Q06587
  ENST ID: ENST00000430233
  CDS Start-End: 209-1429

SEQ ID NO: 177138 - DNA, 1752 bp, Homo sapiens; identical to SEQ ID NO: 177136
  Payload ID: 14756
  Gene Symbol: RING1
  Gene Name: ring finger protein 1
  Uniprot ID: Q06587
  ENST ID: ENST00000436128
  CDS Start-End: 209-1429

SEQ ID NO: 177139 - DNA, 1752 bp, Homo sapiens; identical to SEQ ID NO: 177135
  Payload ID: 14756
  Gene Symbol: RING1
  Gene Name: ring finger protein 1
  Uniprot ID: Q06587
  ENST ID: ENST00000427374
  CDS Start-End: 209-1429

SEQ ID NO: 177140 - DNA, 1750 bp, Homo sapiens
  Payload ID: 14756
  Gene Symbol: RING1
  Gene Name: ring finger protein 1
  Uniprot ID: Q06587
  ENST ID: ENST00000415941
  CDS Start-End: 207-1427
gacgtagggccccagcgcccgggccatggcggcggcggtggcgggagctgctgtctgagcagcggttgcggaccgagcgaacttggcccaggagcccgggcctagggagaggcgcggcggcggcgggagcgcgaacggctggagctggccttcttcgccttctcctcggctgtggagccctggtggggggtctgcgcccggtcaccatgacgacgccggcgaatgcccagaatgccagcaaaacgtgggaactgagtctgtatgagctgcaccggaccccgcaggaagccataatggatggcacagagattgctgtttcccctcggtcactgcattcagaactcatgtgccctatctgcctggacatgctgaagaatacgatgaccaccaaggagtgcctccacagattctgctctgactgcattgtcacagccctacggagcgggaacaaggagtgtcctacctgccgaaagaagctggtgtccaagcgatccctacggccagaccccaactttgatgccctgatctctaagatctatcctagccgggaggaatacgaggcccatcaagaccgagtgcttatccgcctgagccgcctgcacaaccagcaggcattgagctccagcattgaggaggggctacgcatgcaggccatgcacagggcccagcgtgtgaggcggccgataccagggtcagatcagaccacaacgatgagtgggggggaaggagagcccggggagggagaaggggatggagaagatgtgagctcagactccgcccctgactctgccccaggccctgctcccaagcgaccccgtggagggggcgcaggggggagcagtgtagggacagggggaggcggcactggtggggtgggtgggggtgccggttcggaagactctggtgaccggggagggactctgggagggggaacgctgggccccccaagccctcctggggcccccagccccccagagccaggtggagaaattgagctcgtgttccggccccaccccctgctcgtggagaagggagaatactgccagacgaggtatgtgaagacaactgggaatgccacagtggaccacctctccaagtacttggccctgcgcattgccctcgagcggaggcaacagcaggaagcaggggagccaggagggcctggagggggcgcctctgacaccggaggacctgatgggtgtggcggggagggtgggggtgccggaggaggtgacggtcctgaggagcctgctttgcccagcctggagggcgtcagtgaaaagcagtacaccatctacatcgcacctggaggcggggcgttcacgacgttgaatggctcgctgaccctggagctggtgaatgagaaattctggaaggtgtcccggccactggagctgtgctatgctcccaccaaggatccaaagtgaccccaccaggggacagccagaggaaggggaccatggggtatccctgtgtcctggtctatcaccccagcttctttgtcccccagtacccccagcccagccagccaataagaggacacaaatgaggacacgtggcttttatacaaagtatctatatgagattcttctatattgtacagagtggggcaaaacacgcccccatctgctgccttttctattgccctgcaacgtcccatctatacgaggtgttggagaaggtgaagaaccctcccattcacgcccgcctaccaacaacaaacgtgcttttttcctctttgaaacctgca

SEQ ID NO: 177141 - DNA, 3825 bp, Homo sapiens
  Payload ID: 14757
  Gene Symbol: RNF10
  Gene Name: ring finger protein 10
  Uniprot ID: Q8N5U6
  ENST ID: ENST00000325954
  CDS Start-End: 462-2897
gagatgctgtttggcgactcgtcgccattcccggagcaggtcggcctcggcccaggggcgagtatccgttgctgtgtcggagacactagtccccgacaccgagacagccagccctctcccctgcctcgcggcgggagagcgtgtccggccggccggccggcggggctcgcgcaacctccctcgcctccccttcccccgcagcctccgccccgccaggcccggcccggactcccgagccccggcctcctcgtcctcggtcgccgctgccgccgggcttaacagccccgtccgccgcttctcttcctagtttgagaagccaaggaaggaaacagggaaaaatgtcgccatgaaggccgagaaccgctgccgccgccgacccccgccggccctgaacgccatgagcctgggtccccgccgcgcccgctccgctccgactgccgtcgccgccgaggcccccgttgatgccgctgagctcccccaacgccgccgccaccgcctccgacatggacaagaacagcggctccaacagctcctccgcctcttcgggcagcagcaaagggcaacagccgccccgctccgcctcggcggggccagccggcgagtctaaacccaagagcgatggaaagaactccagtggatccaagcgttataatcgcaaacgtgaactttcctaccccaaaaatgaaagttttaacaaccagtcccgtcgctccagttcacagaaaagcaagacttttaacaagatgcctcctcaaaggggcggcggcagcagcaaactctttagctcttcttttaatggtggaagacgagatgaggtagcagaggctcaacgggcagagtttagccctgcccagttctctggtcctaagaagatcaacctgaaccacttgttgaatttcacttttgaaccccgtggccagacgggtcactttgaaggcagtggacatggtagctggggaaagaggaacaagtggggacataagccttttaacaaggaactctttttacaggccaactgccaatttgtggtgtctgaagaccaagactacacagctcattttgctgatcctgatacattagttaactgggactttgtggaacaagtgcgcatttgtagccatgaagtgccatcttgcccaatatgcctctatccacctactgcagccaagataacccgttgtggacacatcttctgctgggcatgcatcctgcactatctttcactgagtgagaagacgtggagtaaatgtcccatctgttacagttctgtgcataagaaggatctcaagagtgttgttgccacagagtcacatcagtatgttgttggtgataccattacgatgcagctgatgaagagggagaaaggggtgttggtggctttgcccaaatccaaatggatgaatgtagaccatcccattcatctaggagatgaacagcacagccagtactccaagttgctgctggcctctaaggagcaggtgctgcaccgggtagttctggaggagaaagtagcactagagcagcagctggcagaggagaagcacactcccgagtcctgctttattgaggcagctatccaggagctcaagactcgggaagaggctctgtcgggattggccggaagcagaagggaggtcactggtgttgtggctgctctggaacaactggtgctgatggctcccttggcgaaggagtctgtttttcaacccaggaagggtgtgctggagtatctgtctgccttcgatgaagaaaccacggaagtttgttctctggacactccttctagacctcttgctctccctctggtagaagaggaggaagcagtgtctgaaccagagcctgaggggttgccagaggcctgtgatgacttggagttagcagatgacaatcttaaagaggggaccatttgcactgagtccagccagcaggaacccatcaccaagtcaggcttcacacgcctcagcagctctccttgttactacttttaccaagcggaagatggacagcatatgttcctgcaccctgtgaatgtgcgctgcctcgtgcgggagtacggcagcctggagaggagccccgagaagatctcagcaactgtggtggagattgctggctactccatgtctgaggatgttcgacagcgtcacagatatctctctcacttgccactcacctgtgagttcagcatctgtgaactggctttgcaacctcctgtggtctctaaggaaaccctagagatgttctcagatgacattgagaagaggaaacgtcagcgccaaaagaaggctcgggaggaacgccgccgagagcgcaggattgagatagaggagaacaagaaacagggcaagtacccagaagtccacattcccctcgagaatctacagcagtttcctgccttcaattcttatacctgctcctctgattctgctttgggtcccaccagcaccgagggccatggggccctctccatttctcctctcagcagaagtccaggttcccatgcagactttctgctgacccctctgtcacccactgccagtcagggcagtccctcattctgcgttgggagtctggaagaagactctcccttcccttcctttgcccagatgctgagggttggaaaagcaaaagcagatgtgtggcccaaaactgctccaaagaaagatgagaacagcttagttcctcctgcccctgtggacagcgacggggagagtgataattcagaccgtgttcctgtgcccagttttcaaaattccttcagccaagctattgaagcagccttcatgaaactggacacaccagctacttcagatcccctctctgaagagaaaggaggaaagaaaagaaaaaaacagaaacagaagctcctgttcagcacctcagtcgtccacaccaagtgacactactggcccaggctaccttctccatctggtttttgtttttgtttttttttcccccatgcttttgtttggctgctgtaatttttaagtatttgagtttgaacagattagctctggggggagggggtttccacaatgtgagggggaaccaagaaaattttaaatacagtgtattttccagcttcctgtctttacaccaaaataaagtattgacacaagagatctcttcctgccaaggtttttagttcattgccagtttagtctttttgacccatgtgtaattaatttttctcaacccaaagtaagattgagtcccctttgagatgcattagagcagtccaacccagaatggcacacactgctctgctgtagcatcatgtcagggcttcctggactcagtacacctctcagtttgtcttttaaaaaacagctgaatctttactacctatttagttctccttgttaaagaaacaggggtgggaataaaatggatttaggacacccagtttgaattgcagtttttttttttctgacacatggccaggctgtggtgccagcttaatggagtaggctgtccttggcacttgcatgtgtgaaaggagggttttgcctcttcttgagcatggcttgagttggtaaggaaagctgtaactcacgaagccctgagacctgctacccctaagatcgagcttgttttcagtgactggcttgagtcataggaggaggagtctggtacagctgcaggagagcagggccatctgaagcggtagcattgccaccatctccctctcatctagagcagttttcttatgccttggtttgagctgaatttgatgtgaattcttttgctgcttaataaagtgacctctaggtgcattagaatgcgaaggcaaatagttgcaataaatcacctgcacaagcattgtga

SEQ ID NO: 177142 - DNA, 2671 bp, Homo sapiens
  Payload ID: 14757
  Gene Symbol: RNF10
  Gene Name: ring finger protein 10
  Uniprot ID: Q8N5U6
  ENST ID: ENST00000413266
  CDS Start-End: 1-2451
atgccgctgagctcccccaacgccgccgccaccgcctccgacatggacaagaacagcggctccaacagctcctccgcctcttcgggcagcagcaaagggcaacagccgccccgctccgcctcggcggggccagccggcgagtctaaacccaagagcgatggaaagaactccagtggatccaagcgttataatcgcaaacgtgaactttcctaccccaaaaatgaaagttttaacaaccagtcccgtcgctccagttcacagaaaagcaagacttttaacaagatgcctcctcaaaggggcggcggcagcagcaaactctttagctcttcttttaatggtggaagacgagatgaggtagcagaggctcaacgggcagagtttagccctgcccagttctctggtcctaagaagatcaacctgaaccacttgttgaatttcacttttgaaccccgtggccagacgggtcactttgaaggcagtggacatggtagctggggaaagaggaacaagtggggacataagccttttaacaaggaactctttttacaggccaactgccaatttgtggtgtctgaagaccaagactacacagctcattttgctgatcctgatacattagttaactgggactttgtggaacaagtgcgcatttgtagccatgaagtgccatcttgcccaatatgcctctatccacctactgcagccaagataacccgttgtggacacatcttctgctgggcatgcatcctgcactatctttcactgagtgagaagacgtggagtaaatgtcccatctgttacagttctgtgcataagaaggatctcaagagtgttgttgccacagagtcacatcagtatgttgttggtgataccattacgatgcagctgatgaagagggagaaaggggtgttggtggctttgcccaaatccaaatggatgaatgtagaccatcccattcatctaggagatgaacagcacagccagtactccaagttgctgctggcctctaaggagcaggtgctgcaccgggtagttctggaggagaaagtagcactagagcagcagctggcagaggagaagcacactcccgagtcctgctttattgaggcagctatccaggagctcaagactcgggaagaggctctgtcgggattggccggaagcagaagggaggtcactggtgttgtggctgctctggaacaactggtgctgatggctcccttggcgaaggagtctgtttttcaacccaggaagagtttgctgcaacagggtgtgctggagtatctgtctgccttcgatgaagaaaccacggaagtttgttctctggacactccttctagacctcttgctctccctctggtagaagaggaggaagcagtgtctgaaccagagcctgaggggttgccagaggcctgtgatgacttggagttagcagatgacaatcttaaagaggggaccatttgcactgagtccagccagcaggaacccatcaccaagtcaggcttcacacgcctcagcagctctccttgttactacttttaccaagcggaagatggacagcatatgttcctgcaccctgtgaatgtgcgctgcctcgtgcgggagtacggcagcctggagaggagccccgagaagatctcagcaactgtggtggagattgctggctactccatgtctgaggatgttcgacagcgtcacagatatctctctcacttgccactcacctgtgagttcagcatctgtgaactggctttgcaacctcctgtggtctctaaggaaaccctagagatgttctcagatgacattgagaagaggaaacgtcagcgccaaaagaaggctcgggaggaacgccgccgagagcgcaggattgagatagaggagaacaagaaacagggcaagtacccagaagtccacattcccctcgagaatctacagcagtttcctgccttcaattcttatacctgctcctctgattctgctttgggtcccaccagcaccgagggccatggggccctctccatttctcctctcagcagaagtccaggttcccatgcagactttctgctgacccctctgtcacccactgccagtcagggcagtccctcattctgcgttgggagtctggaagaagactctcccttcccttcctttgcccagatgctgagggttggaaaagcaaaagcagatgtgtggcccaaaactgctccaaagaaagatgagaacagcttagttcctcctgcccctgtggacagcgacggggagagtgataattcagaccgtgttcctgtgcccagttttcaaaattccttcagccaagctattgaagcagccttcatgaaactggacacaccagctacttcagatcccctctctgaagagaaaggaggaaagaaaagaaaaaaacagaaacagaagctcctgttcagcacctcagtcgtccacaccaagtgacactactggcccaggctaccttctccatctggtttttgtttttgtttttttttcccccatgcttttgtttggctgctgtaatttttaagtatttgagtttgaacagattagctctggggggagggggtttccacaatgtgagggggaaccaagaaaattttaaatacagtgtattttccagcttcctgtctttacaccaaaataaagtattgacacaaga

SEQ ID NO: 177143 - DNA, 412 bp, Homo sapiens
  Payload ID: 14757
  Gene Symbol: RNF10
  Gene Name: ring finger protein 10
  ENST ID: ENST00000537740
  CDS Start-End: 1-412
atgaacagcacagccagtactccaagttgctgctggcctctaaggagcaggtgctgcaccgggtagttctggaggagaaagtagcactagagcagcagctggcagaggagaagcacactcccgagtcctgctttattgaggcagctatccaggagctcaagactcgggaagaggctctgtcgggattggccggaagcagaagggaggtcactggtgttgtggctgctctggaacaactggtgctgatggctcccttggcgaaggagtctgtttttcaacccaggaagagtttgctgcaacagggtgtgctggagtatctgtctgccttcgatgaagaaaccacggaagtttgttctctggacactccttctagacctcttgctctccctctggtagaagaggaggaagcagt

SEQ ID NO: 177144 - DNA, 321 bp, Homo sapiens
  Payload ID: 14757
  Gene Symbol: RNF10
  Gene Name: ring finger protein 10
  ENST ID: ENST00000539486
  CDS Start-End: 297-321
attacacgcatgaaacactgcttatggcctgtttccgcctctgtctcctgggtaatggggaccacaggtgcgcaccgccacgccaggctaaagaaataaagtgatgtactgtatgaagaagtgccgtaaagtgatattaaattttgagaagccaaggaaggaaacagggaaaaatgtcgccatgaaggccgagaaccgctgccgccgccgacccccgccggccctgaacgccatgagcctgggtccccgccgcgcccgctccgctccgactgccgtcgccgccgaggcccccgttgatgccgctgagctcccccaacgccg

SEQ ID NO: 177145 - DNA, 776 bp, Homo sapiens
  Payload ID: 14757
  Gene Symbol: RNF10
  Gene Name: ring finger protein 10
  ENST ID: ENST00000546262
  CDS Start-End: 478-776
tcccgagtcctgctttattgaggcagctatccaggagctcaagactcgggaagaggctctgtcgggattggccggaagcagaagggaggtcactggtgttgtggctgctctggaacaactggtgctgatggctcccttggcgaaggagtctgtttttcaacccaggaagaagaggaggaagcagtgtctgaaccagagcctgaggggttgccagaggcctgtgatgacttggagttagcagatgacaatcttaaagaggggaccatttgcactgagtccagccagcaggaacccatcaccaagtcaggcttcacacgcctcagcagctctccttgttactacttttaccaagcggaagatggacagcatatgttcctgcaccctgtgaatgtgcgctgcctcgtgcgggagtacggcagcctggagaggagccccgagaagatctcagcaactgtggtggagattgctggctactccatgtctgaggatgttcgacagcgtcacagatatctctctcacttgccactcacctgtgagttcagcatctgtgaactggctttgcaacctcctgtggtctctaaggaaaccctagagatgttctcagatgacattgagaagaggaaacgtcagcgccaaaagaaggctcgggaggaacgccgccgagagcgcaggattgagatagaggagaacaagaaacagggcaagtacccagaagtccacattcccctcgagaatctacagcagtttcctgccttcaattcttatacctgctcctc

SEQ ID NO: 177146 - DNA, 548 bp, Homo sapiens
  Payload ID: 14757
  Gene Symbol: RNF10
  Gene Name: ring finger protein 10
  ENST ID: ENST00000542207
  CDS Start-End: 1-548
ctgatacattagttaactgggactttgtggaacaagtgcgcatttgtagccatgaagtgccatcttgcccaatatgcctctatccacctactgcagccaagataacccgttgtggacacatcttctgctgggcatgcatcctgcactatctttcactgagtgagaagacgtggagtaaatgtcccatctgttacagttctgtgcataagaaggatctcaagagtgttgttgccacagagtcacatcagtatgttgttggtgataccattacgatgcagctgatgaagagggagaaaggggtgttggtggctttgcccaaatccaaatggatgaatgtagaccatcccattcatctaggagatgaacagcacagccagtactccaagttgctgctggcctctaaggagcaggtgctgcaccgggtagttctggaggagaaagtagcactagagcagcagctggcagaggagaagcacactcccgagtcctgctttattgaggcagctatccaggagctcaagggtgtgctggagtatctgtctgccttc

SEQ ID NO: 177147 - DNA, 635 bp, Homo sapiens
  Payload ID: 14757
  Gene Symbol: RNF10
  Gene Name: ring finger protein 10
  ENST ID: ENST00000540046
  CDS Start-End: 1-635
gtgtctgaaccagagcctgaggggttgccagaggcctgtgatgacttggagttagcagatgacaatcttaaagaggggaccatttgcactgagtccagccagcaggaacccatcaccaagtcaggcttcacacgcctcagcagctctccttgttactacttttaccaagatggacagcatatgttcctgcaccctgtgaatgtgcgctgcctcgtgcgggagtacggcagcctggagaggagccccgagaagatctcagcaactgtggtggagattgctggctactccatgtctgaggatgttcgacagcgtcacagatatctctctcacttgccactcacctgtgagttcagcatctgtgaactggctttgcaacctcctgtggtctctaaggaaaccctagagatgttctcagatgacattgagaagaggaaacgtcagcgccaaaagaaggctcgggaggaacgccgccgagagcgcaggattgagatagaggagaacaagaaacagggcaagtacccagaagtccacattcccctcgagaatctacagcagtttcctgccttcaattcttatacctgctcctctgattctgctttgggtcccaccagcaccgagggccatggggccctctc

SEQ ID NO: 177148 - DNA, 661 bp, Homo sapiens
  Payload ID: 14757
  Gene Symbol: RNF10
  Gene Name: ring finger protein 10
  ENST ID: ENST00000538254
  CDS Start-End: 1-441
cgagagcgcaggattgagatagaggagaacaagaaacagggcaagtactttctgctgacccctctgtcacccactgccagtcagggcagtccctcattctgcgttgggagtctggaagaagactctcccttcccttcctttgcccagatgctgagggttggaaaagcaaaagcagatgtgtggcccaaaactgctccaaagaaagatgagaacagcttagttcctcctgcccctgtggacagcgacggggagagtgataattcagaccgtgttcctgtgcccagttttcaaaattccttcagccaagctattgaagcagccttcatgaaactggacacaccagctacttcagatcccctctctgaagagaaaggaggaaagaaaagaaaaaaacagaaacagaagctcctgttcagcacctcagtcgtccacaccaagtgacactactggcccaggctaccttctccatctggtttttgtttttgtttttttttcccccatgcttttgtttggctgctgtaatttttaagtatttgagtttgaacagattagctctggggggagggggtttccacaatgtgagggggaaccaagaaaattttaaatacagtgtattttccagcttcctgtctttacaccaaaataaagtattgacacaaga

SEQ ID NO: 177149 - DNA, 1206 bp, Homo sapiens
  Payload ID: 14757
  Gene Symbol: RNF10
  Gene Name: ring finger protein 10
  ENST ID: ENST00000538796
  CDS Start-End: 225-479
cccggcctcctcgtcctcggtcgccgctgccgccgggcttaacagccccgtccgccgcttctcttcctagtttgagaagccaaggaaggaaacagggaaaaatgtcgccatgaaggccgagaaccgctgccgccgccgacccccgccggccctgaacgccatgagcctgggtccccgccgcgcccgctccgctccgactgccgtcgccgccgaggcccccgttgatgccgctgagctcccccaacgccgccgccaccgcctccgacatggacaagaacagcggctccaacagctcctccgcctcttcgggcagcagcaaagggcaacagccgccccgctccgcctcggcggggccagccggcgagtctaaacccaagagcgaattactaatttcagctggattcaatttgttgtcagttgattctgtagtaaggccatatgttgcccctctggaggtgcttgtcaactactctggatgatggatggaaagaactccagtggatccaagcgttataatcgcaaacgtgaactttcctaccccaaaaatgaaagttttaacaaccagtcccgtcgctccagttcacagaaaagcaagacttttaacaagatgcctcctcaaaggggcggcggcagcagcaaactctttagctcttcttttaatggtggaagacgagatgaggtagcagaggctcaacgggcagagtttagccctgcccagttctctggtcctaagaagatcaacctgaaccacttgttgaatttcacttttgaaccccgtggccagacgggtcactttgaaggcagtggacatggtagctggggaaagaggaacaagtggggacataagccttttaacaaggaactctttttacaggccaactgccaatttgtggtgtctgaagaccaagactacacagctcattttgctgatcctgatacattagttaactgggactttgtggaacaagtgcgcatttgtagccatgaagtgccatcttgcccaatatgcctctatccacctactgcagccaagataacccgttgtggacacatcttctgctgggcatgcatcctgcactatctttcactgagtgagaagacgtggagtaaatgtcccatctgttacagttctgtgcataagaaggatctcaagagtgttgttgccacagagtcacatcagtatgttgttggtgataccattacgat

SEQ ID NO: 177150 - DNA, 583 bp, Homo sapiens
  Payload ID: 14757
  Gene Symbol: RNF10
  Gene Name: ring finger protein 10
  ENST ID: ENST00000537997
  CDS Start-End: 212-583
gtcccagatccattcctctgtcgaagaggaagtcatccttcagtggctattcattgtggggttaagagcgcagactatgaattcagtctttttgggtcccagtttgccagaccttgaaattactaatttcagctggattcaatttgttgtcagttgattctgtagtaaggccatatgttgcccctctggaggtgcttgtcaactactctggatgatggatggaaagaactccagtggatccaagcgttataatcgcaaacgtgaactttcctaccccaaaaatgaaagttttaacaaccagtcccgtcgctccagttcacagaaaagcaagacttttaacaagatgcctcctcaaaggggcggcggcagcagcaaactctttagctcttcttttaatggtggaagacgagatgaggtagcagaggctcaacgggcagagtttagccctgcccagttctctggtcctaagaagatcaacctgaaccacttgttgaatttcacttttgaaccccgtggccagacgggtcactttgaaggcagtggacatggtagctggggaaagaggaacaagtggggacataag

SEQ ID NO: 177151 - DNA, 644 bp, Homo sapiens
  Payload ID: 14757
  Gene Symbol: RNF10
  Gene Name: ring finger protein 10
  ENST ID: ENST00000536869
  CDS Start-End: 1-315
tccaacagctcctccgcctcttcgggcagcagcaaagggcaacagccgccccgctccgcctcggcggggccagccggcgagtctaaacccaagagcgatggaaagaactccagtggatccaagcgttataatcgcaaacgtgaactttcctaccccaaaaatgaaagttttaacaaccagtcccgtcgctccagttcacagaaaagcaagacttttaacaagatgcctcctcaaaggggcggcggcagcagcaaactctttagctcttcttttaatggtggaagacgagatgagctgccaatttgtggtgtctgaagaccaagactacacagctcattttgctgatcctgatacattagttaactgggactttgtggaacaagtgcgcatttgtagccatgaagtgccatcttgcccaatatgcctctatccacctactgcagccaagataacccgttgtggacacatcttctgctgggcatgcatcctgcactatctttcactgagtgagaagacgtggagtaaatgtcccatctgttacagttctgtgcataagaaggatctcaagagtgttgttgccacagagtcacatcagtatgttgttggtgataccattacgatgcagctgatgaagagggagaaag

SEQ ID NO: 177152 - DNA, 562 bp, Homo sapiens
  Payload ID: 14757
  Gene Symbol: RNF10
  Gene Name: ring finger protein 10
  ENST ID: ENST00000542438
  CDS Start-End: 207-562
gctgtttggcgactcgtcgccattcccggagcaggtcggcctcggcccagggtttgagaagccaaggaaggaaacagggaaaaatgtcgccatgaaggccgagaaccgctgccgccgccgacccccgccggccctgaacgccatgagcctgggtccccgccgcgcccgctccgctccgactgccgtcgccgccgaggcccccgttgatgccgctgagctcccccaacgccgccgccaccgcctccgacatggacaagaacagcggctccaacagctcctccgcctcttcgggcagcagcaaagggcaacagccgccccgctccgcctcggcggggccagccggcgagtctaaacccaagagcgaattactaatttcagctggattcaatttgttgtcagttgattctgtagtaaggccatatgttgcccctctggaggagaaagtagcactagagcagcagctggcagaggagaagcacactcccgagtcctgctttattgaggcagctatccaggagctcaagactcgggaagaggctctgtcgggattggccggaagcag

SEQ ID NO: 177153 - DNA, 1336 bp, Homo sapiens
  Payload ID: 14757
  Gene Symbol: RNF10
  Gene Name: ring finger protein 10
  ENST ID: ENST00000545419
  CDS Start-End: 1-786
gaggcctgtgatgacttggagttagcagatgacaatcttaaagaggggaccatttgcactgagtccagccagcaggaacccatcaccaagtcaggcttcacacgcctcagcagctctccttgttactacttttaccaagcggaagatggacagcatatgttcctgcaccctgtgaatgtgcgctgcctcgtgcgggagtacggcagcctggagaggagccccgagaagatctcagcaactgtggtggagattgctggctactccatgtctgaggatgttcgacagcgtcacagatatctctctcacttgccactcacctgtgagttcagcatctgtgaactggctttgcaacctcctgtggtctctaaggaaaccctagagatgttctcagatgacattgagaagaggaaacgtcagcgccaaaagaaggctcgggaggaacgccgccgagagcgcaggattgagatagaggagaacaagaaacagggcaagtacccagaagtccacattcccctcgagaatctacagcagtttcctgccttcaattcttatacctgctcctctgattctgctttgggtcccaccagcaccgagggccatggggccctctccatttctcctctcagcagaagtccaggttcccatgcagactttctgctgacccctctgtcacccactgccagtcagggcagtccctcattctgcgttgggagtctggaagaagactctcccttcccttcctttgcccaggaattttactggcctgtggttggatctgaaagttaatgatgaaggagctattggaaaagcagactaaaagatgctgagggttggaaaagcaaaagcagatgtgtggcccaaaactgctccaaagaaagatgagaacagcttagttcctcctgcccctgtggacagcgacggggagagtgataattcagaccgtgttcctgtgcccagttttcaaaattccttcagccaagctattgaagcagccttcatgaaactggacacaccagctacttcagatcccctctctgaagagaaaggaggaaagaaaagaaaaaaacagaaacagaagctcctgttcagcacctcagtcgtccacaccaagtgacactactggcccaggctaccttctccatctggtttttgtttttgtttttttttcccccatgcttttgtttggctgctgtaatttttaagtatttgagtttgaacagattagctctggggggagggggtttccacaatgtgagggggaaccaagaaaattttaaatacagtgtattttccagcttcctgtctttacaccaaaataaagtattgacacaagaga

SEQ ID NO: 177154 - DNA, 3477 bp, Homo sapiens
  Payload ID: 14758
  Gene Symbol: RNF103
  Gene Name: ring finger protein 103
  Uniprot ID: O00237
  ENST ID: ENST00000237455
  CDS Start-End: 970-3027
ggctccggccgcggccgccgctgatacacggttgtggagggtacggccgcggtctccggaggtggcgggggtgttggggacgggtgctgcgaccggcactgcccatccgagcgggacgggcgctgagtggccgggaggcagccgggtagccgcctggaggagcagtctcggggcctattattggttttttccctccgagaccgattccatctgcagagaccgcgacgccccatcctgggccgggccgcagtgcccgcccgcctgagaggcgccgcccgccagccggcccgagcgaacctggagccgccgccgtgcccgccgctcttctcgcggagcctgggcggtcggcggggcctggggcctgggcttcgggcgcggcgttgcggcggccgctcctccccgcgcagaacacgctgggccccgggcctggcccggccgagcgccgcgccctcctgacccgcggccgcgggagtccggcccccacggcccctcgggccccggcctgccgcccggatccccgcctcctgggcggatctgagttattttttggtctccccctcccccttgagatcgcggcaccggagggccgaccccgccacctgggtcagtgcccgccccgggggaagcgtccctcgttttgttcttccccgcgagctctccccgcgcccctctcctttctgtgcttaatggatgggggttttgagtttttcccctttatttttgtcggctcttgactgggaggcccggcgcgaggctctgcgtctctgcgtccctcgtcgccgcctcgcgcccgcgcggatcccgtcacctgcttccccgccggggatggccggccagtgacggcgccgggtggcccgcgcgtggacacggggccctcgcccaagctgccaccgagccgcggcccccgccctcgacccttctctctcccgtattccgagctctctggaaagagaggaaactccagggaagatgtggctgaagctttttttcttgctcctctatttcctggtcctgttcgtcctggccaggttttttgaggccattgtgtggtatgaaactggcatctttgccacccagctggtggatccggtggcgctgagcttcaagaagctgaagaccattttggagtgccgggggttgggctactcagggttgcccgagaagaaggatgtccgggagctggtggaaaagtcaggtgacttgatggagggtgagctctattctgctctcaaggaagaagaagcatccgaatcggtttctagtaccaatttcagtggtgaaatgcacttctatgagcttgtggaagacacaaaagatggcatctggctggttcaggtcatagcaaatgacagaagtcccttggtgggcaaaattcactgggagaaaatggttaaaaaggtgtcaagatttggaatacgtacaggcacatttaactgttccagtgatcccagatattgcaggagaagaggctgggtccgatccacactcattatgtctgttccacaaacaagtacttcaaaagggaaagtcatgcttaaagaatacagtggacgcaagattgaagtagagcacatttttaaatggataactgctcatgcagcttctcggatcaaaaccatttataatgctgaacacttgaaagaagaatggaataaaagtgatcagtattggttaaaaatatacctatttgcaaaccttgaccagcccccagctttcttctctgcactaagtataaagtttactggaagagttgagtttatttttgttaatgtagaaaattgggacaacaagagttatatgacagatattggcatatataatatgccatcatacatacttagaactcctgaaggaatttacaggtatggaaaccacacaggcgaatttatatcccttcaggccatggattcatttttgcgctcattacaacccgaggtaaatgatctgtttgttttgagcttggttctagttaatcttatggcttggatggacttatttattacacaaggagctaccataaagcgatttgtggttctcataagcactttagggacatataattctctattaattatttcctggctacctgtgttgggctttttacagctaccttacttagatagcttttatgaatatagcttaaaattgttgagatattccaatacaaccacactggcttcatgggtaagggcagactggatgttttactcttcacacccagccctgtttctcagtacataccttggtcatggtttactaattgattactttgagaagaagagaaggcgcaacaacaacaatgatgaagtcaatgccaataacttagaatggttatcaagtctgtgggactggtacaccagctacctcttccacccgattgcttcttttcagaactttcctgtagaatctgattgggacgaagaccctgacttattcttggagcgcttagctttccctgacctttggcttcaccctctgataccaactgattatattaaaaacttaccaatgtggcgatttaaatgtcttggagtccagtctgaagaggaaatgtcggaggggtctcaagatactgaaaatgactcggaaagtgagaacacagacactttgagtagtgagaaggaagtatttgaagataagcaaagcgtacttcacaattctccaggaacagcaagtcactgtgatgctgaggcttgttcatgtgccaataaatattgtcagaccagcccatgtgaaaggaaggggaggtcatatggatcatataacactaatgaagatatggaacctgattggttaacttggcctgctgatatgctgcactgtactgaatgtgttgtttgcctagagaattttgaaaatggatgtttgctaatggggttgccttgtggtcatgtgtttcatcagaattgcattgtgatgtggttggctgggggccgacattgttgccctgtttgccggtggccttcttataaaaaaaagcagccatatgcacaacaccagcccttgtcaaatgatgtcccatcttaaccatgtgcaatttgtcctttataagctttgagtatcttacagcttgcctttttaatgttagtcacaatgtttttgtggtttgaagtttagtttaatgttagtgcagtgacgggaaatacacattatgctaatgttgatgacagaatttatttggttgccttgtgtgttaattgaatgcatacctaattgtaaaatttttttatttacaacattggaaattcagaagttaatgtttttttgtaagcacaaaagaagtattatagaaatttatcctagcaagactttacaagataggatcaaattctaatggaattgagccggtttcttatcctaaatgtttcctccctttttacaatctctgtccagcacctcttggttaaataatgtatgctgtgagacatgaaattaaaacagacctatgaaataaattattttaaaaccagaagatta

SEQ ID NO: 177155 - DNA, 3084 bp, Homo sapiens
  Payload ID: 14759
  Gene Symbol: RNF11
  Gene Name: ring finger protein 11
  Uniprot ID: Q9Y3C5
  ENST ID: ENST00000242719
  CDS Start-End: 487-951
gcagtgcccgagccggcctcgttctggctgccgccgtctcgctgaggcggagtaggatgaggcccgcggccgtggctccggcgtcggcgggggcagcagcagctgaggcagcagctgaggcagccgcgacggccgcgcccccccccgctgacctggattaggcccagcagctccgtggccgccgccgccccgcgggggggcggggtggggaagtgcttcgtctccccgcccccccccccccatcgctgcctcgcaggaggcgaacgccgcgaccccagcggagcccgcggcccagccttgatcccccaaccccgggggctggcatgagcggcccctcggcggcaccgtggggcggtggagtcgcctccgcctgatccccggcctgtcgcccgaccccacctcgccaaccgaggcggaccgcggagtgtgcgaacgaccccaccgctgctttctcctcccccagatcacgcaccccagctccggaagatggggaactgcctcaaatcccccacctcggatgacatctccctgcttcacgagtctcagtccgaccgggctagctttggcgaggggacggagccggatcaggagccgccgccgccatatcaggaacaagttccagttccagtctaccacccaacacctagccagactcggctagcaactcagctgactgaagaggaacaaattaggatagctcaaagaataggtcttatacaacatctgcctaaaggagtttatgaccctggaagagatggatcagaaaaaaagatccgggagtgtgtgatctgtatgatggactttgtttatggggacccaattcgatttctgccgtgcatgcacatctatcacctggactgtatagatgactggttgatgagatccttcacgtgcccctcctgcatggagccagttgatgcagcactgctttcatcctatgagactaattgagccagggtctcttatctgacttcaagtgaaccaccattttggtggttttgatcttttgtcactgagcccaaagagccagggattaggaattaagatcgtgcacaaaagtttccttaaaattcctggatggctgcagatgttgggggaaaaagtacgtgatattttagaaacttagtgggaaaagtaggatggtatttttatgtaaagccttgacccaatgtttaaaaatataattgtatttagatcttgttattgctccagtacataggaattgtgtaaagtgttaacagcagctgtatttgtttaaattgtgtgtattgaagattaggaaaaagatagtagttatttttcctaaatgaaataactttcttctcttccccttccccacccgaattcttttctgaagttgctggcatttgggtcaaggttttattaaaagctacattttataacactggcacacacaaaaaagtagttttaagcttgtttgcacagttctttttttccattggaaatggaattcattgccttaggtctttttaaatagtgtattattatcgttggggctggctctatgcttgaaaaccagtttatttataacctgttataagtgctatattctgtttgcagttaggaaatgcagaattcaaagtgatctcctagcttgtaagcaaactgagatgcactatcccttttctataaaaaataagttaatgtgtcaagaaaccaactctattaaggtggggtttaatattaccctttcctatgtgttttatctaattattttggttgttaatatggtgataatggaaagtcaagttaaattttaaatattaagaattctgatttattgagattgaattatgccaccacgtttatgtaaaaatgaaggtggcaccgtggtgagacctaatgagaaatagttactcagttgtaaaaattttgatttattctctttcttctgacctccttgcctcttgtcttgaaccatagcaaaaggatactgcatctctcattactgtagtgctgaggttattgaagttatacaaaacacatctcagtctctgtttcttggaaaggtatctattacatcctgctagctgactgacaaaactaagcagggagaataaagataattgtattttatgttttgcacacaaacgcagaatttgtataaccatatgacttcatagttgtgatctcaaaaaagaaggaatttctcctttgtttcttgcagttaatgtaagaatactttaaatctctaagcttctgaagtgttagaggtagagatggtctagtaaagatgtagtagtaatgttttatccatttagcatgtgtttattttttcatatgtactcaaaggtgacttattggttcacctcagtgatattacagctaaaaaaatcattcattagcaaaaggaaaagtggtctcaacctaacatcagaagtgtttcttattattattttatattgagttgaatattgaactctaacagttttctacatacaaaacacagtgtcatgaaggttattcataattgcattatagaggaatgtagtatgtcataagtactttgtaaagatttgacattcaactgtagtatccatatgttgcttaaatttccttatgagccccatgatggaaagacttaaagatgaatttgagaaaaattgaaagaaattagattatcaggttctgttaaattgttacatgtatcttgcttaaatttctgtttattaatttatatccacccaagtacataaagcaaatttggaggaaacaactgaagttgtgcaatattttctgataattgctttttttattcttgtgttttctacttaaacataatgtctgtgtcatcaagtattatagtcagacttttctttttttctagattgttaaaattggcaaatgaacttttttaaaaatcatcttccatgttgcagttagtctttcttttcattacaagtctttcacagaagtttggtggtaatattgaaagaactagcattgggcagaatgtgtcttttttaggcactttatattctcaacatacaatgttaagaaccatcaattttgacttttactaagttgttaaataaagttataatacagctgtgaagggctaaa

SEQ ID NO: 177156 - DNA, 5913 bp, Homo sapiens
  Payload ID: 14760
  Gene Symbol: RNF111
  Gene Name: ring finger protein 111
  Uniprot ID: Q6ZNA4
  ENST ID: ENST00000348370
  CDS Start-End: 434-3394
agagccctagtgtcgtgctctcctcggtaggggaggaattggttaggcggcggcggcggcgaagcggcggcggcggctgtaggggagcagcggcagtggcggcgacggcgaggaggtgttcggtttgcgcagcgtagaaacgcccgcagcttcagagaaggagttcttgtgggaccaaattaggcattctgaacccacgccggcttagctgggccgagtccaggcgctgccgcacgtacagttttggtggcggtgacagacactgttcttgactctaggggcctattaggccgacgtctgaggcgcagatcgctggctctcgacgcattactctttacgccttacatttctgtcttccttcctgggtcagtgattcccggaccctggaagagaagagggtggctaatgattaaggctttccttaaagtttcccatgtctcaatggactcctgaatataacgagctctacaccttaaaagtggatatgaagagtgagattccttctgatgcaccaaagacacaggagagtctgaaagggatccttttgcatccagagcccattggggcagccaaaagttttcctgcaggagttgagatgattaatagtaaagtggggaatgaattctctcacctgtgtgatgattctcaaaagcaagagaaggaaatgaatggtaaccagcaagaacaagaaaaaagtctcgttgtgaggaaaaaacgcaaaagccagcaggctggcccttcgtatgtgcagaattgtgttaaagaaaaccagggaatattaggactgaggcaacacctagggacaccaagtgatgaagataatgattcctcttttagtgattgtctttcttctccttcatctagtctgcattttggagattctgatactgtgacttcagatgaggataaagaagtctctgtaagacattcccagaccattttgaatgctaaaagtagaagccatagtgcacggtctcataagtggcctcggactgagacagaatctgtatcgggattgttaatgaaaagaccctgtttacatggcagttcgttacggagacttccatgcagaaagagatttgtaaaaaataattcctcacagaggacacagaaacaaaaagagaggatattaatgcagaggaagaaacgagaagtgttagctcgaagaaaatatgccttgctacctagttctagtagttccagtgagaatgacctcagcagtgaatcctcttctagctcatcaactgaaggagaagaagatttgtttgtttctgccagtgaaaaccaccaaaacaatccagctgttccctcaggaagtattgatgaagatgttgtggtgatagaagcttcctccactccccaggttactgccaatgaagaaattaatgttacctcaactgacagtgaagtggagattgtaacagttggagaaagctatcggtctcgttcaacccttggacactccagatctcattggagccagggttccagttctcatgcaagtcggccacaggagccacggaaccgcagtaggatttctactgttatacagcccttgaggcagaatgcagcagaagttgtggaccttaccgttgatgaagatgaacctactgtagtaccaaccacttctgcaagaatggaatcacaagctactagcgcttccattaacaattcaaatccatctacctctgagcaggcctctgatactgcttcagctgtcaccagtagccaaccttccacagtgtcagagacttcagctactcttacaagcaatagtaccactggcacttctataggagatgactcaaggagaactacatctagtgctgtaacggaaactggccctcctgcaatgccaaggttaccttcctgctgtccccagcactcaccatgtggagggtcgtcacagaaccaccatgcattaggacatcctcatacaagttgctttcagcagcatggtcaccattttcaacatcatcaccaccaccaccatactccccacccagctgtcccagtttctccttcctttagtgatcctgcttgccctgtggaaagacctccacaagtacaagcaccttgtggagcaaatagtagttctggtaccagctatcatgaacagcaggcattgccagtggacctgagcaacagtggtatcagaagtcatggaagtggcagttttcatggagcatctgcatttgacccctgctgccctgtttcttcctcccgagctgcaatctttggccatcaggccgctgctgctgccccaagtcaacctttatcatcaatagatggctatggatcaagcatggttgcgcagccccagccccagccccctccacagccctctctctcatcatgtcgacattacatgccacccccttatgcctctttgacaaggccacttcatcatcaagcttctgcctgcccgcattctcatggaaacccccctcctcagactcagcctccgcctcaagtggattatgttattcctcatcctgtacatgctttccattctcaaatatcttctcatgcaacatctcatcctgtggcacccccaccaccaactcacttagccagtacagctgcaccaatccctcagcatcttcctcctacacaccagccaatttcgcaccatattccagccacagcacctccagcacagagactgcatcctcatgaagtgatgcagaggatggaagttcaaaggaggaggatgatgcagcatccaacgcgggcacatgaacgccccccaccccatccacataggatgcacccaaactatggtcatgggcatcatattcatgtgcctcagactatgtcctcacatcctcgacaggctccagagaggtctgcctgggaactgggaattgaagctggagtgactgcagctacttatacacctggtgcattgcatcctcacttggcccattatcacgcacctcctcgacttcatcacttacaattaggagctcttcctttaatggttcctgatatggcaggctatcctcacatccgttacatttcatcaggattggatggaacatcattcagaggtcctttcaggggcaattttgaggaactgattcatttggaagaaagattaggcaatgtcaatcgtggagcatcccaggggacaattgaaagatgtacatatccacataaatacaaaaagaggaaactgcactgcaaacaagatggggaagaagggactgaggaagacacagaggaaaaatgtactatctgtttgtctattttagaggaaggtgaagatgtgagacgtcttccatgtatgcaccttttccaccaagtgtgtgttgaccaatggttgattaccaataagaagtgccccatatgcagagtggacattgaggcccagctgccaagtgaaagttgacaccatgtttcagaactcttgccctccctctcattcccatccttcctggtactgcagtcaaccaaagatggcatgacttacctgcgcagatttggaagcattgaacttagagtgctggctctgctatatggtacaactaatgctagacctacagtttatgtatacagttgattttgatgtatttataaaagcttttttttctagatttgacatttttctgtatcattttactgtatttttgcatggttccttgtattgcatttctttgcacatattatgggcttgtgaccctaaacttgcaggcaaggttagctgctttagtaagtagaattttgtggtctttttgttttttacatagtaccaagccttgataattatgaattttttatccattactaacctttaatttaatcaatcatgtactttagtttaatgtataaagatcctctagaaaatgataatattgtgtattaagacattccttaattaggacaaaatggctgctgtatatttactatatggagttctgagttaaataccatccttaatactgggaacagaatacaacccatataaatcagatgcaggtggtagtcacatcaccagagtgatcagtataaattttcttggtgtatccttttcctttcaacacagtgcagataagagttgaatattgatatcatacatttagactgctgttctgattgcatttatctttttcctacatcatttagaattttatttccctgattcagtttttgctgctgtgaaacagctctgatgaacactaaatattaatttcaattagctagattgtacatacttgcagatttaacaaaattttagggaaattgaaaaagacatgtagaatttgttgtcttctgctaagcacgaaaagttaagatatctgcttacattgattttgtagacacattaagtcaagatttggaatttaagtcactggcaggtatctgtgcattcatagaacttataaaggtcccaggatcacttttaagggatttttattagtttaaaggtaaataaagtcagctgaatctacatgtctcttgttttatttctctctaaacttgaaaacagtaaatctgcagatactgtgaggcacaaattatactgtcaacctactgttgctatggttatatactcccacttcatacattaccaagagtcgatcactgatttaaaatttttaatttctatagttaagatttactgcataatatagaatataaagttaagttaacatactaacatttctcctttggaggaagttttaatctacttcaggatgcatattattatcaagatactttcatatacaggatagcctaattttatttgtttaaatatgcttaatatgccccagattgcaaatgcatccagtcagtaatatcactgtctgtatgtggaggacatgttcccatggatcatatgtgaagatgtcaataagcttgcattaagccacctgctttgtaagtggattgattaataaataacttatatttctattgtctttgtgtttcataattagtttttataaaaacagtttacattaaacatcttggaattcaacaatagtgatctcactcaaattgacatttgcataatttgacatttatattcattcagttatgactacttgcccttttcttcatattagtaaatgttacactgtagtagttgtcaatgttaacaggcttcaacatagtatgtgtgcagatggacgatggatttaaagagcataccttatgattaaaccgaggttatagaaggtcaggggagagtgaaggagtcagtgacctatgtctgccatcttactggggaaaagagcaagtagcctgtcttcctttaagtaagtagcctgtaatggatgtactactttgccactggaataccccgggtctgtgccaagggactgaagaagtgtaagatggggagaactgtatgtcatggagtcctcttgacgttcccccagatacaagtaaagcacaggtggatttctctatttttgaatactacatcagatttagatgcacgactacctgttgacttgttttataattgctactgatttttttaatgtaggcaaagctttgttactttgaaatttatttaataaaagtatttgtgacataaacctgaattgttaatataggagcttattaagctactgccattagttatcgaaaaatgtgataagtaatgaagaaagtaaggaagaaaatgactttgaacattttgactttttgtgctttgttttggtgtcttccatatcctgctgcatcttatatgtcaaaatgaacatttcagtggtagctgtccaaatacataaaaactaaaattcttttgttagcaagtccttatttttattgttgttaacatgcaagtgataaactgataatttgaaacatttttcttactctggtgactttcttttagctgctagcacacttcagcatttgaaccataacagttgtgataaactgatcgtttgaaacgtt

SEQ ID NO: 177157 - DNA, 4803 bp, Homo sapiens
  Payload ID: 14760
  Gene Symbol: RNF111
  Gene Name: ring finger protein 111
  Uniprot ID: Q6ZNA4
  ENST ID: ENST00000557998
  CDS Start-End: 288-3272
tggaggggagaaagaggaagggctgcggccgcggaaggctggggtcggtgaccggccggttatctctggctcggtggtgacttagggtctgggtctccgcagacgatttgtgtttgggcaaggcattcgtctaccgacacacccacagcctacagtgagggagtgtgggtgaggggatttctctcccacttccgactctccctagagtctcaggatgggggctgaggaccgaggcgtgggagtgcgatttgacaatggagtgatgaaggctttccttaaagtttcccatgtctcaatggactcctgaatataacgagctctacaccttaaaagtggatatgaagagtgagattccttctgatgcaccaaagacacaggagagtctgaaagggatccttttgcatccagagcccattggggcagccaaaagttttcctgcaggagttgagatgattaatagtaaagtggggaatgaattctctcacctgtgtgatgattctcaaaagcaagagaaggaaatgaatggtaaccagcaagaacaagaaaaaagtctcgttgtgaggaaaaaacgcaaaagccagcaggctggcccttcgtatgtgcagaattgtgttaaagaaaaccagggaatattaggactgaggcaacacctagggacaccaagtgatgaagataatgattcctcttttagtgattgtctttcttctccttcatctagtctgcattttggagattctgatactgtgacttcagatgaggataaagaagtctctgtaagacattcccagaccattttgaatgctaaaagtagaagccatagtgcacggtctcataagtggcctcggactgagacagaatctgtatcgggattgttaatgaaaagaccctgtttacatggcagttcgttacggagacttccatgcagaaagagatttgtaaaaaataattcctcacagaggacacagaaacaaaaagagaggatattaatgcagaggaagaaacgagaagtgttagctcgaagaaaatatgccttgctacctagttctagtagttccagtgagaatgacctcagcagtgaatcctcttctagctcatcaactgaaggagaagaagatttgtttgtttctgccagtgaaaaccaccaaaacaatccagctgttccctcaggaagtattgatgaagatgttgtggtgatagaagcttcctccactccccaggttactgccaatgaagaaattaatgttacctcaactgacagtgaagtggagattgtaacagttggagaaagctatcggtctcgttcaacccttggacactccagatctcattggagccagggttccagttctcatgcaagtcggccacaggagccacggaaccgcagtaggatttctactgttatacagcccttgaggcagaatgcagcagaagttgtggaccttaccgttgatgaagatgaacctactgtagtaccaaccacttctgcaagaatggaatcacaagctactagcgcttccattaacaattcaaatccatctacctctgagcaggcctctgatactgcttcagctgtcaccagtagccaaccttccacagtgtcagagacttcagctactcttacaagcaatagtaccactggcacttctataggagatgactcaaggagaactacatctagtgctgtaacggaaactggccctcctgcaatgccaaggttaccttcctgctgtccccagcactcaccatgtggagggtcgtcacagaaccaccatgcattaggacatcctcatacaagttgctttcagcagcatggtcaccattttcaacatcatcaccaccaccaccatactccccacccagctgtcccagtttctccttcctttagtgatcctgcttgccctgtggaaagacctccacaagtacaagcaccttgtggagcaaatagtagttctggtaccagctatcatgaacagcaggcattgccagtggacctgagcaacagtggtatcagaagtcatggaagtggcagttttcatggagcatctgcatttgacccctgctgccctgtttcttcctcccgagctgcaatctttggccatcaggccgctgctgctgccccaagtcaacctttatcatcaatagatggctatggatcaagcatggttgcgcagccccagccccagccccctccacagccctctctctcatcatgtcgacattacatgccacccccttatgcctctttgacaaggccacttcatcatcaagcttctgcctgcccgcattctcatggaaacccccctcctcagactcagcctccgcctcaagtggattatgttattcctcatcctgtacatgctttccattctcaaatatcttctcatgcaacatctcatcctgtggcacccccaccaccaactcacttagccagtacagctgcaccaatccctcagcatcttcctcctacacaccagccaatttcgcaccatattccagccacagcacctccagcacagagactgcatcctcatgaagtgatgcagaggatggaagttcaaaggaggaggatgatgcagcatccaacgcgggcacatgaacgccccccaccccatccacataggatgcacccaaactatggtcatgggcatcatattcatgtgcctcagactatgtcctcacatcctcgacaggctccagagaggtctgcctgggaactgggaattgaagctggagtgactgcagctacttatacacctggtgcattgcatcctcacttggcccattatcacgcacctcctcgacttcatcacttacaattaggagctcttcctttaatggttcctgatatggcaggctatcctcacatccgttacatttcatcaggattggatggaacatcattcagaggtcctttcaggggcaattttgaggaactgattcatttggaagaaagattaggcaatgtcaatcgtggagcatcccaggggacaattgaaagatgtacatatccacataaatacaaaaaggtaacaactgattggttctcacagaggaaactgcactgcaaacaagatggggaagaagggactgaggaagacacagaggaaaaatgtactatctgtttgtctattttagaggaaggtgaagatgtgagacgtcttccatgtatgcaccttttccaccaagtgtgtgttgaccaatggttgattaccaataagaagtgccccatatgcagagtggacattgaggcccagctgccaagtgaaagttgacaccatgtttcagaactcttgccctccctctcattcccatccttcctggtactgcagtcaaccaaagatggcatgacttacctgcgcagatttggaagcattgaacttagagtgctggctctgctatatggtacaactaatgctagacctacagtttatgtatacagttgattttgatgtatttataaaagcttttttttctagatttgacatttttctgtatcattttactgtatttttgcatggttccttgtattgcatttctttgcacatattatgggcttgtgaccctaaacttgcaggcaaggttagctgctttagtaagtagaattttgtggtctttttgttttttacatagtaccaagccttgataattatgaattttttatccattactaacctttaatttaatcaatcatgtactttagtttaatgtataaagatcctctagaaaatgataatattgtgtattaagacattccttaattaggacaaaatggctgctgtatatttactatatggagttctgagttaaataccatccttaatactgggaacagaatacaacccatataaatcagatgcaggtggtagtcacatcaccagagtgatcagtataaattttcttggtgtatccttttcctttcaacacagtgcagataagagttgaatattgatatcatacatttagactgctgttctgattgcatttatctttttcctacatcatttagaattttatttccctgattcagtttttgctgctgtgaaacagctctgatgaacactaaatattaatttcaattagctagattgtacatacttgcagatttaacaaaattttagggaaattgaaaaagacatgtagaatttgttgtcttctgctaagcacgaaaagttaagatatctgcttacattgattttgtagacacattaagtcaagatttggaatttaagtcactggcaggtatctgtgcattcatagaacttataaaggtcccaggatcacttttaagggatttttattagtttaaaggtaaataaagtcagctgaatctacatgtctcttgttttatttctctctaaacttgaaaacagtaaatctgcagatactgtgaggcacaaattatactgtcaacctactgttgctatggttatatactcccacttcatacattaccaagagtcgatcactgatttaaaatttttaatttctatagttaagatttactgcataatatagaatataaagttaagttaacatactaacatttctcctttggaggaagttttaatctacttcaggatgcatattattatcaagatactttcatatacaggatagcctaattttatttgtttaaatatgcttaatatgccccagattgcaaatgcatccagtcagtaatatcactgtctgtatgtggaggacatgttcccatggatcatatgtgaagatgtcaataagcttgcattaagccacctgctttgtaagtggattgattaataaataacttatatttctattgtc

SEQ ID NO: 177158 - DNA, 900 bp, Homo sapiens
  Payload ID: 14760
  Gene Symbol: RNF111
  Gene Name: ring finger protein 111
  ENST ID: ENST00000559160
  CDS Start-End: 516-900
ctcggtaggggaggaattggttaggcggcggcggcggcgaagcggcggcggcggctgtaggggagcagcggcagtggcggcgacggcgaggaggtgttcggtttgcgcagcgtagaaacgcccgcagcttcagagaaggagttcttgtgggaccaaattaggcattctgaacccacgccggcttagctgggccgagtccaggcgctgccgcacgtacagttttggtggcggtgacagacactgttcttgactctaggggcctattaggccgacgtctgaggcgcagatcgctggctctcgacgcattactctttacgccttacatttctgtcttccttcctgggtcagtgattcccggaccctggaagagaagagggtggctaatgattaagatgcttgggatggaagaagtttgagtgacctatcctgtgtttatcctccttgccgtagctgagttgatctttttgaaaccctcttcccagactcttggatttatttattttattccagtgtgaatgcatgttttttccctcatagatggcagttctggattagcagttttaaggctttccttaaagtttcccatgtctcaatggactcctgaatataacgagctctacaccttaaaagtggatatgaagagtgagattccttctgatgcaccaaagacacaggagagtctgaaagggatccttttgcatccagagcccattggggcagccaaaagttttcctgcaggagttgagatgattaatagtaaagtggggaatgaattctctcacctgtgtgatgattctcaaaagcaagagaaggaaatgaatggtaaccagcaagaacaagaaaaaagtctcgttgtgaggaaaaaacgcaaaagccagcaggctggcccttcgtatgtgc

SEQ ID NO: 177159 - DNA, 541 bp, Homo sapiens
  Payload ID: 14760
  Gene Symbol: RNF111
  Gene Name: ring finger protein 111
  ENST ID: ENST00000559757
  CDS Start-End: 148-541
agcagatgctggagctgctggtgctggagcagtttctgagcgcgctgccagccgacacgcaggcctgggtgtgcagccgtcagccgctaagctgggaggaggcggtggccctgctggaagagttctgggctttccttaaagtttcccatgtctcaatggactcctgaatataacgagctctacaccttaaaagtggatatgaagagtgagattccttctgatgcaccaaagacacaggagagtctgaaagggatccttttgcatccagagcccattggggcagccaaaagttttcctgcaggagttgagatgattaatagtaaagtggggaatgaattctctcacctgtgtgatgattctcaaaagcaagagaaggaaatgaatggtaaccagcaagaacaagaaaaaagtctcgttgtgaggaaaaaacgcaaaagccagcaggctggcccttcgtatgtgcagaattgtgttaaagaaaaccagggaatattaggactgaggcaacacctagggacaccaagtgatgaagataatgatt

SEQ ID NO: 177160 - DNA, 4536 bp, Homo sapiens
  Payload ID: 14760
  Gene Symbol: RNF111
  Gene Name: ring finger protein 111
  Uniprot ID: Q6ZNA4
  ENST ID: ENST00000561186
  CDS Start-End: 1-3012
atgtctcaatggactcctgaatataacgagctctacaccttaaaagtggatatgaagagtgagattccttctgatgcaccaaagacacaggagagtctgaaagggatccttttgcatccagagcccattggggcagccaaaagttttcctgcaggagttgagatgattaatagtaaagtggggaatgaattctctcacctgtgtgatgattctcaaaagcaagagaaggaaatgaatggtaaccagcaagaacaagaaaaaagtctcgttgtgaggaaaaaacgcaaaagccagcaggctggcccttcgtatgtgcagaattgtgttaaagaaaaccagggaatattaggactgaggcaacacctagggacaccaagtgatgaagataatgattcctcttttagtgattgtctttcttctccttcatctagtctgcattttggagattctgatactgtgacttcagatgaggataaagaagtctctgtaagacattcccagaccattttgaatgctaaaagtagaagccatagtgcacggtctcataagtggcctcggactgagacagaatctgtatcgggattgttaatgaaaagaccctgtttacatggcagttcgttacggagacttccatgcagaaagagatttgtaaaaaataattcctcacagaggacacagaaacaaaaagagaggatattaatgcagaggaagaaacgagaagtgttagctcgaagaaaatatgccttgctacctagttctagtagttccagtgagaatgacctcagcagtgaatcctcttctagctcatcaactgaaggagaagaagatttgtttgtttctgccagtgaaaaccaccaaaacaatccagctgttccctcaggaagtattgatgaagatgttgtggtgatagaagcttcctccactccccaggttactgccaatgaagaaattaatgttacctcaactgacagtgaagtggagattgtaacagttggagaaagctatcggtctcgttcaacccttggacactccagatctcattggagccagggttccagttctcatgcaagtcggccacaggagccacggaaccgcagtaggatttctactgttatacagcccttgaggcagaatgcagcagaagttgtggaccttaccgttgatgaagatgaacctactgtagtaccaaccacttctgcaagaatggaatcacaagctactagcgcttccattaacaattcaaatccatctacctctgagcaggcctctgatactgcttcagctgtcaccagtagccaaccttccacagtgtcagagacttcagctactcttacaagcaatagtaccactggcacttctataggagatgactcaaggagaactacatctagtgctgtaacggaaactggccctcctgcaatgccaaggttaccttcctgctgtccccagcactcaccatgtggagggtcgtcacagaaccaccatgcattaggacatcctcatacaagttgctttcagcagcatggtcaccattttcaacatcatcaccaccaccaccatactccccacccagctgtcccagtttctccttcctttagtgatcctgcttgccctgtggaaagacctccacaagtacaagcaccttgtggagcaaatagtagttctggtaccagctatcatgaacagcaggcattgccagtggacctgagcaacagtggtatcagaagtcatggaagtggcagttttcatggagcatctgcatttgacccctgctgccctgtttcttcctcccgagctgcaatctttggccatcaggccgctgctgctgccccaagtcaacctttatcatcaatagatggctatggatcaagcatggttgcgcagccccagccccagccccctccacagccctctctctcatcatgtcgacattacatgccacccccttatgcctctttgacaaggccacttcatcatcaagcttctgcctgcccgcattctcatggaaacccccctcctcagactcagcctccgcctcaagtggattatgttattcctcatcctgtacatgctttccattctcaaatatcttctcatgcaacatctcatcctgtggcacccccaccaccaactcacttagccagtacagctgcaccaatccctcagcatcttcctcctacacaccagccaatttcgcaccatattccagccacagcacctccagcacagagactgcatcctcatgaagtgatgcagaggatggaagttcaaaggaggaggatgatgcagcatccaactggtctttttgtgttctgtgtttccaggcgggcacatgaacgccccccaccccatccacataggatgcacccaaactatggtcatgggcatcatattcatgtgcctcagactatgtcctcacatcctcgacaggctccagagaggtctgcctgggaactgggaattgaagctggagtgactgcagctacttatacacctggtgcattgcatcctcacttggcccattatcacgcacctcctcgacttcatcacttacaattaggagctcttcctttaatggttcctgatatggcaggctatcctcacatccgttacatttcatcaggattggatggaacatcattcagaggtcctttcaggggcaattttgaggaactgattcatttggaagaaagattaggcaatgtcaatcgtggagcatcccaggggacaattgaaagatgtacatatccacataaatacaaaaaggtaacaactgattggttctcacagaggaaactgcactgcaaacaagatggggaagaagggactgaggaagacacagaggaaaaatgtactatctgtttgtctattttagaggaaggtgaagatgtgagacgtcttccatgtatgcaccttttccaccaagtgtgtgttgaccaatggttgattaccaataagaagtgccccatatgcagagtggacattgaggcccagctgccaagtgaaagttgacaccatgtttcagaactcttgccctccctctcattcccatccttcctggtactgcagtcaaccaaagatggcatgacttacctgcgcagatttggaagcattgaacttagagtgctggctctgctatatggtacaactaatgctagacctacagtttatgtatacagttgattttgatgtatttataaaagcttttttttctagatttgacatttttctgtatcattttactgtatttttgcatggttccttgtattgcatttctttgcacatattatgggcttgtgaccctaaacttgcaggcaaggttagctgctttagtaagtagaattttgtggtctttttgttttttacatagtaccaagccttgataattatgaattttttatccattactaacctttaatttaatcaatcatgtactttagtttaatgtataaagatcctctagaaaatgataatattgtgtattaagacattccttaattaggacaaaatggctgctgtatatttactatatggagttctgagttaaataccatccttaatactgggaacagaatacaacccatataaatcagatgcaggtggtagtcacatcaccagagtgatcagtataaattttcttggtgtatccttttcctttcaacacagtgcagataagagttgaatattgatatcatacatttagactgctgttctgattgcatttatctttttcctacatcatttagaattttatttccctgattcagtttttgctgctgtgaaacagctctgatgaacactaaatattaatttcaattagctagattgtacatacttgcagatttaacaaaattttagggaaattgaaaaagacatgtagaatttgttgtcttctgctaagcacgaaaagttaagatatctgcttacattgattttgtagacacattaagtcaagatttggaatttaagtcactggcaggtatctgtgcattcatagaacttataaaggtcccaggatcacttttaagggatttttattagtttaaaggtaaataaagtcagctgaatctacatgtctcttgttttatttctctctaaacttgaaaacagtaaatctgcagatactgtgaggcacaaattatactgtcaacctactgttgctatggttatatactcccacttcatacattaccaagagtcgatcactgatttaaaatttttaatttctatagttaagatttactgcataatatagaatataaagttaagttaacatactaacatttctcctttggaggaagttttaatctacttcaggatgcatattattatcaagatactttcatatacaggatagcctaattttatttgtttaaatatgcttaatatgccccagattgcaaatgcatccagtcagtaatatcactgtctgtatgtggaggacatgttcccatggatcatatgtgaagatgtcaataagcttgcattaagccacctgctttgtaagtggattgattaataaataacttatatttc

SEQ ID NO: 177161 - DNA, 699 bp, Homo sapiens
  Payload ID: 14760
  Gene Symbol: RNF111
  Gene Name: ring finger protein 111
  ENST ID: ENST00000559592
  CDS Start-End: 1-573
agctcatcaactgaaggagaagaagatttgtttgtttctgccagtgaaaaccaccaaaacaatccagctgttccctcaggaagtattgatgaagatgttgtggtgatagaagcttcctccactccccaggttactgccaatgaagaaattaatgttacctcaactgacagtgaagtggagattgtaacagttggagaaagctatcggtctcgttcaacccttggacactccagatctcattggagccagggttccagttctcatgcaagtcggccacaggagccacggaaccgcagtaggatttctactgttatacagcccttgaggcagaatgcagcagaagttgtggaccttaccgttgatgaagatgaacctactgtagtaccaaccacttctgcaagaatggaatcacaagctactagcgcttccattaacaattcaaatccatctacctctgagcaggcctctgatactgcttcagctgtcaccagtagccaaccttccacagtgtcagagacttcagctactcttacaagcaatagtaccactggcacttctataggaggtatgtaaaaaagtgggggaggggagactttttgtcattactttcgttaggaaaagtattattgtttttaagtctaagattttagctatgttaataagcgggtattcttacattataataaacttcatatgtta

SEQ ID NO: 177162 - DNA, 5278 bp, Homo sapiens
  Payload ID: 14760
  Gene Symbol: RNF111
  Gene Name: ring finger protein 111
  Uniprot ID: Q6ZNA4
  ENST ID: ENST00000559209
  CDS Start-End: 137-3124
ctgaggcgcagatcgctggctctcgacgcattactctttacgccttacatttctgtcttccttcctgggtcagtgattcccggaccctggaagagaagagggtggctaatgattaaggctttccttaaagtttcccatgtctcaatggactcctgaatataacgagctctacaccttaaaagtggatatgaagagtgagattccttctgatgcaccaaagacacaggagagtctgaaagggatccttttgcatccagagcccattggggcagccaaaagttttcctgcaggagttgagatgattaatagtaaagtggggaatgaattctctcacctgtgtgatgattctcaaaagcaagagaaggaaatgaatggtaaccagcaagaacaagaaaaaagtctcgttgtgaggaaaaaacgcaaaagccagcaggctggcccttcgtatgtgcagaattgtgttaaagaaaaccagggaatattaggactgaggcaacacctagggacaccaagtgatgaagataatgattcctcttttagtgattgtctttcttctccttcatctagtctgcattttggagattctgatactgtgacttcagatgaggataaagaagtctctgtaagacattcccagaccattttgaatgctaaaagtagaagccatagtgcacggtctcataagtggcctcggactgagacagaatctgtatcgggattgttaatgaaaagaccctgtttacatggcagttcgttacggagacttccatgcagaaagagatttgtaaaaaataattcctcacagaggacacagaaacaaaaagagaggatattaatgcagaggaagaaacgagaagtgttagctcgaagaaaatatgccttgctacctagttctagtagttccagtgagaatgacctcagcagtgaatcctcttctagctcatcaactgaaggagaagaagatttgtttgtttctgccagtgaaaaccaccaaaacaatccagctgttccctcaggaagtattgatgaagatgttgtggtgatagaagcttcctccactccccaggttactgccaatgaagaaattaatgttacctcaactgacagtgaagtggagattgtaacagttggagaaagctatcggtctcgttcaacccttggacactccagatctcattggagccagggttccagttctcatgcaagtcggccacaggagccacggaaccgcagtaggatttctactgttatacagcccttgaggcagaatgcagcagaagttgtggaccttaccgttgatgaagatgaacctactgtagtaccaaccacttctgcaagaatggaatcacaagctactagcgcttccattaacaattcaaatccatctacctctgagcaggcctctgatactgcttcagctgtcaccagtagccaaccttccacagtgtcagagacttcagctactcttacaagcaatagtaccactggcacttctataggagatgactcaaggagaactacatctagtgctgtaacggaaactggccctcctgcaatgccaaggttaccttcctgctgtccccagcactcaccatgtggagggtcgtcacagaaccaccatgcattaggacatcctcatacaagttgctttcagcagcatggtcaccattttcaacatcatcaccaccaccaccatactccccacccagctgtcccagtttctccttcctttagtgatcctgcttgccctgtggaaagacctccacaagtacaagcaccttgtggagcaaatagtagttctggtaccagctatcatgaacagcaggcattgccagtggacctgagcaacagtggtatcagaagtcatggaagtggcagttttcatggagcatctgcatttgacccctgctgccctgtttcttcctcccgagctgcaatctttggccatcaggccgctgctgctgccccaagtcaacctttatcatcaatagatggctatggatcaagcatggttgcgcagccccagccccagccccctccacagccctctctctcatcatgtcgacattacatgccacccccttatgcctctttgacaaggccacttcatcatcaagcttctgcctgcccgcattctcatggaaacccccctcctcagactcagcctccgcctcaagtggattatgttattcctcatcctgtacatgctttccattctcaaatatcttctcatgcaacatctcatcctgtggcacccccaccaccaactcacttagccagtacagctgcaccaatccctcagcatcttcctcctacacaccagccaatttcgcaccatattccagccacagcacctccagcacagagactgcatcctcatgaagtgatgcagaggatggaagttcaaaggaggaggatgatgcagcatccaactggtctttttgtgttctgtgtttccaggcgggcacatgaacgccccccaccccatccacataggatgcacccaaactatggtcatgggcatcatattcatgtgcctcagactatgtcctcacatcctcgacaggctccagagaggtctgcctgggaactgggaattgaagctggagtgactgcagctacttatacacctggtgcattgcatcctcacttggcccattatcacgcacctcctcgacttcatcacttacaattaggagctcttcctttaatggttcctgatatggcaggctatcctcacatccgttacatttcatcaggattggatggaacatcattcagaggtcctttcaggggcaattttgaggaactgattcatttggaagaaagattaggcaatgtcaatcgtggagcatcccaggggacaattgaaagatgtacatatccacataaatacaaaaagaggaaactgcactgcaaacaagatggggaagaagggactgaggaagacacagaggaaaaatgtactatctgtttgtctattttagaggaaggtgaagatgtgagacgtcttccatgtatgcaccttttccaccaagtgtgtgttgaccaatggttgattaccaataagaagtgccccatatgcagagtggacattgaggcccagctgccaagtgaaagttgacaccatgtttcagaactcttgccctccctctcattcccatccttcctggtactgcagtcaaccaaagatggcatgacttacctgcgcagatttggaagcattgaacttagagtgctggctctgctatatggtacaactaatgctagacctacagtttatgtatacagttgattttgatgtatttataaaagcttttttttctagatttgacatttttctgtatcattttactgtatttttgcatggttccttgtattgcatttctttgcacatattatgggcttgtgaccctaaacttgcaggcaaggttagctgctttagtaagtagaattttgtggtctttttgttttttacatagtaccaagccttgataattatgaattttttatccattactaacctttaatttaatcaatcatgtactttagtttaatgtataaagatcctctagaaaatgataatattgtgtattaagacattccttaattaggacaaaatggctgctgtatatttactatatggagttctgagttaaataccatccttaatactgggaacagaatacaacccatataaatcagatgcaggtggtagtcacatcaccagagtgatcagtataaattttcttggtgtatccttttcctttcaacacagtgcagataagagttgaatattgatatcatacatttagactgctgttctgattgcatttatctttttcctacatcatttagaattttatttccctgattcagtttttgctgctgtgaaacagctctgatgaacactaaatattaatttcaattagctagattgtacatacttgcagatttaacaaaattttagggaaattgaaaaagacatgtagaatttgttgtcttctgctaagcacgaaaagttaagatatctgcttacattgattttgtagacacattaagtcaagatttggaatttaagtcactggcaggtatctgtgcattcatagaacttataaaggtcccaggatcacttttaagggatttttattagtttaaaggtaaataaagtcagctgaatctacatgtctcttgttttatttctctctaaacttgaaaacagtaaatctgcagatactgtgaggcacaaattatactgtcaacctactgttgctatggttatatactcccacttcatacattaccaagagtcgatcactgatttaaaatttttaatttctatagttaagatttactgcataatatagaatataaagttaagttaacatactaacatttctcctttggaggaagttttaatctacttcaggatgcatattattatcaagatactttcatatacaggatagcctaattttatttgtttaaatatgcttaatatgccccagattgcaaatgcatccagtcagtaatatcactgtctgtatgtggaggacatgttcccatggatcatatgtgaagatgtcaataagcttgcattaagccacctgctttgtaagtggattgattaataaataacttatatttctattgtctttgtgtttcataattagtttttataaaaacagtttacattaaacatcttggaattcaacaatagtgatctcactcaaattgacatttgcataatttgacatttatattcattcagttatgactacttgcccttttcttcatattagtaaatgttacactgtagtagttgtcaatgttaacaggcttcaacatagtatgtgtgcagatggacgatggatttaaagagcataccttatgattaaaccgaggttatagaaggtcaggggagagtgaaggagtcagtgacctatgtctgccatcttactggggaaaagagcaagtagcctgtcttcctttaagtaagtagcctgtaatggatgtactactttgccactggaataccccgggtctgtgccaagggactgaagaagtgtaagatggggagaactgtatgtcatggagtcctcttgacgttcccccagatacaagtaaagcacaggtggatttctctatttttgaatactacatcagatttagatgcacgactacctgttgacttgttttataattgctactgatttttttaatgtaggcaaagctttgttactttgaaatttatttaataaaagtatttgtgacataa

SEQ ID NO: 177163 - DNA, 3212 bp, Homo sapiens
  Payload ID: 14761
  Gene Symbol: RNF112
  Gene Name: ring finger protein 112
  Uniprot ID: Q9ULX5
  ENST ID: ENST00000461366
  CDS Start-End: 216-2111
gggtgagtccagcagcagcctcctctttcctgactgtcacatttcttttccagctctgaccgggagtcagctcctcggggataccatcccccgacctcaccttctacctaccgcagcctgctagcctttccgggagaaaaggcatccttacctctggttgaaggtctcggggcctccccctctgcatccggaccctctccccatcccagcctcccatgccaaggcccgccttgtcagtcacttccttttgtcatcggcttggcaaacgggagagaaaacagagcttcatgggaaacagcggcaacagttggtcccatacacctttccccaagttggagctaggcctggggccccagcccatggcgccccgggagctccctacctgctccatctgcctggagaggttgcgcgaccccatctcgctggactgtggccacgacttctgcatacggtgcttcagcacacaccgtctcccgggctgtgagccgccctgctgtcctgagtgccggaagatatgcaagcagaagaggggcctccggagcctgggcgagaagatgaagctcctgccgcagcggccgctgccccctgcactgcaggagacgtgtcctgtgagggcggagccgctgctgctggttcgcatcaatgcctctgggggcctcatccttaggatgggggccatcaaccgctgcctgaagcaccctctggccagggacaccccagtctgcctcctcgctgtcctgggggagcagcactcagggaagtccttcctcctcaaccatttgcttcagggcttgccgggcctggagtctggtgagggcggccggccaagaggaggagaggcatccctgcagggctgcaggtggggcgccaatggcctcgccaggggcatatggatgtggagccaccccttcttgctggggaaagaagggaagaaggtggcggtgttcctggtggacacaggggatgccatgagccctgagctgagcagggaaacaaggatcaagctctgtgctctcaccacgatgctgagctcctaccagatcctcagcacctcccaggagctgaaggatacagacctggactatctggagatgtttgtccacgtggccgaggtgatgggcaagcattatgggatggtgccaatccagcatctggacctcttagttcgtgactcatcccaccccaacaaggcagggcaggggcatgtaggcaacatcttccagagattgtctggcagataccccaaggtgcaggagctgctgcaagggaagcgagcccgttgctgcctcttgcctgccccagggaggcggcggatgaaccaaggccatgcaagccctggtgacacagatgatgacttccgccaccttctgggggcctacgtctcagatgtgctgagtgcggccccccagcacgctaagagccgctgccaggggtactggaacgaggggcgcgccgtggccaggggggacagacgcctactcacggggcagcagctagctcaggaaatcaagaacctctcaggatggatggggaggacagggcccggtttcacctctccggatgagatggctgctcagctgcacgacctgaggaaggtggaagctgccaagagggagttcgaggagtatgtgaggcagcaggacgtagccaccaagcgcatattctctgcgctgcgggtcctgccagacaccatgcggaacctcctctccacccagaaagatgccattctggcccgccatggtgtggccttactctgcaaggggagagatcagaccttggaggcactggaagctgagctgcaggccacggccaaggccttcatggactcctacacgatgcgcttctgtggccacctagctgctgtggggggtgctgtgggggccgggctcatgggcctggcagggggcgtggtgggtgctggcatggcagcagctgcactggctgcagaggctgggatggtggctgctggagctgccgtgggggccacaggggccgctgtggttgggggtggcgtgggtgctgggttggctgccacagtgggctgcatggagaaggaggaggatgagaggcttctggaaggggaccgagagccccttctccaggaagagtaacagccccaggaggtattgaaggacaggagagatgtcaggtggggatgaagaagaggggcaggtcgggggagggtgatgccagggattccaaggcaccgccatgtactgcactgccctggtcgaatgctcggtgtctgggtggcagctgagctgggactcaaggtggctcttggaacctgggaggcagcatctgggggcagtggatagaacacccggcctgtttctggttgcagatggttgccgatctgcccttgtcacagataggctacatcccagggtttctggctgcaagtgagactccaccctccccacctggctcatttccccgatgaccctggattgtaggaaagttaagcaggcaccatcctggaagtctacccctaggtggtcgagagacctgttctttcacagatgtgagaagccccaggatgattgaccatggtgttcaggagcggggagcactgatgaggtgctggggatgacaggaaggaaggaacactgggcagaaccagagagatgggacatggtagactgtggcccagaccccagagcagagaaacttgttcccatgacccttcccaaatctgctccagcaggactaaggtggctttcccactcctggcccacagccccagagagcctgtctgtgcatcctgaaccactctttgctgggcctccgcaagggcctctcttgggtctgtgtcctttttcaagcctgtttagatgggggagtgcccatgccctctgtgaagtgcccaaatgcgaaagaataacaccttttcttgcattctgagctaagccagacagcctttatactagattctatcaaaatcttgcaaaggaaaacaaaatgaacaacttctacccttaaacacatcctttctcccctgggcttgtaagaagatgcagcttgatgcagctcctcaaacaccaggccccctgggaactgggggtgcgggagttctccctctgggggacagaaaatctgactactaggaagacttctaggctatgaaactgacttctaggctatgaaacttacagggtatgggtgggcacattatcctttattttatgaaaaataaaatgtgtgtatgtgaa

SEQ ID NO: 177164 - DNA, 540 bp, Homo sapiens
  Payload ID: 14761
  Gene Symbol: RNF112
  Gene Name: ring finger protein 112
  ENST ID: ENST00000575165
  CDS Start-End: 171-540
gattctgagccgggctccatccctccctcctcggagccctgctacccgcagccgtgtctcctccccctgggcctgctagcctttccgggagaaaaggcatccttacctctggttgaaggtctcggggcctccccctctgcatccggaccctctccccatcccagcctcccatgccaaggcccgccttgtcagtcacttccttttgtcatcggcttggcaaacgggagagaaaacagagcttcatgggaaacagcggcaacagttggtcccatacacctttccccaagttggagctaggcctggggccccagcccatggcgccccgggagctccctacctgctccatctgcctggagaggttgcgcgaccccatctcgctggactgtggccacgacttctgcatacggtgcttcagcacacaccgtctcccgggctgtgagccgccctgctgtcctgagtgccggaagatatgcaagcagaagaggggcctccggagcctgggcgagaagatgaagctcctgccgcagcggccgctgcccc

SEQ ID NO: 177165 - DNA, 1353 bp, Homo sapiens
  Payload ID: 14762
  Gene Symbol: RNF113A
  Gene Name: ring finger protein 113A
  Uniprot ID: O15541
  ENST ID: ENST00000371442
  CDS Start-End: 215-1246
cggccgcccgcgagcggggcggtgccacgtacggctccggaagaagcgacggaatctgctagggcacaagagagacgggcgctcgggctctcgcagtcctcttccgtcagtgtcttttgcttcgactcccggcggagcgcgcaacgtggagtgacgtgcaggggccaagtgcaacccaggcagccacggctgtttcggagctcaggactctaaaatggcagagcagctttctccaggaaaggcggtggatcaggtgtgcaccttccttttcaaaaagcctgggcggaaaggggctgctggacgcagaaagcgcccggcctgcgacccagagcccggagaaagcggcagcagtagcgacgaaggctgcactgtggttcgaccggaaaagaagcgggtgacccacaatccaatgatacagaagacccgtgacagtggtaaacagaaggcggcttacggcgacttgagcagcgaagaggaagaggaaaatgagcccgagagtctcggcgtggtttataaatccacccgttcggcgaaacccgtgggaccagaggatatgggagcgacagctgtctatgagctggacacagagaaagagcgcgatgcacaagccatctttgagcgcagccagaagatccaggaggagctgaggggcaaggaggatgacaagatctatcggggaatcaacaattatcagaaatacatgaagcccaaggatacgtctatgggcaatgcctcttccgggatggtgaggaagggccccatccgagcgcccgagcatctacgtgccaccgtgcgctgggattaccagcccgacatctgtaaggactacaaagagactggcttctgcggcttcggagacagctgcaaattcctccatgaccgttcagattacaagcatgggtggcagatcgaacgtgagcttgatgagggtcgctatggtgtctatgaggatgaaaactatgaagtgggaagcgatgatgaggaaataccattcaagtgtttcatctgtcgccagagcttccaaaacccagttgtcaccaagtgcaggcattatttctgcgagagctgtgcactgcagcatttccgcaccaccccgcgctgctatgtctgtgaccagcagaccaatggcgtcttcaatccagcgaaagaattgattgctaaactagagaagcatcgagctacaggagagggtggtgcttccgacttgccagaagaccccgatgaggatgcaattcccattacttaggtttcccataattcttaaatttaaaaaataaacgttttgttcttttggaagtcttacttcgtgtccttcctttgtagagaaagtgacagagcaggcgggtggtgaag

SEQ ID NO: 177166 - DNA, 1376 bp, Homo sapiens
  Payload ID: 14763
  Gene Symbol: RNF113B
  Gene Name: ring finger protein 113B
  Uniprot ID: Q8IZP6
  ENST ID: ENST00000267291
  CDS Start-End: 30-998
cacggccgttgggagcctgagactcaaacatggcagcgccaccttctccaggaaggacggccgaccaagcagaccaggtatgcaccttcctcttcaaaaagcctggacggaaaggggctgcaggcctcagaaagcgcccggcctgcgaccccgagcacggagagagcagcagcagcggggacgagggcgacacagtggctcagcccccgcgggtggcaccgaggccccggggcctccacagctggcagaaggcggctcacggcgacaggaggggcgaggaggcggcgcctgagagcctcgacgtggtgtacaggtccacccgctcggcgaagcctgtggggccagaggacatgggggccaccgctgacttcgagcaggacaccgagaaggagcaccatacgccgaccatcctcaagtgcagccagcgggtccaggaggcactgcggggtcgggagcacgaccacatctaccggggaatccacagctacctgaggtacctgaagcccaaggacacgtccatgggcaactcctcctcggggatggcgaggaagggccccatacgtgcgccagggcatctgcgcgccactgtgcgctgggattaccagcctgacatctgcaaggactacaaggagactggcttctgtggcttcggggacagctgcaaattcctccacgaccgttccgattacaagctcgggtgggagattgaacgggagcttgaagagggtcgctactgtatctgcgaggacgaaaaccatgaagtgggaagcgaggaagaggaaataccattcaggtgtttcatatgtcgccaggccttccaaaacccagtcgtcaccaagtgcaggcattatttctgcgagagctgcgcgctggagcacttccgggccaccccgcgctgctacatctgtgaccagccaaccggcggcatctttaaccccgccaaagaactgatggcgaaactgcaaaagcttcaggctgcagaaggaaaaaagagataagaaagactcaagtctgtatgtacactggggagaagcagcctgttgagtaagatgagagagatgacagtcttcctgcaatcccatgcctgagtatgtaaccaaaagaattgaaatccggatctcaaagaggtatgtgcactcccatgttcactgcagaattatttgcaaaagccaagaggtgtaaacaacccaagtgtccatggatggatgaatggacaaacaaaatgcgatacacacacacaatggaatgctattaagccttaacgggaaggaaatccttttaaagatttaaactgatccttttaaggatcacatgctacaactagaatgaaccttgaagacgacactgctaagtgaaataaactagtcacaaaatga

SEQ ID NO: 177167 - DNA, 2503 bp, Homo sapiens
  Payload ID: 14764
  Gene Symbol: RNF114
  Gene Name: ring finger protein 114
  Uniprot ID: Q9Y508
  ENST ID: ENST00000244061
  CDS Start-End: 66-752
gcgagccccgccccctcggcctcctcctcatcggccgccgttgcgcggcgcagagcggcagcaagatggcggcgcaacagcgggactgcgggggtgctgcgcagctggcggggccggcggcggaggctgaccccctaggacgcttcacgtgtcccgtgtgcttagaggtgtacgagaagccggtacaggtgccctgcggacacgtcttttgctctgcatgcctgcaggaatgtctgaagccgaagaagcctgtctgtggggtgtgtcgcagcgctctggcacctggcgtccgagccgtggagctcgagcggcagatcgagagcacagagacttcttgccatggctgccgtaagaatttcttcctgtccaagatccggtcccacgtggctacttgttccaaataccagaattacatcatggaaggtgtgaaggccaccattaaggatgcatctcttcagccaaggaatgttccaaaccgttacacctttccttgtccttactgtcctgagaagaactttgatcaggaaggacttgtggaacactgcaaattattccatagcacggataccaaatctgtggtttgtccgatatgtgcctcgatgccctggggagaccccaactaccgcagcgccaacttcagagagcacatccagcgccggcaccggttttcttatgacacttttgtggattatgatgttgatgaagaggacatgatgaatcaggtgttgcagcgctccatcatcgaccagtgagcagagtccgtgcttgctatctgtctcatgttacagagcttccattacatattaaacgtgaaatctatgactcctgtaccttacctgttcaacagacctgaaaatgagccatggcattgggacagggtcacttctgacaggggaagtgggtccccaggtcagcccttctcttccctttgggctcttgccaaagctgtcttcccctactgttaaccttgtttgtcacacggtcgagttcgtattggttctcggctacttcctggagcttctgccgcctcctgtggaagataatctagcttctccacctcttgtttcacactcattcctcccatccagtgtttgtctctcgggtccttcaagccagccaggaccttttctgggtcatgaatagcacaatgaagcaagtgtctcctttccttgtccccaaggtgtgcagactttggcagccgtgcacctgaccagagctgaagctcccgctgggctgtggggttgccagaagctggggttgccatcccggggtacatgtcaccagtcctcttggggttttgtaccatctgatgctggaagttttgattagtgatattttctactactacatatttagagttcactggttcagtcttaaatgcctgcatggtgcctttttaggataaggtataaccatacatttttggtggaagtgtttctgggttagggaagttaaagtctgtttatccgtaagtggggaggagggtcagctaagagaagtgggagggccagagctttttggttctgatttacaaattaatgaagtagtttcaaacaacgcggtcatgtttacctctccatttgggagcctgcctacattcttgttctagaagcacaaaaaatcctcagatgaattagaagaaagaggtttggggactcagcggatactagttcttttaccttctgcttggtaacttagattaaactgagcattgtttttctgtcacaaatgttttccttatgacactggtttcgacatgtaaaatgtgtttgaaaacctgctttgtagatgcagagagaagctataggaaacccagtaccacccctggtctgttctgacgagacatcgttcataaggcacagcacatcgcaagatgaacagttgttaataaaagctgttgctggaaacttgctttaggaacagctcaagaaccttggagttcatatttcacaaatattaataaatataagtccaagagctgtcagcctaatctgtaggagcagaacctctgattgaccaaaaggcatatgggtttaggttggttttttgatgtcatatgtctctgatggggctgcaagtgctacctcgcgcttgtacactgctgctgtggggctccgcgcctgccggtgaagagctgcagatgccgagaagccagcaaacacagggcccactggaaaaaaatagttttttcattagtatttctcgggaggacccaaaagttaaggtcagcttgttcactgtaatttctggaagaagttcactcagaccttcctgaattcagatcatctcagaagtctggagggaaatctggcgaaaccttcgtttgagggactgatgtgagtgtatgtccacctcactggtggcaccgagaaacttacttccttgtattaagtgcacttcttgtatttctaataagatgactttccagaaagtgagatttgttatgttctggcttttaaaaggtaaaatataaataaatttcataacttaatctaagtggtaa

SEQ ID NO: 177168 - DNA, 624 bp, Homo sapiens
  Payload ID: 14764
  Gene Symbol: RNF114
  Gene Name: ring finger protein 114
  ENST ID: ENST00000623528
  CDS Start-End: 78-290
gctcaccgccccgcgagccccgccccctcggcctcctcctcatcggccgccgttgcgcggcgcagagcggcagcaagatggcggcgcaacagcgggactgcgggggtgctgcgcagctggcggggccggcggcggaggctgaccccctaggacgcttcacgtgtcccgtgtgcttagaggtgtacgagaagccggtacaggtgccctgcggacacgtttcttcctgtccaagatccggtcccacgtggctacttgttccaaataccagaattacatcatggaaggtgtgaaggccaccattaaggatgcatctcttcagccaaggaatgttccaaaccgttacacctttccttgtccttactgtcctgagaagaactttgatcaggaaggacttgtggaacactgcaaattattccatagcacggataccaaatctgtggtttgtccgatatgtgcctcgatgccctggggagaccccaactaccgcagcgccaacttcagagagcacatccagcgccggcaccggttttcttatgacacttttgtggattatgatgttgatgaagaggacatgatgaatcaggtgttgcagcgctccatcatcgaccagtgagcagagtccgt

SEQ ID NO: 177169 - DNA, 2438 bp, Homo sapiens
  Payload ID: 14764
  Gene Symbol: RNF114
  Gene Name: ring finger protein 114
  ENST ID: ENST00000622999
  CDS Start-End: 37-186
atcggccgccgttgcgcggcgcagagcggcagcaagatggcggcgcaacagcgggactgcgggggtgctgcgcagctggcggggccggcggcggaggctgaccccctaggacgcttcacgtgtcccgtgtgcttagaggtgtacgagaagccggtacaggtgccctgcggacacgtgaatgtctgaagccgaagaagcctgtctgtggggtgtgtcgcagcgctctggcacctggcgtccgagccgtggagctcgagcggcagatcgagagcacagagacttcttgccatggctgccgtaagaatttcttcctgtccaagatccggtcccacgtggctacttgttccaaataccagaattacatcatggaaggtgtgaaggccaccattaaggatgcatctcttcagccaaggaatgttccaaaccgttacacctttccttgtccttactgtcctgagaagaactttgatcaggaaggacttgtggaacactgcaaattattccatagcacggataccaaatctgtggtttgtccgatatgtgcctcgatgccctggggagaccccaactaccgcagcgccaacttcagagagcacatccagcgccggcaccggttttcttatgacacttttgtggattatgatgttgatgaagaggacatgatgaatcaggtgttgcagcgctccatcatcgaccagtgagcagagtccgtgcttgctatctgtctcatgttacagagcttccattacatattaaacgtgaaatctatgactcctgtaccttacctgttcaacagacctgaaaatgagccatggcattgggacagggtcacttctgacaggggaagtgggtccccaggtcagcccttctcttccctttgggctcttgccaaagctgtcttcccctactgttaaccttgtttgtcacacggtcgagttcgtattggttctcggctacttcctggagcttctgccgcctcctgtggaagataatctagcttctccacctcttgtttcacactcattcctcccatccagtgtttgtctctcgggtccttcaagccagccaggaccttttctgggtcatgaatagcacaatgaagcaagtgtctcctttccttgtccccaaggtgtgcagactttggcagccgtgcacctgaccagagctgaagctcccgctgggctgtggggttgccagaagctggggttgccatcccggggtacatgtcaccagtcctcttggggttttgtaccatctgatgctggaagttttgattagtgatattttctactactacatatttagagttcactggttcagtcttaaatgcctgcatggtgcctttttaggataaggtataaccatacatttttggtggaagtgtttctgggttagggaagttaaagtctgtttatccgtaagtggggaggagggtcagctaagagaagtgggagggccagagctttttggttctgatttacaaattaatgaagtagtttcaaacaacgcggtcatgtttacctctccatttgggagcctgcctacattcttgttctagaagcacaaaaaatcctcagatgaattagaagaaagaggtttggggactcagcggatactagttcttttaccttctgcttggtaacttagattaaactgagcattgtttttctgtcacaaatgttttccttatgacactggtttcgacatgtaaaatgtgtttgaaaacctgctttgtagatgcagagagaagctataggaaacccagtaccacccctggtctgttctgacgagacatcgttcataaggcacagcacatcgcaagatgaacagttgttaataaaagctgttgctggaaacttgctttaggaacagctcaagaaccttggagttcatatttcacaaatattaataaatataagtccaagagctgtcagcctaatctgtaggagcagaacctctgattgaccaaaaggcatatgggtttaggttggttttttgatgtcatatgtctctgatggggctgcaagtgctacctcgcgcttgtacactgctgctgtggggctccgcgcctgccggtgaagagctgcagatgccgagaagccagcaaacacagggcccactggaaaaaaatagttttttcattagtatttctcgggaggacccaaaagttaaggtcagcttgttcactgtaatttctggaagaagttcactcagaccttcctgaattcagatcatctcagaagtctggagggaaatctggcgaaaccttcgtttgagggactgatgtgagtgtatgtccacctcactggtggcaccgagaaacttacttccttgtattaagtgcacttcttgtatttctaataagatgactttccagaaagtgagatttgttatgttctggcttttaaaaggtaaaatataaataaatttcataactt

SEQ ID NO: 177170 - DNA, 580 bp, Homo sapiens
  Payload ID: 14764
  Gene Symbol: RNF114
  Gene Name: ring finger protein 114
  ENST ID: ENST00000625177
  CDS Start-End: 15-580
agagcggcagcaagatggcggcgcaacagcgggactgcgggggtgctgcgcagctggcggggccggcggcggaggctgaccccctaggacgcttcacgtgtcccgtgtgcttagaggtgtacgagaagccggtacaggtgccctgcggacacgtcttttgctctgcatgcctgcaggaatgtctgaagccgaagaagcctgtctgtggggtgtgtcgcagcgctctggcacctggcgtccgagccgtggagctcgagcggcagatcgagagcacagagacttcttgccatggctgccgtaagaatttcttcctgtccaagatccggtcccacgtggctacttgttccaaataccagaattacatcatggaaggtgtgaaggccaccattaaggatgcatctcttcagccaaggaatgttccaaaccgttacacctttccttgtccttactgtcctgagaagaactttgatcaggaaggacttgtggaacactgcaaattattccatagcacggataccaaatctgtggattatgatgttgatgaagaggacatgatgaatcaggtgttgcagcgctccat

SEQ ID NO: 177171 - DNA, 1284 bp, Homo sapiens
  Payload ID: 14764
  Gene Symbol: RNF114
  Gene Name: ring finger protein 114
  ENST ID: ENST00000622920
  CDS Start-End: 7-627
agcaagatggcggcgcaacagcgggactgcgggggtgctgcgcagctggcggggccggcggcggaggctgaccccctaggacgcttcacgtgtcccgtgtgcttagaggtgtacgagaagccggtacaggtgccctgcggacacgtcttttgctctgcatgcctgcaggaatgtctgaagccgaagaagcctgtctgtggggtgtgtcgcagcgctctggcacctggcgtccgagccgtggagctcgagcggcagatcgagagcacagagacttcttgccatggctgccgtaagaatttcttcctgtccaagatccggtcccacgtggctacttgttccaaataccagaattacatcatggaaggtgtgaaggccaccattaaggatgcatctcttcagccaaggaatgttccaaaccgttacacctttccttgtccttactgtcctgagaagaactttgatcaggaaggacttgtggaacactgcaaattattccatagcacggataccaaatctgtggtgatgagcagagtccgtgcttgctatctgtctcatgttacagagcttccattacatattaaacgtgaaatctatgactcctgtaccttacctgttcaacagacctgaaaatgagccatggcattgggacagggtcacttctgacaggggaagtgggtccccaggtcagcccttctcttccctttgggctcttgccaaagctgtcttcccctactgttaaccttgtttgtcacacggtcgagttcgtattggttctcggctacttcctggagcttctgccgcctcctgtggaagataatctagcttctccacctcttgtttcacactcattcctcccatccagtgtttgtctctcgggtccttcaagccagccaggaccttttctgggtcatgaatagcacaatgaagcaagtgtctcctttccttgtccccaaggtgtgcagactttggcagccgtgcacctgaccagagctgaagctcccgctgggctgtggggttgccagaagctggggttgccatcccggggtacatgtcaccagtcctcttggggttttgtaccatctgatgctggaagttttgattagtgatattttctactactacatatttagagttcactggttcagtcttaaatgcctgcatggtgcctttttaggataaggtataaccatacatttttggtggaagtgtttctgggttagggaagttaaagtctgtttatccgtaagtggggaggagggtcagctaagagaagtgggagggcca

SEQ ID NO: 177172 - DNA, 569 bp, Homo sapiens
  Payload ID: 14764
  Gene Symbol: RNF114
  Gene Name: ring finger protein 114
  ENST ID: ENST00000623732
  CDS Start-End: 15-266
agagcggcagcaagatggcggcgcaacagcgggactgcgggggtgctgcgcagctggcggggccggcggcggaggctgaccccctaggacgcttcacgtgtcccgtgtgcttagaggtgtacgagaagccggtacaggtgccctgcggacacgtcgctttgccttcacctgtaatgatagcagctcccgtttgtggtgcgttttgtaagggctggacactctgccaggggtctgctatacaaactgtatcctcccagcagtcctagagcttttgctctgcatgcctgcaggaatgtctgaagccgaagaagcctgtctgtggggtgtgtcgcagcgctctggcacctggcgtccgagccgtggagctcgagcggcagatcgagagcacagagacttcttgccatggctgccgtaagaatttcttcctgtccaagatccggtcccacgtggctacttgttccaaataccagaattacatcatggaaggtgtgaaggccaccattaaggatgcatctcttcagccaaggaatgttccaaaccgttacacctttccttgtccttactgtcct

SEQ ID NO: 177173 - DNA, 9117 bp, Homo sapiens
  Payload ID: 14765
  Gene Symbol: RNF115
  Gene Name: ring finger protein 115
  Uniprot ID: Q9Y4L5
  ENST ID: ENST00000582693
  CDS Start-End: 205-1119
tctttggtgctgggaggcgggccgcagggtagctgttggcgccgccgcgtttctgggcctggccaactcacgtgaccgacgcgggctctgaagcggtgggccgcaccgaggcggcggcggcggcgacgactgcagctcgggaggtagcggcctggcgagggacgggccggctgccctctcggacggccgcggcggagggcaaaaatggcggaggcttcggcggccggggcggactcgggcgccgctgtagccgcccaccggtttttctgccacttttgcaagggcgaggtcagccccaaactaccggaatatatatgtcccagatgtgaatcaggctttattgaagaagtgacagatgattccagttttttaggtggtggcggcagtcggatagacaataccacaacaacacattttgcagagctttggggccatttggatcacacgatgttttttcaagattttagaccctttctaagtagcagtccactggaccaagataatagagccaatgaaaggggtcaccagactcacactgacttctggggagcaagacctccacggttgccattgggtcggagatacagatctcgaggaagttctcgtcctgacagatctccagctattgaaggaatactacaacacatctttgcaggattctttgcaaattctgccattcctggatctccacaccctttttcctggagcgggatgctgcactccaaccctggggactatgcctggggtcagacagggcttgatgccattgtaacccagcttttaggacaactggaaaacacaggccctcccccagctgacaaggaaaagatcacatctcttccaacagtgacagtaactcaggaacaagttgatatgggtttagagtgtccagtatgcaaagaagattacacagttgaagaggaagtccggcagttaccttgcaatcacttctttcacagcagttgtattgtgccgtggctagaactgcatgacacatgtcctgtatgtaggaagagcttaaatggtgaggactctactcggcaaagccagagcactgaggcctctgcaagcaacagatttagcaatgacagtcagctacatgaccgatggactttctgaagctaaagaccacacctgaatcagggctgtggtaatcatcttaccatagctgtaaattgtatcaaaacaaaaaattagtagatggatttaggaatatgtaagaaactcaacacataatataaatgcaatgaatgtttttcttctttaaatttaaagttagtatctacagatggaattgtatctacaaccaaatgcctcttatccctgaattcagagtgataattttataagtgtgaaacttaattatgtagggctccccccgtctgaatagaattaattccttaaagtctagttagggtcctgctgtctgtcatgttgccttgtaacggatgtttccacctccttctccaacctctaccccaccattagtgtattttactataaaaacagtggaaccacagccctaaagtcctgctgatataaagtccttttgtcttaattgtatttaaaaaaaaaaaaaactactcttgatcacattagctatgaggcgaggtcaaattcaggtatctaagactaatgattttgttttgtcttgatccccagagagcaaatcaaagaaaaattacagcaagaagagaaaagtggtttatcattgtgtgctttggttttcttattttaattttttttgttttttttttttgagatggagtctcgctctgtcgcctaggctgaagtgcagtggcacgatcttggctcattgcaaactctgcctcctgagttcaagcgattctcctacctcagcctccggagtagctgggaccacaggcatttgttaccatgcccagctaattttttgtatatttagtagagatggggtttcaccgtgttagccaggatggtctcaatctcctgaccttgtgctccgcctgcctcagcctcccaaagtgctgggattacaggcgtgagccactgcgcctggcctcttattttaatttttaaagactacttcagttgatgcagtttcccaagaaacctacataacatatattgggagccttatgttgataggaatctgattcccattcctttttgggaatgagttgggcagcatacaggcacagaaagacagatgtttgagacctttgcttctgagattttaaaaaatgattaccgctgggcgcggtggctcacgcctgtaatcccagcactttgggaggccgaggcaggcggatcacaaggtcaagagatcaagaccagcctggccaacaaggtaaaaccttgtctctactaaaaatataaaattagctgggcgtggtggtgcatgcctgtaatcccagctactcatgaggctgaggtgggagaatcgcttgaacccaggaggtggaggttgcggtgagccggatcataccaatgcactccagtctgggcaacaagagcgaaactccatctcaaaaaaaaaaaaaaaatccccaactcactgctttttttgtttgtttctgtcgcctaggctggagtgcagtggcacgatctcagctcaccacagcctcgacctcccaggctcaagtgatcctcccacctcagcctaccaagtggctgggactacaggcgtgtgccaccatgcctgggtaatttttgtatttttgtagagatagggttttgccgtgttgcccaggctggtctcaaactcctgggctcaagtgatctgcctgcctcaacctctcaaagtgctcaactcattgtttactgtcttttttcctagtaatcttaaaataatttgcctcacagaaatagagacagtaagtgtctgcagccagttcactgtttttggtaattcattggtcttcaggagttaagattttacattgtcacattttaatttttaagcctatttttcatctctgaaactttccttttctccttggttctggctatacttggactcaaactgatcagtgtgatcatgtccaaaacagcttggcctggaagaggtaggccttattttttcagcctagtagtgtcccatgcacatgctctttgtagcattcaagtgtttaacattggataaattaagaaggtcaagaatgttgttgaaacttcaaggtctcaaaaggaaatgatggggacatagaacaactgttggtgtaccaaaaaaaggtacagaggggcaccatttgtattgtcacacaacaatgatcagaatgatcagtttagaatgatcagaacaaaaacaccactctttaatgggtctttttcttggctagaagtctttcctcagtttttgttgactatcatacgctgatttgtgggtgacggaagggggctagagataacgtttctctgtactttggtaaaggatgaaggagtcagagagggaacagaaaaagtgagagagtggcctgctgaaataatagcctgcctctaaaagttgtgaccagaaagtatgattcatttgggcccagagggaataaaatatgttttttcatatacctcccatattacacctctgtagtgattgtttatttggggaatgagatctacttactgtgcgttgcccctgaaatgtagcttgagaatacacactggttttgaattggggaggaggatggaaggaaattagaggtgtattatgaatatttggccactacttagatggaggaaggctatgttgaacttgggacacattgcagttttcaagtacacaatatcagttgtctcagaaaaatcatgacagcctggacatatttgcttgtcagtgtctggagatgccaggacaggcagttgtagttttacgtacagatagagaaccaatgcctagagaactagaaaggatctgagtacctttaaaaagggtggaaacaaagtactggataggggtctgcctttttatacacagtatagcaaacagcatcagacaaagttacatgaagttttcttcactttttttgctctggtggatagaggatgtgagactcattttactgtttcccagacctgtcccacttaatggatctgttgtgtttcttcttataatggcaggcacctcagatgtccaggttaatttatgttgaggagttaggattcttcagggatttattattattattattattatttatttatttatttatttatttatttattttttgagatggaggcttgctctgtcgcctaggctggagtgcagtggtgcaatctcagctcactgcaacctccacctcctgggttccagcgattcttctgccttagcctcccaagcagctgggattacaggcacctgccaccatgcccagctaattttttatatgtttagtagagacaaggttttaccttgttggccaggctggtcttgaactctagacctcaggtgatctgccagtcgtggcctcccaaagtgctgggattacagacgggagccaccatgcccagcctgagatttattataaggaattggttcacacaataatggagtttgagaaatcccaagatctgcagtgggccagctagagatccaggagagctgatggtgtagttccagtctgaaggccagcttggataccctagaagagctgatgtttctgttccagttcagaggcaggaaaagactgaggtcttagttcaagcagtcaggcaggaggacttctcccttacttgttctattcagaccttcaactgattggatgagggccacttacattagggagggccatgtgctgtattcagtctactgactgaaatgttagtctcttccaaaaacaccttcacagacacacccagaatactgtatgaccaaatatctgggcatcatgtggcctagtcaagttgacacataagattaaccatcacaatgaggaaaaacagaaatgatacatgtatacagagtgctcctcatcccaattaagtttcaccaagttaataatgtgtctctatgagaagtggttcaccatgttggtcaggctgttttcaaactcctgacctcaagtgaccacccgcctcggcctcccaaagtgctgggattacaggtgtgagctagcactcccagccgacaggtgcttcttaaatgttttctttgagcaggaattggtccaggaattggttctcaagttagaaggaaaatttgaggggaagaacttgttttttctccaatcagtctctgattaaatagttattaggaaaaactccttgcttatgtctttgtattgcacatttttatatatgtatatatgtgtaaatagagatatttatatattcacagacaaacacgtgtatgcacatttcacaatggaggaagaagggatatggtgtgcactgaggtaaagtgagcagggatacagaagagagctggagcctcacagtctgattctctcattgtacataacctttagggtctttgtttccctgagttctctggtatggggcactgttggcttgggctggtaccctgttattctctgtgatgaagggattcactggaggtaaaaacgtaatcatttccaaaggttgagaataaatgactttgaggaaagggtgttcattatccgttgcttctatattataatcagttgaactacaatacggttatctattgattttttttaatttttctgacaaattattgacaccaaattgaataattcatgacctgcatgcttcagcttctttctccctggtttccaggtgctattccctcaagaaatgcaaattaaatatgtcggtcttaataaatcaggagggaagcatagtctgtgtctgttttaaatgacaacaacaacaaaacagctttggggtttaagaagtggaagacacatttttatttttttgagacacaatctcactctttcgcccaggctggagtgcagtggcgtgatctcaggtcactgcaacctcccgctcctgggttcaagcgattctcttgcctcagcctcccaagtagctgggattacaggcacgtgccaccatgcccagctaatttttgtatttttagtagagatggggttttgccatgttgcccaggctggtctcgaactcctgatgtcaagtgatcaccgacctcagcatcccaaagtgctgggattacaggcattagccaccacgcccaggtgagaagacagattttaagagaaggagcagggctggtatctgaataggtatttggatgttaggggaaaaccctttttggcctctgtggtagagcgatcggaaggtaaaagtgctgtttacaagaataatccattggagatctggggattggggacgacttataggatagagtcctcttgttgagaatttcccgaatgaatctcatgtaggttctgtcacagtaagatggaggaaaactttgatggggtaagtatcacaagtggctgtcctatagggggaaatcctagcctgcagtaatgtcagtgtctcagtattcagccagcgagccactgagctgctccaggggtttaaaatagaatgcatagaatacaatgtatacagctggtgatgctttccaggatcaaaatagagcccttgtctgatcccattgacattgtaaggtttcgatctctcatacctgccacagacaagtacattgtaggcattcaacttttaaggttttatacatgcaaactttatgttttcctgccacactacacttggtgtccacagaagtgtagtttgtatgttgcctcttcttcctctttcaaccagaacacttagatctgtgatcataggatgtaagcctgtgattctttactttttctaataagaaatacaattttcaagatccaaaaattattagattcttggctgggcattgtggctcatgcctgtaatctcagcattttggaaggctgaggcaggcagatcacttgaggtcaggagtttgagaccagcctgggcagcacaataaaacaccatgtctactaaaaatacaaaaattagccaggtgtggtggcatgcacctgtagtcccagctacttgggaggctgaggagggagaatcgtttgaaccaaggaggcagaggttgtagtgagccaagattgtgccactgcactccagggcaacagagagagaccctgtctcaaaacaaaaacccccaaattattagattcccttccaacaacttgatagccatattattagtatttttgattaaagaatacataacaaaaagctgctatgatttcagtaatgcttttaagttaatttattagtcacaccagaatctacatccaattgaaatatatacaaatatttgaaagatatttattcaggctgaagattatggtatatagattccttctgataacctcatggcctcacaggttcaaaacccgtgtttgtgaatcactcatacagattggggctaagatgcgtgtccagaaaaccacctattatgcatgaaaatttgtaggcttatttgaaggcaattgtatcaacacattttgaaagccaagacacaagtattttaagtttctgtttaaccaagtctcgagataagcagagtaaataaactctttagaagcaagactcagttggtatgtacaaagtgggattgctttgtatatattccgcttagtttgagtcagagctagtaatctgatgctcttaaatgtcttcataaacttgggcagtgatgtttcctttctgtgattatgtgtcacagatttttatatgtggactataattagtatagtacaatggctgaaacttttcctatagttggatatatcttctgagacttccagtgattgtataatgttgagtagctccagaagattatttgaatagtaaaaacaaaagacatctctacctatgtgagtttattatttagttagaaacacagaactaactatttaaaacaggtagagaaagattaagatgaatgtgatgtagtggagaaagctttggagactttggagtcagaactcaaatggctctaggtcccaaatccagactctcattttgattctcagaacaattctgtggaaagagaagatacaataggcaatatccctttttacagataggtaaacagaaatagcatctcaaaacctcatttgcactgggtgaggtggctcacgcctgtaatcccagcactttgggaggctgaggcgggtggatcacttgaggtcaggagtttgagaccagcctggccaacatggtgaaaccccgtctctaccaaaaacacaaaaattagccaggcatggtggtgcatgcctgtaatcccagctacttgggagactgaggcaggagaattgcttgaacccgggaggtggaggttgcagtgagctgagatcatgccactgcactccagcctgggcaacagagtgagactccgtctcaaaaaaaaaaaaaaaaaattcatttgcccaatgacaaatagctggtatgttgcagagccagaatttgaatccaggtctttttgcctccatggctagtccttttatctccatgggatacagtctaaaatccttagtttgaggttcaagactatcactaataagagtcttactcatctacttcagccatatctctttccgttcccacaaaccttagctcccacatttggcaggtccttgccaaggagcacaggtaaagtgtctctttccttttaatggctcaccatggagctgtagctaaatttctgtgctcttacccctttattcatgtagttcctcctatcaggaatatcctgcccactctctgcttaactatgacaagaggtcatctgtccaaagagaaagaagagagtttgtggatttaggagaaaagaaaagactccaaatactgctatgggcatttatttaaaaagagaaatgaccaaagaggttaacaagtatttagatgaagctgggcagttgtagtctgtggtgctcttggtctgcacaaatcttcctcttcctccagcagtgctgtatggatgttgttgaatgttgaggtctgtctgcattttctcattttcatgccaagtcaatcactggatctggctgtcttcctttctgtcctacctatctttgcttgttttctctctctttcctttgcagtgttaaataaaaatttattcccccaaaa

SEQ ID NO: 177174 - DNA, 2625 bp, Homo sapiens
  Payload ID: 14766
  Gene Symbol: RNF121
  Gene Name: ring finger protein 121
  Uniprot ID: Q9H920
  ENST ID: ENST00000361756
  CDS Start-End: 362-1345
acgtctcgctccttggagcccagactgagggagcgtcgcgaaagttgcccgttttggaacgctcccatttggctctccaaagggaagaattggttaaatagttgcactgaaaataatgcgattcaaatttctcattttccaagaacgctcccttgctgaagcttgcaagggcacggtactcccctctccttgaccctgaaacgtgcagcaagtagataacctcctgatccctgacagtctccgcctgtgttgatgccccgccccctctgctggagtccgagccgccgattggctaggagcacttgagcagcggaagcagctggctcgcgcggggactgcggtgagggggcgagccgtgaagatggcggcagtggtggaggtggaggttggaggtggtgctgctggggaacgggagctggatgaggttgatatgtcagatctctctccagaagagcaatggagggtcgagcacgcacgcatgcatgccaagcaccgtggccatgaagctatgcatgctgaaatggtcctcatcctcatcgcaaccttggtggtggcccagctgctcctggtgcagtggaagcagaggcacccacgctcctacaatatggtgaccctctttcagatgtgggttgttcccctctatttcacagtgaagctgcactggtggaggttcctagtgatctggatcttgttctctgctgtcacagcctttgttaccttccgagccacccgaaaacctctagtacagacaaccccaaggttggtttataagtggttcctgctaatctataaaatcagctatgccactggcattgttggctacatggctgtcatgtttaccctctttggtcttaacttattattcaagatcaaaccagaagatgccatggactttggcatctcccttctcttctatggcctctactatggagttctggaacgggactttgcagaaatgtgtgcagactacatggcatctaccatagggttctacagcgagtcgggcatgcctaccaaacatctttcagacagtgtgtgtgctgtgtgtgggcagcagatctttgtggacgtcagtgaagaggggatcattgagaacacgtataggctgtcctgcaatcatgtcttccacgagttctgcatccgtggctggtgcatcgtgggaaagaagcaaacgtgtccctactgcaaagagaaggtagacctcaagaggatgttcagcaatccctgggagaggcctcacgtcatgtatgggcaactgctggactggcttcgatacttggtagcctggcagcctgtcatcattggtgtagtccaaggcatcaactacatcctgggcctggaatagtgatgaagagcatcagtggaaaacccaccccacacgccatggacctcagggcactctcctccctgcccacaaagacctcctgggtgggaaagactcaaaggggtgcttgggccactcaggacccctctggctgtgtcggactggggagggatatgatggagagccagccagtggggctgtcagcagtggggggctttttaaaagaaaactattttgatgaatatatttaaaaaacctttttttattgtggagcataggaattgcccccctccaggcttcaccctccctgcctaagcagggtgggggcagagccatgacatttttggtttaaaggagccttctcatctctggccgagaacactgctgggctcccaggtagctgaaggcctcagcccacccactcccttcttccctgtgtggggctcaagcctggtgcacttagtatagaagagctaacgtactcaggcttgtgccacgggtgagcactgaggccccaggtgtcctccctcccccactgtctgggacacaggacaggtgttgcgtctgactctgtctccccctgtccaagagctataggctggttgaggcaagtggaaccttatcagtgacttggccaacaagggaagccttggggcctcagaattcattgaagatttgttttgggacaactggaagaatcagcaccatggatactcgcccgtgggcagggctgtggtcagccaagaatagaggtcatatagttgggccatggggcaattgttggcagccatgactgacggccccttgtgcaagctcattcttcagtggatccttcagtggagtggtgacacgtgccagcggtcactctgccacatcacttccttcttgaaagcctaagagtgcgtatgcgtgtgtgtgtgtgtgtgtgtgtgtacgtgaggcagaagaatatgacagatgtcagcttctccctgtgtcagatgatatgtccttgaagctggcaggggattcccagtccagggaatatccctacatgatttttgtcattcatgggtcctccctgggcctgacaacgggagtggtgggtgggtgagaacaggttctgagagggggcttctaggaaggccccagccctagtcctaggcgacttgaataaagtgggaggtcaaacatgggccttcggcattgggtttctagggaatatggctcagtagggcctgccccttcaagggcagcaagaacgaagcaggatgttgtcactcccgtctgaataaagctccatgagctgggttggaaagctg

SEQ ID NO: 177175 - DNA, 608 bp, Homo sapiens
  Payload ID: 14766
  Gene Symbol: RNF121
  Gene Name: ring finger protein 121
  ENST ID: ENST00000393711
  CDS Start-End: 36-377
gcgcggggactgcggtgagggggcgagccgtgaagatggcggcagtggtggaggtggaggttggaggtggtgctgctggggaacgggagctggatgaggttgatatgtcagatctctctccagaagagcaatggagggtcgagcacgcacgcatgcatgccaagcaccgtggccatgaagctatgcatgctgaaatggtcctcatcctcatcgcaaccttggtggtggcccagctgctcctggtgcagtggaagcagaggcacccacgctcctacaataggtggggtttcaccgtgttgcccaggctggtctcaagctcctgggctcaagcgatccatctgcctcagccccccaatgtgctcgaattacaggagtgagccaccatgcccggcctacagtagaaattttaaaccaaataaagaaaccagatggtgaccctctttcagatgtgggttgttcccctctatttcacagtgaagctgcactggtggaggttcctagtgatctggatcttgttctctgctgtcacagcctttgttaccttccgagccacccgaaaacctctagtacagacaaccccaaggttggtttataagtggttcctgcta

SEQ ID NO: 177176 - DNA, 2132 bp, Homo sapiens
  Payload ID: 14766
  Gene Symbol: RNF121
  Gene Name: ring finger protein 121
  ENST ID: ENST00000393713
  CDS Start-End: 87-704
gactgcggtgagggggcgagccgtgaagatggcggcagtggtggaggtggaggttggaggtggtgctgctggggaacgggagctggatgagggtcgagcacgcacgcatgcatgccaagcaccgtggccatgaagctatgcatgctgaaatggtcctcatcctcatcgcaaccttggtggtggcccagctgctcctggtgcagtggaagcagaggcacccacgctcctacaatatggtgaccctctttcagatgtgggttgttcccctctatttcacagtgaagctgcactggtggaggttcctagtgatctggatcttgttctctgctgtcacagcctttgttaccttccgagccacccgaaaacctctagtacagacaaccccaaggttggtttataagtggttcctgctaatctataaaatcagctatgccactggcattgttggctacatggctgtcatgtttaccctctttggtcttaacttattattcaagatcaaaccagaagatgccatggactttggcatctcccttctcttctatggcctctactatggagttctggaacgggactttgcagaaatgtgtgcagactacatggcatctaccatagggcggtgctcagcttccacgagttctgcatccgtggctggtgcatcgtgggaaagaagcaaacgtgtccctactgcaaagagaaggtagacctcaagaggatgttcagcaatccctgggagaggcctcacgtcatgtatgggcaactgctggactggcttcgatacttggtagcctggcagcctgtcatcattggtgtagtccaaggcatcaactacatcctgggcctggaatagtgatgaagagcatcagtggaaaacccaccccacacgccatggacctcagggcactctcctccctgcccacaaagacctcctgggtgggaaagactcaaaggggtgcttgggccactcaggacccctctggctgtgtcggactggggagggatatgatggagagccagccagtggggctgtcagcagtggggggctttttaaaagaaaactattttgatgaatatatttaaaaaacctttttttattgtggagcataggaattgcccccctccaggcttcaccctccctgcctaagcagggtgggggcagagccatgacatttttggtttaaaggagccttctcatctctggccgagaacactgctgggctcccaggtagctgaaggcctcagcccacccactcccttcttccctgtgtggggctcaagcctggtgcacttagtatagaagagctaacgtactcaggcttgtgccacgggtgagcactgaggccccaggtgtcctccctcccccactgtctgggacacaggacaggtgttgcgtctgactctgtctccccctgtccaagagctataggctggttgaggcaagtggaaccttatcagtgacttggccaacaagggaagccttggggcctcagaattcattgaagatttgttttgggacaactggaagaatcagcaccatggatactcgcccgtgggcagggctgtggtcagccaagaatagaggtcatatagttgggccatggggcaattgttggcagccatgactgacggccccttgtgcaagctcattcttcagtggatccttcagtggagtggtgacacgtgccagcggtcactctgccacatcacttccttcttgaaagcctaagagtgcgtatgcgtgtgtgtgtgtgtgtgtgtgtgtacgtgaggcagaagaatatgacagatgtcagcttctccctgtgtcagatgatatgtccttgaagctggcaggggattcccagtccagggaatatccctacatgatttttgtcattcatgggtcctccctgggcctgacaacgggagtggtgggtgggtgagaacaggttctgagagggggcttctaggaaggccccagccctagtcctaggcgacttgaataaagtgggaggtcaaacatgggccttcggcattgggtttctagggaatatggctcagtagggcctgccccttcaagggcagcaagaacgaagcaggatgttgtcactcccgtctgaataaagctccatgagctgggttggaaagctgaa

SEQ ID NO: 177177 - DNA, 2202 bp, Homo sapiens
  Payload ID: 14766
  Gene Symbol: RNF121
  Gene Name: ring finger protein 121
  ENST ID: ENST00000530137
  CDS Start-End: 39-926
ggaggttggaggtggtgctgctggggaacgggagctggatgagggtcgagcacgcacgcatgcatgccaagcaccgtggccatgaagctatgcatgctgaaatggtcctcatcctcatcgcaaccttggtggtggcccagctgctcctggtgcagtggaagcagaggcacccacgctcctacaatatggtgaccctctttcagatgtgggttgttcccctctatttcacagtgaagctgcactggtggaggttcctagtgatctggatcttgttctctgctgtcacagcctttgttaccttccgagccacccgaaaacctctagtacagacaaccccaaggttggtttataagtggttcctgctaatctataaaatcagctatgccactggcattgttggctacatggctgtcatgtttaccctctttggtcttaacttattattcaagatcaaaccagaagatgccatggactttggcatctcccttctcttctatggcctctactatggagttctggaacgggactttgcagaaatgtgtgcagactacatggcatctaccatagggttctacagcgagtcgggcatgcctaccaaacatctttcagacagtgtgtgtgctgtgtgtgggcagcagatctttgtggacgtcagtgaagaggggatcattgagaacacgtataggctgtcctgcaatcatgtcttccacgagttctgcatccgtggctggtgcatcgtgggaaagaagcaaacgtgtccctactgcaaagagaaggtagacctcaagaggatgttcagcaatccctgggagaggcctcacgtcatgtatgggcaactgctggactggcttcgatacttggtagcctggcagcctgtcatcattggtgtagtccaaggcatcaactacatcctgggcctggaatagtgatgaagagcatcagtggaaaacccaccccacacgccatggacctcagggcactctcctccctgcccacaaagacctcctgggtgggaaagactcaaaggggtgcttgggccactcaggacccctctggctgtgtcggactggggagggatatgatggagagccagccagtggggctgtcagcagtggggggctttttaaaagaaaactattttgatgaatatatttaaaaaacctttttttattgtggagcataggaattgcccccctccaggcttcaccctccctgcctaagcagggtgggggcagagccatgacatttttggtttaaaggagccttctcatctctggccgagaacactgctgggctcccaggtagctgaaggcctcagcccacccactcccttcttccctgtgtggggctcaagcctggtgcacttagtatagaagagctaacgtactcaggcttgtgccacgggtgagcactgaggccccaggtgtcctccctcccccactgtctgggacacaggacaggtgttgcgtctgactctgtctccccctgtccaagagctataggctggttgaggcaagtggaaccttatcagtgacttggccaacaagggaagccttggggcctcagaattcattgaagatttgttttgggacaactggaagaatcagcaccatggatactcgcccgtgggcagggctgtggtcagccaagaatagaggtcatatagttgggccatggggcaattgttggcagccatgactgacggccccttgtgcaagctcattcttcagtggatccttcagtggagtggtgacacgtgccagcggtcactctgccacatcacttccttcttgaaagcctaagagtgcgtatgcgtgtgtgtgtgtgtgtgtgtgtgtacgtgaggcagaagaatatgacagatgtcagcttctccctgtgtcagatgatatgtccttgaagctggcaggggattcccagtccagggaatatccctacatgatttttgtcattcatgggtcctccctgggcctgacaacgggagtggtgggtgggtgagaacaggttctgagagggggcttctaggaaggccccagccctagtcctaggcgacttgaataaagtgggaggtcaaacatgggccttcggcattgggtttctagggaatatggctcagtagggcctgccccttcaagggcagcaagaacgaagcaggatgttgtcactcccgtctgaataaagctccatgagctgggttggaaa

SEQ ID NO: 177178 - DNA, 571 bp, Homo sapiens
  Payload ID: 14766
  Gene Symbol: RNF121
  Gene Name: ring finger protein 121
  ENST ID: ENST00000530058
  CDS Start-End: 45-290
agctggctcgcgcggggactgcggtgagggggcgagccgtgaagatggcggcagtggtggaggtggaggttggaggtggtgctgctggggaacgggagctggatgaggttgatatgtcagatctctctccagaagagcaatggagggtcgagcacgcacgcatgcatgccaagcaccgtggccatgaagctatgcatgctgaaatggtcctcatcctcatcgcaaccttggtggtggcccagctgctcctggtgcagtggaagcagaggcacccacgctcctacaattgaagctgcactggtggaggttcctagtgatctggatcttgttctctgctgtcacagcctttgttaccttccgagccacccgaaaacctctagtacagacaaccccaaggttggtttataagtggttcctgctaatctataaaatcagctatgccactggcattgttggctacatggctgtcatgtttaccctctttggtcttaacttattattcaagatcaaaccagaagatgccatggactttggcatctcccttctcttctatggcctctactatggagtt

SEQ ID NO: 177179 - DNA, 786 bp, Homo sapiens
  Payload ID: 14766
  Gene Symbol: RNF121
  Gene Name: ring finger protein 121
  ENST ID: ENST00000530655
  CDS Start-End: 94-252
gcgcggggactgcggtgagggggcgagccgtgaagatggcggcagtggtggaggtggaggttggaggtggtgctgctggggaacgggagctggatgagggtcgagcacgcacgcatgcatgccaagcaccgtggccatgaagctatgcatgctgaaatggtcctcatcctcatcgcaaccttggtggtggcccagctgctcctggtgcagtggaagcagaggcacccacgctcctacaatgttggtttataagtggttcctgctaatctataaaatcagctatgccactggcattgttggctacatggctgtcatgtttaccctctttggtcttaacttattattcaagatcaaaccagaagatgccatggactttggcatctcccttctcttctatggcctctactatggagttctggaacgggactttgcagaaatgtgtgcagactacatggcatctaccatagggttctacagcgagtcgggcatgcctaccaaacatctttcagacagtgtgtgtgctgtgtgtgggcagcagatctttgtggacgtcagtgaagaggggatcattgagaacacgtataggctgtcctgcaatcatgtcttccacgagttctgcatccgtggctggtgcatcgtgggaaagaagcaaacgtgtccctactgcaaagagaaggtagacctcaagaggatgttcagcaatccctgggagaggcctcacgtcatgtatgggcaactgctggactggcttcgatacttggtagcctggcagcctgtcatcattgg

SEQ ID NO: 177180 - DNA, 870 bp, Homo sapiens
  Payload ID: 14766
  Gene Symbol: RNF121
  Gene Name: ring finger protein 121
  ENST ID: ENST00000533380
  CDS Start-End: 89-592
gggactgcggtgagggggcgagccgtgaagatggcggcagtggtggaggtggaggttggaggtggtgctgctggggaacgggagctggatgagggtcgagcacgcacgcatgcatgccaagcaccgtggccatgaagctatgcatgctgaaatggtcctcatcctcatcgcaaccttggtggtggcccagctgctcctggtgcagtggaagcagaggcacccacgctcctacaatttctacagcgagtcgggcatgcctaccaaacatctttcagacagtgtgtgtgctgtgtgtgggcagcagatctttgtggacgtcagtgaagaggggatcattgagaacacgtataggctgtcctgcaatcatgtcttccacgagttctgcatccgtggctggtgcatcgtgggaaagaagcaaacgtgtccctactgcaaagagaaggtagacctcaagaggatgttcagcaatccctgggagaggcctcacgtcatgtatgggcaactgctggactggcttcgatacttggtagcctggcagcctgtcatcattggtgtagtccaaggcatcaactacatcctgggcctggaatagtgatgaagagcatcagtggaaaacccaccccacacgccatggacctcagggcactctcctccctgcccacaaagacctcctgggtgggaaagactcaaaggggtgcttgggccactcaggacccctctggctgtgtcggactggggagggatatgatggagagccagccagtggggctgtcagcagtggggggctttttaaaagaaaactattttgatgaatatatttaaaaaacctttttttattgtggagcataggaattgcccccctccaggctt

SEQ ID NO: 177181 - DNA, 2375 bp, Homo sapiens
  Payload ID: 14766
  Gene Symbol: RNF121
  Gene Name: ring finger protein 121
  ENST ID: ENST00000526549
  CDS Start-End: 70-219
gagccgtgaagatggcggcagtggtggaggtggaggttggaggtggtgctgctggggaacgggagctggatgagggtcgagcacgcacgcatgcatgccaagcaccgtggccatgaagctatgcatgctgaaatggtcctcatcctcatcgcaaccttggtggtggcccagctgctcctggtgcagtggaagcagaggcacccacgctcctacaattagagacggggtttcactgtgttagccaggatggtctcgatctcctgaccttgtgatccgcctcggcctcccaaagtgctgggattacaggcgtgagccaccgcgcccggcagatttttacaacctattctgaagaaaatggtgaccctctttcagatgtgggttgttcccctctatttcacagtgaagctgcactggtggaggttcctagtgatctggatcttgttctctgctgtcacagcctttgttaccttccgagccacccgaaaacctctagtacagacaaccccaaggttggtttataagtggttcctgctaatctataaaatcagctatgccactggcattgttggctacatggctgtcatgtttaccctctttggtcttaacttattattcaagatcaaaccagaagatgccatggactttggcatctcccttctcttctatggcctctactatggagttctggaacgggactttgcagaaatgtgtgcagactacatggcatctaccatagggttctacagcgagtcgggcatgcctaccaaacatctttcagacagtgtgtgtgctgtgtgtgggcagcagatctttgtggacgtcagtgaagaggggatcattgagaacacgtataggctgtcctgcaatcatgtcttccacgagttctgcatccgtggctggtgcatcgtgggaaagaagcaaacgtgtccctactgcaaagagaaggtagacctcaagaggatgttcagcaatccctgggagaggcctcacgtcatgtatgggcaactgctggactggcttcgatacttggtagcctggcagcctgtcatcattggtgtagtccaaggcatcaactacatcctgggcctggaatagtgatgaagagcatcagtggaaaacccaccccacacgccatggacctcagggcactctcctccctgcccacaaagacctcctgggtgggaaagactcaaaggggtgcttgggccactcaggacccctctggctgtgtcggactggggagggatatgatggagagccagccagtggggctgtcagcagtggggggctttttaaaagaaaactattttgatgaatatatttaaaaaacctttttttattgtggagcataggaattgcccccctccaggcttcaccctccctgcctaagcagggtgggggcagagccatgacatttttggtttaaaggagccttctcatctctggccgagaacactgctgggctcccaggtagctgaaggcctcagcccacccactcccttcttccctgtgtggggctcaagcctggtgcacttagtatagaagagctaacgtactcaggcttgtgccacgggtgagcactgaggccccaggtgtcctccctcccccactgtctgggacacaggacaggtgttgcgtctgactctgtctccccctgtccaagagctataggctggttgaggcaagtggaaccttatcagtgacttggccaacaagggaagccttggggcctcagaattcattgaagatttgttttgggacaactggaagaatcagcaccatggatactcgcccgtgggcagggctgtggtcagccaagaatagaggtcatatagttgggccatggggcaattgttggcagccatgactgacggccccttgtgcaagctcattcttcagtggatccttcagtggagtggtgacacgtgccagcggtcactctgccacatcacttccttcttgaaagcctaagagtgcgtatgcgtgtgtgtgtgtgtgtgtgtgtgtacgtgaggcagaagaatatgacagatgtcagcttctccctgtgtcagatgatatgtccttgaagctggcaggggattcccagtccagggaatatccctacatgatttttgtcattcatgggtcctccctgggcctgacaacgggagtggtgggtgggtgagaacaggttctgagagggggcttctaggaaggccccagccctagtcctaggcgacttgaataaagtgggaggtcaaacatgggccttcggcattgggtttctagggaatatggctcagtagggcctgccccttcaagggcagcaagaacgaagcaggatgttgtcactcccgtctgaataaagctccatgagctgggttggaaagctg

SEQ ID NO: 177182 - DNA, 812 bp, Homo sapiens
  Payload ID: 14766
  Gene Symbol: RNF121
  Gene Name: ring finger protein 121
  ENST ID: ENST00000525243
  CDS Start-End: 1-439
ggaggtggaggttggaggtggtgctgctggggaacgggagctggatgaggttgatatgtcagatctctctccagaagagcaatggagggtcgagcacgcacgcatgcatgccaagcaccgtggccatgaagctatgcatgctgaaatggtcctcatcctcatcgcaaccttggtggtggcccagctgctcctggtgcagtggaagcagaggcacccacgctcctacaatgatcaaaccagaagatgccatggactttggcatctcccttctcttctatggcctctactatggagttctggaacgggactttgcagaaatgtgtgcagactacatggcatctaccatagggttctacagcgagtcgggcatgcctaccaaacatctttcagacagtgtgtgtgctgtgtgtgggcagcagatctttgtggacgtcagtgaagaggggatcattgagaacacgtataggctgtcctgcaatcatgtcttccacgagttctgcatccgtggctggtgcatcgtgggaaagaagcaaacgtgtccctactgcaaagagaaggtagacctcaagaggatgttcagcaatccctgggagaggcctcacgtcatgtatgggcaactgctggactggcttcgatacttggtagcctggcagcctgtcatcattggtgtagtccaaggcatcaactacatcctgggcctggaatagtgatgaagagcatcagtggaaaacccaccccacacgccatggacctcagggcactctcctccctgcccacaaagacctcctgggtgggaaagactcaaaggggtg

SEQ ID NO: 177183 - DNA, 1868 bp, Homo sapiens
  Payload ID: 14767
  Gene Symbol: RNF122
  Gene Name: ring finger protein 122
  Uniprot ID: Q9H9V4
  ENST ID: ENST00000256257
  CDS Start-End: 403-870
agtttcggaaccccagccagctcacctctgcgccgctgaacccgatccgagcctccggcaaaggtttttccctcctcccccggccgagggcttctgcagcccgggcacccccgccccgcggcgccccacattcccccagcccggggcccttggcgcgtgcgctccgtgcggctgtgctccgcgggactttgtttgtttcctcctcgtccctctttgttgggctgaacaccagcctcgtcaaagccccccactccggagggagttcggcttctccagcagggcggctgcagcgcgctgccccgaccccgcctgcggcccctcacgccgctagtgctcccaccccgccctcctggcaccccgcctgcgtccgttcgcccgaggaagccaaccgcgacttcattgatgcacccattccagtggtgtaacgggtgtttctgtggcctgggactggttagcaccaacaagtcctgctcgatgccacccatcagtttccaggaccttccgctcaacatctatatggtcatcttcggcacaggcatctttgtcttcatgctcagccttatcttctgctgctattttatcagcaaactgcggaaccaggcacagagtgagcgatacggatataaggaggtggtgcttaaaggtgatgccaagaagttacaattatatgggcagacctgcgcagtctgtctggaagacttcaaggggaaggatgagttaggcgtgctcccgtgccaacacgcctttcaccgcaagtgtctggtgaaatggctggaagttcgctgtgtctgccccatgtgtaacaagcccattgctagtccctcagaggccacgcagaacattgggattctattggatgagctggtgtgagtgctgccgctacaccgagacctggagaagacctcttgcctcatggatgtctggtccctctgcacagctccaaccaacaggactgtagggtgatgacgatcactttcccagtgatgagaagggtggtctaggactgggcttctaccctcagtgcaagaccagtgccagatgtgcccccacttcctgcctcctgaagccttcttccctgctactccatgctggtggcctcacccatcaagaccactgtctcctggtactggactatctacctgccttgtccctgttctgggggaaggtgtccaccccgatcaagaacatggagaaagtcctctttcaaggctcccattaggaggatgagctgccttgacccagaagggatgagacgggctcttacctctctacaaccttccctccccttcccactccttccggagtaaggttagaagggaaggaaggaaagatcaaggaaccaagcgcctccacgggaggcgagggaggctctgtatgaaacagaagagcagggacataaaggaaaatgtcagtgtttacatgggacctatggaaacaaaggctggcgggcgccagctgactccagagtaagagagggcccttcccctgccaggacccacggtgctatccattcagtctcttcctcagttaatctcggagcttcctattccatgttgaggtttgtgggcccctctagaggagggctagttctatacttaaattgattcccaggggccttttttttttttttttttttttttttgatcaaaaggggtgtggggatgggggtgtctacggttaagcaacagatacctccttccctttgtaaatagtatttttatacttcatcctcgcctctcaggctttagatacgaaatctccagaatggaagggggtggggattttctgttcctccctggagtgggtgagggtgggagaaagttacatatttaaagaaaaataaatttaataacaagtttctctaacct

SEQ ID NO: 177184 - DNA, 4311 bp, Homo sapiens
  Payload ID: 14768
  Gene Symbol: RNF123
  Gene Name: ring finger protein 123
  Uniprot ID: Q5XPI4
  ENST ID: ENST00000327697
  CDS Start-End: 145-4089
gctggaggctcagcgcgcaagcgtgcgcgtgatttggccctgaacggacgccgtagccaagaggttgggcggatgttgtgagccgggtcgctgcggccgaggctccggcccccaggaccactggctgcccatgagagatgaaggatggcatccaagggggccggcatgtctttctcccgcaagagctataggctgacctcagatgctgagaaatccagggtcacaggcattgtgcaggagaagctgctgaatgactacctgaaccgcatcttttcctcttctgaacatgcacccccagcagccaccagcaggaaacccctgaacttccagaacctgccagaacatttggaccagttgctacaggtggacaatgaggaggaggaaagccagggacaggttgaagggcggcttggcccatccactgtggtcctggaccacacaggcggctttgaggggcttctcctggtggatgatgacctgctgggggtgattggacacagcaactttggcaccatccgctctaccacatgcgtgtacaaagggaaatggctctacgaggtcctcatctcctcccaggggctcatgcagatcggctggtgcaccatcagctgccgcttcaaccaggaggagggggttggagatacacacaactcctatgcctatgatggcaaccgcgtgcgcaagtggaatgtgaccacaacgaattatggcaaggcgtgggcagcgggggacatcgtgagctgcctgattgacctggatgatggcactctgtccttctgcctgaacggtgtatcactgggcactgcctttgagaacctgtccaggggcctgggtatggcctacttcccagccatcagcctctctttcaaggagtccgtggccttcaactttggcagccgtcctctgcgctacccagtggcaggctaccggcccctgcaggacccaccgagtgctgacctggtgcgggcacagaggttgctgggctgcttccgggcagtgctgagtgtggagctggaccctgtggaggggcggctgttggacaaggagagctccaagtggcggttgcggggccagcccaccgtcctcctcacactggcccacatcttccatcactttgcaccgcttctgcgcaaggtgtatctggtggaggctgtgctcatgagcttcttgctgggcatcgtggagaagggcacacccacacaggcacagtccgtggtgcaccaggtcctggacctcttgtggctcttcatggaggactacgaggtacaagattgcctcaagcagttgatgatgtctctgcttcggctgtaccgattctcacccattgtcccagacctgggcctacagatccattacctgcggctcactatcgccatcctgaggcatgagaagtcccgcaagtttctgcttagcaatgtcctcttcgacgtgctccgctccgtcgtcttcttttacatcaagagccccctgcgtgtggaggaggccggcctgcaggagctcattcccaccacctggtggccccactgctccagtagggagggcaaagagagcacggagatgaaggaggagaccgcagaggagcggctgcggcggcgagcctacgaacggggctgtcagcggctcaggaagcgcatcgaagtggtggaagaactacaggtccagatcctgaagctgctgctggacaataaagatgacaatgggggtgaagcttctaggtatatcttcctgaccaagtttcgcaagtttctgcaggagaacgccagtggccgggggaacatgcccatgctctgcccccctgagtacatggtctgcttcttacaccggctgatctctgccctgcgctactattgggatgaatacaaggcttccaatcctcatgcttccttcagtgaggaggcctacatcccgccccaggtcttctataatggcaaggtggactactttgacctgcagcgcctggggggcctcctctcgcacctgcggaagaccctcaaagatgaccttgcttccaaagccaacattgtgatcgacccactggagctccagtcaaccgccatggatgacctagatgaggatgaggagccagccccagctatggcccagcgccccatgcaggccctggctgttggggggccactgcccctgccccggcccggctggctcagttctccaactttgggccgagccaaccgcttcctcagcacagcggctgtgagcctcatgaccccacggcggcctctgagcacctcggagaaagtgaaggtccgcacgctgagcgtggagcagaggacccgtgaggacattgaaggcagccactggaatgagggcttgctgctggggcggccccccgaggagcctgagcagcccctcaccgagaactcgctgctggaagtcctggatggggcggtcatgatgtacaacctcagcgtacaccagcagctgggcaagatggtgggtgtctccgatgatgtcaatgaatacgctatggctctgagggacacagaggacaagctccgccggtgccccaagaggaggaaggacatccttgcagagttgaccaagagccagaaggttttctcagaaaagctggaccacctgagccgccgtcttgcctgggtccatgccactgtctactcccaggagaagatgctggacatctactggctgctgcgcgtctgcctgcggaccattgagcacggtgatcgcacagggtctctctttgccttcatgcccgagttctacctgagcgtggccatcaacagctacagtgctctcaagaattactttggtcccgtgcacagcatggaggagctcccaggctatgaagagaccctgacccgcctggctgccattctcgccaaacactttgccgacgcacgcattgtgggcactgacatccgagactcactgatgcaggccctggccagctacgtgtgctacccacactccctgcgggctgtggagcgaatccccgaggagcagcgtatcgccatggtgaggaacctcctggcgccctatgagcagcggccctgggcccagaccaactggatcctggtgcggctctggaggggctgtggcttcgggtaccgctatacacggctgccacatctgctgaaaaccaaacttgaggacgccaatttgcccagcctccagaagccctgcccttccaccctgctgcagcagcacatggcggacctcctacagcagggtcctgatgtggcacccagcttcctcaacagcgtcctcaatcagctcaactgggccttctctgaattcattggcatgatccaagagatccagcaggctgctgagcgcctggagcggaactttgtggacagccggcagctcaaggtatgtgccacctgctttgacctctcggtcagcctgctgcgtgtcttggagatgactatcacactggtgcctgagatattccttgactggacccggcctacctctgagatgctgctgcggcgtcttgcacagctgctaaaccaggtgctgaaccgggtgacagctgagaggaacctgtttgatcgtgtggtcaccctacggctgcctggcctagagagcgtggaccactatcccattctggtggcagtgacgggcatcctggtgcagctcctggtgcgtggcccagcctcagagagagagcaagccacatcagtgctcctggcagatccctgcttccagctacgctcaatatgctatctcctgggacagccagagcccccagcacctggcactgctctgccagcccctgaccggaagcgcttctccctgcagagctatgcggattatatcagtgccgatgagctggcccaagtggaacagatgctggcgcacctgacctctgcatctgcccaggcagcagctgcctccctgcccaccagtgaggaggacctctgccccatctgctatgcccaccccatctctgctgtgttccagccctgtggccacaagtcctgcaaagcctgtatcaaccagcacctgatgaacaacaaggactgcttcttctgcaaaaccaccatcgtgtctgtagaggactgggagaagggagccaatacgagtactacctcctcagctgcctagccctcacagcctgtgccatcctggaacctccacctttgaacccagagccaggctgggccctatttatgagctccctttgcccttctcctgtatcccacaccaccacatccaacctccttgcctgcctgtatcctcattggtgggagcccagccatggccctaattgtgcctgagcttgactttcagtcagggccacagtgagcattaaattattattccata

SEQ ID NO: 177185 - DNA, 481 bp, Homo sapiens
  Payload ID: 14768
  Gene Symbol: RNF123
  Gene Name: ring finger protein 123
  ENST ID: ENST00000443204
  CDS Start-End: 87-293
aagaggttgggcggatgttgtgagccgggtcgctgcggccgaggctccggcccccaggaccactggctgcccatgagagatgaaggatggcatccaagggggccggcatgtctttctcccgcaagagctataggctgacctcagatgctgagaaatccagggtcacaggcattgtgcaggagaagctgctgaatgactacctgaaccgcatcttttcctcttctgaacatgcacccccagcagccaccagcaggcagcccccctgtgagctcaggggaaaggatgggatttagtgtcatctggctgatttcaaggacttgtggacccctggcagcctctcactctccccaggaaacccctgaacttccagaacctgccagaacatttggaccagttgctacaggtggacaatgaggaggaggaaagccagggacaggttgaagggcggcttggcccatccactgtggtcctggaccacaca

SEQ ID NO: 177186 - DNA, 2670 bp, Homo sapiens
  Payload ID: 14768
  Gene Symbol: RNF123
  Gene Name: ring finger protein 123
  ENST ID: ENST00000432042
  CDS Start-End: 261-2549
ctgaacggacgccgtagccaagaggttgggcggatgttgtgagccgggtcgctgcggccgaggctccgggacaggttgaagggcggcttggcccatccactgtggtcctggaccacacaggcggctttgaggggcttctcctggtggatgatgacctgctgggggtgattggacacagcaactttggcaccatccgctctaccacatgcgtgtacaaagggaaatggctctacgaggtcctcatctcctcccaggggctcatgcagatcggctggtgcaccatcagctgccgcttcaaccaggaggagggggttggagatacacacaactcctatgcctatgatggcaaccgcgtgcgcaagtggaatgtgaccacaacgaattatggcaaggcgtgggcagcgggggacatcgtgagctgcctgattgacctggatgatggcactctgtccttctgcctgaacggtgtatcactgggcactgcctttgagaacctgtccaggggcctgggtatggcctacttcccagccatcagcctctctttcaaggagtccgtggccttcaactttggcagccgtcctctgcgctacccagtggcaggctaccggcccctgcaggacccaccgagtgctgacctggtgcgggcacagaggttgctgggctgcttccgggcagtgctgagtgtggagctggaccctgtggaggggcggctgttggacaaggagagctccaagtggcggttgcggggccagcccaccgtcctcctcacactggcccacatcttccatcactttgcaccgcttctgcgcaaggtgtatctggtggaggctgtgctcatgagcttcttgctgggcatcgtggagaagggcacacccacacaggcacagtccgtggtgcaccaggtcctggacctcttgtggctcttcatggaggactacgaggtacaagattgcctcaagcagttgatgatgtctctgcttcggctgtaccgattctcacccattgtcccagacctgggcctacagatccattacctgcggctcactatcgccatcctgaggcatgagaagtcccgcaagtttctgcttagcaatgtcctcttcgacgtgctccgctccgtcgtcttcttttacatcaagagccccctgcgtgtggaggaggccggcctgcaggagctcattcccaccacctggtggccccactgctccagtagggagggcaaagagagcacggagatgaaggaggagaccgcagaggagcggctgcggcggcgagcctacgaacggggctgtcagcggctcaggaagcgcatcgaagtggtggaagaactacaggtccagatcctgaagctgctgctggacaataaagatgacaatgggggtgaagcttctaggtatatcttcctgaccaagtttcgcaagtttctgcaggagaacgccagtggccgggggaacatgcccatgctctgcccccctgagtacatggtctgcttcttacaccggctgatctctgccctgcgctactattgggatgaatacaaggcttccaatcctcatgcttccttcagtgaggaggcctacatcccgccccaggtcttctataatggcaaggtggactactttgacctgcagcgcctggggggcctcctctcgcacctgcggaagaccctcaaagatgaccttgcttccaaagccaacattgtgatcgacccactggagctccagtcaaccgccatggatgacctagatgaggatgaggagccagccccagctatggcccagcgccccatgcaggccctggctgttggggggccactgcccctgccccggcccggctggctcagttctccaactttgggccgagccaaccgcttcctcagcacagcggctgtgagcctcatgaccccacggcggcctctgagcacctcggagaaagtgaaggtccgcacgctgagcgtggagcagaggacccgtgaggacattgaaggcagccactggaatgagggcttgctgctggggcggccccccgaggagcctgagcagcccctcaccgagaactcgctgctggaagtcctggatggggcggtcatgatgtacaacctcagcgtacaccagcagctgggcaagatggtgggtgtctccgatgatgtcaatgaatacgctatggctctgagggacacagaggacaagctccgccggtgccccaagaggaggaaggacatccttgcagagttgaccaagagccagaaggttttctcagaaaagctggaccacctgagccgccgtcttgcctgggtccatgccactgtctactcccaggagaagatgctggacatctactggctgctgcgcgtctgcctgcggaccattgagcacggtgatcgcacagggtctctctttgccttcatgcccgagttctacctgagcgtggccatcaacagctacagtgctctcaagaattactttggtcccgtgcacagcatggaggagctcccaggtgatggaaccattcaggctgaggcagaagcagaaaaggggtctctagtgtgagccctaggagccctggtctgagacctctgtggcccagcaacacacttctgtggggggcggggaggggaggagcttcctctgtggttcaccctgcagcaaacaaacgtctgcaccctgccct

SEQ ID NO: 177187 - DNA, 4506 bp, Homo sapiens
  Payload ID: 14768
  Gene Symbol: RNF123
  Gene Name: ring finger protein 123
  ENST ID: ENST00000457726
  CDS Start-End: 100-2265
ggacgccgtagccaagaggttgggcggatgttgtgagccgggtcgctgcggccgaggctccggcccccaggaccactggctgcccatgagagatgaaggatggcatccaagggggccggcatgtctttctcccgcaagagctataggctgacctcagatgctgagaaatccagggtcacaggcattgtgcaggagaagctgctgaatgactacctgaaccgcatcttttcctcttctgaacatgcacccccagcagccaccagcaggaaacccctgaacttccagaacctgccagaacatttggaccagttgctacaggtggacaatgaggaggaggaaagccagggacaggttgaagggcggcttggcccatccactgtggtcctggaccacacaggcggctttgaggggcttctcctggtggatgatgacctgctgggggtgattggacacagcaactttggcaccatccgctctaccacatgcgtgtacaaagggaaatggctctacgaggtcctcatctcctcccaggggctcatgcagatcggctggtgcaccatcagctgccgcttcaaccaggaggagggggttggagatacacacaactcctatgcctatgatggcaaccgcgtgcgcaagtggaatgtgaccacaacgaattatggcaaggcgtgggcagcgggggacatcgtgagctgcctgattgacctggatgatggcactctgtccttctgcctgaacggtgtatcactgggcactgcctttgagaacctgtccaggggcctgggtatggcctacttcccagccatcagcctctctttcaaggagtccgtggccttcaactttggcagccgtcctctgcgctacccagtggcaggctaccggcccctgcaggacccaccgagtgctgacctggtgcgggcacagaggttgctgggctgcttccgggcagtgctgagtgtggagctggaccctgtggaggggcggctgttggacaaggagagctccaagtggcggttgcggggccagcccaccgtcctcctcacactggcccacatcttccatcactttgcaccgcttctgcgcaaggtgtatctggtggaggctgtgctcatgagcttcttgctgggcatcgtggagaagggcacacccacacaggcacagtccgtggtgcaccaggtcctggacctcttgtggctcttcatggaggactacgaggtacaagattgcctcaagcagttgatgatgtctctgcttcggctgtaccgattctcacccattgtcccagacctgggcctacagatccattacctgcggctcactatcgccatcctgaggcatgagaagtcccgcaagtttctgcttagcaatgtcctcttcgacgtgctccgctccgtcgtcttcttttacatcaagagccccctgcgtgtggaggaggccggcctgcaggagctcattcccaccacctggtggccccactgctccagtagggagggcaaagagagcacggagatgaaggaggagaccgcagaggagcggctgcggcggcgagcctacgaacggggctgtcagcggctcaggaagcgcatcgaagtggtggaagaactacaggtccagatcctgaagctgctgctggacaataaagatgacaatgggggtgaagcttctaggtatatcttcctgaccaagtttcgcaagtttctgcaggagaacgccagtggccgggggaacatgcccatgctctgcccccctgagtacatggtctgcttcttacaccggctgatctctgccctgcgctactattgggatgaatacaaggcttccaatcctcatgcttccttcagtgaggaggcctacatcccgccccaggtcttctataatggcaaggtggactactttgacctgcagcgcctggggggcctcctctcgcacctgcggaagaccctcaaagatgaccttgcttccaaagccaacattgtgatcgacccactggagctccagtcaaccgccatggatgacctagatgaggatgaggagccagccccagctatggcccagcgccccatgcaggccctggctgttggggggccactgcccctgccccggcccggctggctcagttctccaactttgggccgagccaaccgcttcctcagcacagcggctgtgagcctcatgaccccacggcggcctctgagcacctcggagaaagtgaaggtccgcacgctgagcgtggagcagaggacccgtgaggacagtagttgaaggcagccactggaatgagggcttgctgctggggcggccccccgaggagcctgagcagcccctcaccgagaactcgctgctggaagtcctggatggggcggtcatgatgtacaacctcagcgtacaccagcagctgggcaagatggtgggtgtctccgatgatgtcaatgaatacgctatggctctgagggacacagaggacaagctccgccggtgccccaagaggaggaaggacatccttgcagagttgaccaagagccagaaggttttctcagaaaagctggaccacctgagccgccgtcttgcctgggtccatgccactgtctactcccaggagaagatgctggacatctactggctgctgcgcgtctgcctgcggaccattgagcacggtgatcgcacagggtctctctttgccttcatgcccgagttctacctgagcgtggccatcaacagctacagtgctctcaagaattactttggtcccgtgcacagcatggaggagctcccaggtgatggaaccattcaggctgaggcagaagcagaaaaggggtctctagtgtgagccctaggagccctggtctgagacctctgtggcccagcaacacacttctgtggggggcggggaggggaggagcttcctctgtggttcaccctgcagcaaacaaacgtctgcaccctgccctgggacctgcagccacagagccaacagctccctagcaaaggaaaacagacaagatggaacacggctatgaagagaccctgacccgcctggctgccattctcgccaaacactttgccgacgcacgcattgtgggcactgacatccgagactcactgatgcaggccctggccagctacgtgtgctacccacactccctgcgggctgtggagcgaatccccgaggagcagcgtatcgccatggtgaggaacctcctggcgccctatgagcagcggccctgggcccagaccaactggatcctggtgcggctctggaggggctgtggcttcgggtaccgctatacacggctgccacatctgctgaaaaccaaacttgaggacgccaatttgcccagcctccagaagccctgcccttccaccctgctgcagcagcacatggcggacctcctacagcagggtcctgatgtggcacccagcttcctcaacagcgtcctcaatcagctcaactgggccttctctgaattcattggcatgatccaagagatccagcaggctgctgagcgcctggagcggaactttgtggacagccggcagctcaaggtatgtgccacctgctttgacctctcggtcagcctgctgcgtgtcttggagatgactatcacactggtgcctgagatattccttgactggacccggcctacctctgagatgctgctgcggcgtcttgcacagctgctaaaccaggtgctgaaccgggtgacagctgagaggaacctgtttgatcgtgtggtcaccctacggctgcctggcctagagagcgtggaccactatcccattctggtggcagtgacgggcatcctggtgcagctcctggtgcgtggcccagcctcagagagagagcaagccacatcagtgctcctggcagatccctgcttccagctacgctcaatatgctatctcctgggacagccagagcccccagcacctggcactgctctgccagcccctgaccggaagcgcttctccctgcagagctatgcggattatatcagtgccgatgagctggcccaagtggaacagatgctggcgcacctgacctctgcatctgcccaggcagcagctgcctccctgcccaccagtgaggaggacctctgccccatctgctatgcccaccccatctctgctgtgttccagccctgtggccacaagtcctgcaaagcctgtatcaaccagcacctgatgaacaacaaggactgcttcttctgcaaaaccaccatcgtgtctgtagaggactgggagaagggagccaatacgagtactacctcctcagctgcctagccctcacagcctgtgccatcctggaacctccacctttgaacccagagccaggctgggccctatttatgagctccctttgcccttctcctgtatcccacaccaccacatccaacctccttgcctgcctgtatcctcattggtgggagcccagccatggccctaattgtgcctgagcttgactttcagtcagggccacagtgagcattaaattattattccata

SEQ ID NO: 177188 - DNA, 531 bp, Homo sapiens
  Payload ID: 14768
  Gene Symbol: RNF123
  Gene Name: ring finger protein 123
  ENST ID: ENST00000454491
  CDS Start-End: 303-531
aagaggttgggcggatgttgtgagccgggtcgctgcggccgaggctccgggtgagtgaggggcggcagggctctgagcctggcgggttccggctattcccttcgcggtccgggctagtccagtgcgagggcacctgcagcgcagggatctgggtgcgaaactccgagcggaagctggtctggcaggtcctgtggagcttggggccaggcgggggcgacttgggggagccatgcgccgccctcgccgtccttgggctcccagacggacccccaggaccactggctgcccatgagagatgaaggatggcatccaagggggccggcatgtctttctcccgcaagagctataggctgacctcagatgctgagaaatccagggtcacaggcattgtgcaggagaagctgctgaatgactacctgaaccgcatcttttcctcttctgaacatgcacccccagcagccaccagcaggaaacccctgaacttccagaacctgccagaacatttggaccagttgctacaggtggacaatg

SEQ ID NO: 177189 - DNA, 442 bp, Homo sapiens
  Payload ID: 14768
  Gene Symbol: RNF123
  Gene Name: ring finger protein 123
  ENST ID: ENST00000444689
  CDS Start-End: 1-78
ctgacccgcctggctgccattctcgccaaacactttgccgacgcacgcattgtgggcactggcgtatcgccatggtgaggaacctcctggcgccctatgagcagcggccctgggcccagaccaactggatcctggtgcggctctggaggggctgtggcttcgggtaccgctatacacggctgccacatctgctgaaaaccaaacttgaggacgccaatttgcccagcctccagaagccctgcccttccaccctgctgcagcagcacatggcggacctcctacagcagggtcctgatgtggcacccagcttcctcaacagcgtcctcaatcagctcaactgggccttctctgaattcattggcatgatccaagagatccagcaggctgctgagcgcctggagcggaactttgtggacagccggcagctcaaggtatgtgccac

SEQ ID NO: 177190 - DNA, 1555 bp, Homo sapiens
  Payload ID: 14768
  Gene Symbol: RNF123
  Gene Name: ring finger protein 123
  ENST ID: ENST00000433785
  CDS Start-End: 54-1334
tgggacctgcagccacagagccaacagctccctagcaaaggaaaacagacaagatggaacacggctatgaagagaccctgacccgcctggctgccattctcgccaaacactttgccgacgcacgcattgtgggcactgacatccgagactcactgatgcaggccctggccagctacgtgtgctacccacactccctgcgggctgtggagcgaatccccgaggagcagcgtatcgccatggtgaggaacctcctggcgccctatgagcagcggccctgggcccagaccaactggatcctggtgcggctctggaggggctgtggcttcgggtaccgctatacacggctgccacatctgctgaaaaccaaacttgaggacgccaatttgcccagcctccagaagccctgcccttccaccctgctgcagcagcacatggcggacctcctacagcagggtcctgatgtggcacccagcttcctcaacagcgtcctcaatcagctcaactgggccttctctgaattcattggcatgatccaagagatccagcaggctgctgagcgcctggagcggaactttgtggacagccggcagctcaaggtatgtgccacctgctttgacctctcggtcagcctgctgcgtgtcttggagatgactatcacactggtgcctgagatattccttgactggacccggcctacctctgagatgctgctgcggcgtcttgcacagctgctaaaccaggtgctgaaccgggtgacagctgagaggaacctgtttgatcgtgtggtcaccctacggctgcctggcctagagagcgtggaccactatcccattctggtggcagtgacgggcatcctggtgcagctcctggtgcgtggcccagcctcagagagagagcaagccacatcagtgctcctggcagatccctgcttccagctacgctcaatatgctatctcctgggacagccagagcccccagcacctggcactgctctgccagcccctgaccggaagcgcttctccctgcagagctatgcggattatatcagtgccgatgagctggcccaagtggaacagatgctggcgcacctgacctctgcatctgcccaggcagcagctgcctccctgcccaccagtgaggaggacctctgccccatctgctatgcccaccccatctctgctgtgttccagccctgtggccacaagtcctgcaaagcctgtatcaaccagcacctgatgaacaacaaggactgcttcttctgcaaaaccaccatcgtgtctgtagaggactgggagaagggagccaatacgagtactacctcctcagctgcctagccctcacagcctgtgccatcctggaacctccacctttgaacccagagccaggctgggccctatttatgagctccctttgcccttctcctgtatcccacaccaccacatccaacctccttgcctgcctgtatcctcattggtgggagcccagccatggccctaattgtgcctgagcttgactttcagtcagggccacagtgagcattaaattattattccat

SEQ ID NO: 177191 - DNA, 207 bp, Homo sapiens
  Payload ID: 14768
  Gene Symbol: RNF123
  Gene Name: ring finger protein 123
  ENST ID: ENST00000629802
  CDS Start-End: 1-207
atggcatccaagggggccggcatgtctttctcccgcaagagctataggctgacctcagatgctgagaaatccagggtcacaggcattgtgcaggagaagctgctgaatgactacctgaaccgcatcttttcctcttctgaacatgcacccccagcagccaccagcaggcagcccccctgtgagctcaggggaaaggatgggatttag

SEQ ID NO: 177192 - DNA, 6020 bp, Homo sapiens
  Payload ID: 14769
  Gene Symbol: RNF125
  Gene Name: ring finger protein 125, E3 ubiquitin protein ligase
  Uniprot ID: Q96EQ8
  ENST ID: ENST00000217740
  CDS Start-End: 493-1191
aggtcatttttgcagcttattgtgatgacaacagtggaggatggtcttccacttcaccttaaaagcggctgttctctgattatcattaagcatggccacgcccgcacttaacttctgacagtggggaaagcagctgtgtgtgatagcttggaaggtttactgctgcctcaagtcctcttctctgcagttgaggtttcaggtttcaatcctcccaataccacaagacagagcacggggcggctgccgcctccgcctccgcgccttaacctaggcggcttgccgaagatctcagccccgcggccgcgcgctcgccctgccctagaccagggttgggcgcagcggcggaggtggcttctgggctgcgcgagctgggagagctgggaggcggcgatcgcagctgggccgggacttccttcctccaccgcacggcaacaaaacaaccctgcggcaggcactgagtgcttcgcagctgtctgggcgagaggcacagcgatgggctccgtgctgagcaccgacagcggcaaatcggcgcccgcctctgccaccgcgcgggccctggagcgcaggagggacccggagttgcccgtcacgtccttcgactgcgccgtgtgccttgaggtgttacaccagcctgtccggacccgctgtggccacgtattctgccgttcctgtattgctaccagtctaaagaacaacaagtggacctgtccttattgccgggcatatcttccttcagaaggagttccagcaactgatgtagccaaaagaatgaaatcagagtataagaactgcgctgagtgtgacaccctggtttgcctcagtgaaatgagggcacatattcggacttgtcagaagtacatagataagtatggaccactacaagaacttgaggagacagcagcaaggtgtgtatgtcccttttgtcagagggaactgtatgaagacagcttgctggatcattgtattactcatcacagatcggaacggaggcctgtgttctgtccactttgccgtttaatacccgatgagaatccaagcagcttcagtggcagtttaataagacatctgcaagttagtcacactttgttttatgatgatttcatagattttaatataattgaggaagctcttatccgaagagtcttagaccggtcacttcttgaatatgtgaatcactcgaacaccacataattttattaaaacgaagggaaaagggaccactgaattgcaccatttaagatgctgcttgaacaaatgggagggaagttgtcaatgattgatgggcaaaaatgtacaacacagttatgtgtttgtccatgtttattgttatagtgcatttaaaaactgctttaattttaatggtttaaatctgttttacatccttgagattcttacacatctaacaacaaaaaaaattatctacatcagtcattgttacatggaaaagacaggtggtaggcaagtaggtggaggatctcggtttgcaaattagataatactctgtgtataatgctacatatcaataactaccatcatggttaggcacgataactaatctttgttctgtgtaaaaaaatatggagagtgaaacaaagtgcagacattcaaagaaataagaaatctgctccaatgctcttgttctaatctctaataggttaacgttaataatcttgtatgggagttggaaaggaaaattttggaagtcaagaaagtccatttaggccggacgcggtggcttacgcttgtaatcccagcactttgggaggctgaagcaggcggatcacaaggtcaggagttcgagaccagcctggccaacactggtctctgtgaaactccgtctctactaaaaatacaaaaattagctggacgtgttggcgggcatctgtaataccagctacttgggaggctgaggcagaagaatcacttgaacccgggaggcagaggttacagtgagctgagatcgcaccagtacactccagcctgggtaacagagctagactccatctcaaaaaaaaaaaaaaaaaaaatccatttaaccaaattgtcttacataatactgtaacaaaacaaattttgtgttagaaaagtatacttaattctttgactttttataactgcatacataagaattcaatatttttcaaatatttatagcttatttagaaatatttctataatataagcaatttcttaaaaaccatcagatgatacttacagtataagtattcacatccagactttttagtagaaaaccctaagggctttgatatcttttttgattgtaacattttaaaaattatgaaataaaagtactgaaaaccagacacaaaatttatagctgaatgccttattataaggaaatactcttttaggactcagccagtcaccccacgtgtcctttttgtgtcctgtcacaattacaaccccacaaaagtaactgctagactgatttaaatggtaatcactttgttgcatttgattactgctgccacacctaaatgcatatatctatattttaatattatcaatttaaagttgttattaaatgtatattttattttacatctcttttttaatctagaagttcctccttctttccagttccttaaaatttacctggtgaagaacctgatcctaggacctatagagtttcccatactttgtattttgctgattgcacactcatggcacggttcagcacattgccctgtcctctcgatattagcacacagtgcaggttcaggcacattgaatttgagaagacttaggttcagtcctttggcaagactgtaaatcacggtgtctttctttccttcctccttcttctctctctctctctctctctctttccttttctttctctttttttcagagttgcactctgttgcccaggctggagtacagtggcacgatctcgactcactgcaacctccatctcccgggttcaagcagttctcctgtttcagcctcccaagtagctgggactacaggtgcacgccaccatgcccggctaatttttgtatttttagtagaggggtttcaccataatggtcaggctggtcttgaactcctgaactcaagtgatccaccagccttggcctcccaaaatgctgggattacaggcatgagccaccatgcccagctaatttttgtatttttagtagagacagggtttcaccataatagccaggctggtctcaaactccttaccttgtgatccgcccacctcagccttccaaagtgctgggattataggcgtgagccactgtgcccggcctacagggtttttatctaacctttctgttacaactgtacctctccttctgtactgaaagtcctggttttcaagaacacagggcacgatagaattagaacatcccacaattactcatttcttttatttatcttacacttacagctgtctcagaataacaatagaaatacaaccacaaataatatggcaattgaaacaattaaaaagttttcatttgcttttctcattctttcccaatttttttttttttttgagatggagtctcgcgctcttgttgcccaggctggagtgcaatggcacgatctcggctcactgcaacctctgcctcctggattcaagcaattctcctgcctcagcttcccgagtagctgggattataggcatgcgccaccacgccctgctaattttgtatttttagtagagtcaggatttctccacattggtcaggctggcctcaaactctcgacctcaggtgatccgcctgcctcggcctcccaaagtgctgggattacaggtgtgagccactgcgcccgacatcccaatttttaaaatagttatactatgtcaacattttcagaacatactggtatagcatactgtactttcttccttttatcccccatttattcttagttcttcaactatatatttaacacttgcccccagttttgttttgttttgttttgaggaggaatcttgctctgttgcccaggctggagtgcagtggtgtgatcttggctcactgcaacctccgcctcccgggttcaagtgattctcctgcctcagcctctcgagtagctgggattacaagtgggcaccaccacacccggctaattgttgtatttttagtagagatgggttttgccatgttggccaggctggttttgaactcctgacctcaagtgatccacctgtgttggcctcctaaagtactgggattacaggtgtgtgccaccgcgccaggcaattgcccccagtttttatttgatggctctgactgtttctcatatctgactctttaattatgaatccagggcatagattagtatctccatcttgtaaggatgcaaagaagccatgaaaataagtaatatcaactcctgaggataaaacgttacttgactagagttagctttttaattgtaatcatttataaacttctttgttccttacatataagcatagtcataaccatggtacccaaaattttctataagttattgtaactccttaaaggtcttgctacagttcttttatccagtacaaataattgggaaaatgtaaagctgaatgaaatctagtgagcctcatatcctcccttttagatattgattttaagtttgcttttcacagctgctaaaaagtaacaactgatttttagttccacaacctctctttcttcaatttagatggatcatacaataaagcaaaatctggctggttacagtggctcacacctataatcccagcactttgggaggctgaggtggagggtctcatgagcccaggagttcaagaccaacctgggcaatatagtgagactctttctatttaaacaaaaacaaaaacaaacaaacaaacaaacaaaaagctgggcatgatgcacacctttagtttcagctactaaggaggctgaggttggaggatcacttgagcctaggaggtcaacactgcagtgagctatgatcatgctactgccctccagcctgggcaacagagcaagaccctgtctccaaaaacataaataattaaatataaataaaaataaagcaaaatctgttgggaaacgagaaaaaggagaggaatttttcaggaataatcataaaaagaaatgatcatcagactgaaagtccagagcctgagaaatgaaaacatatttttaagcattggtgttgaccatgcagacaaacttttgttaattcagagcgatacaaaaggcactttgaatctataaaacttgaaaaagttaaaaattgtatgtcggataaagctttaagtcatctgtcactattaacctcagtgcagcaattctgactcctgtgcctggattccttttatgataattttgccacctacaggacagattaggtgctggtcgcctgaattattttgtgttctgaattattttgagctctaaaatggtaaagtacaaatactcattgttttactgtgcctttggccttttataaaaaggtatttataattcgttgataaaaaccaatatttgaagctgttgattaccaacaaaaaagtttcactctctttatagtgcttcaggatacaactttttcagggccttattagagaaaaactgattcacatgttattcttctaaagctaaattattaaaatgtaggttgaaagattggattgattgtgaatctacactaaagatatggttccaggcagacctccttagagacctccaggcagacctccttactgtcttcagtgatgtttaatttcattactgttactgggtgccaagtgtctttcatttggaagtgaacttactccagttattgaatgtttatcatatcataatttgcatttttccaacattgaaggtattttaaaaagtcactaagagattcattcttttattattcaactacaaaaaaatagtgtaatgatcagaatttaaaatgtgtgattctttttcttctgtaagtatgtattgctatgataaataaaaaatggcaggaccattgtttttattaaaatatctactgtgtctattcttaaa

SEQ ID NO: 177193 - DNA, 416 bp, Homo sapiens
  Payload ID: 14769
  Gene Symbol: RNF125
  Gene Name: ring finger protein 125, E3 ubiquitin protein ligase
  ENST ID: ENST00000580209
  CDS Start-End: 1-121
tcttccttcagaaggagttccagcaactgatgtagccaaaagaatgaaatcagagtataagaactgcgctgagtgtgacaccctggtgtgtatgtcccttttgtcagagggaactgtatgaagacagcttgctggatcattgtattactcatcacagatcggaacggaggcctgtgttctgtccactttgccgtttaatacccgatgagaatccaagcagcttcagtggcagtttaataagacatctgcaagttagtcacactttgttttatgatgatttcatagtaagtatattttcttatttttacattatgttttcatgctgtcttgttaagcttacctttccgatccaagtgaataaaattatagaggaaaaaatgtgtatatagctatagtgttgagtattagcattaagt

SEQ ID NO: 177194 - DNA, 1694 bp, Homo sapiens
  Payload ID: 14770
  Gene Symbol: RNF126
  Gene Name: ring finger protein 126
  Uniprot ID: Q9BV68
  ENST ID: ENST00000292363
  CDS Start-End: 157-1092
cgcagctttcgccgctcccgcgcccccgctccgccccgcgtgccgtgcgtgccgtgcgtgagcgtgcgcgggcgcgtcggccggcgagggagcagcaaacggccggcggcgggtgccgcgcggggggcgggcggcgcggagtaggtggcggcggccatggccgaggcgtcgccgcatcccggacggtacttctgccactgctgctccgtggagatcgtcccgcgcctgccggattatatctgtccaagatgcgagtctggttttatcgaggagcttccggaagagaccaggagcacagaaaatggttctgccccctccacagctcccacagaccagagccggccaccgttggagcacgtggaccagcacctgttcacgctgccgcagggctacggacagtttgctttcggcatcttcgatgacagcttcgagatccccacgttccctcctggggcgcaggctgacgacggcagggaccctgagagccggcgggagagagaccatccgtcccggcaccggtacggcgcccgacagccccgcgcccgcctcaccacgcggcgggccaccggccggcacgaaggcgtccccacgctggaagggatcatccagcagctcgtcaacggcatcatcacgcccgccaccatccccagcctgggcccctggggagtcctgcactcaaaccctatggactacgcctggggggccaacggcctggatgccatcatcacacagctcctcaatcagtttgaaaacacaggccccccaccggcagataaagagaaaatccaggccctccccaccgtccccgtcactgaggagcacgtaggctccgggctcgagtgccctgtgtgcaaggacgactacgcgctgggtgagcgtgtgcggcagctgccctgcaaccacctgttccacgacggctgcatcgtgccctggctggagcagcacgacagctgccccgtctgccgaaaaagcctcacgggacagaacacggccacgaacccccctggcctcactggggtgagcttctcctcctcgtcgtcatcgtcctcctccagctcgcccagcaacgagaacgccacaagcaactcgtgagcccacgtcggccgtcgggaaagcacggggcctttcccacccaccctcagccagcgccacacggcacccacagactgggtgccccggcggcgccacgcttggctggtcagcgctgcaggtcccgcctgttccagggcaggacccgggcccggcccaccggccccctggcttgggaaggcgtgggccacatggtcccctctggggcgtccccagcctccccgtcctctgtctaacctcaccctctaaacgttcagcggtggaaagatttttataattttaaattattactgctttgaaataaacggacgtttgagctcacgtggcggccatgcatggtttgtggcggaagacggggcccagcggctcccccagcgctgaagcacggggttcagcggctcccccagtgctgcaggtgccgccaggacgggccacgtgggcccccagcctccccctcggccgcctccacgacccggagtaggggggctcgggaccatgaggatgaccagcaaaattcaagaacaaaactgctccaacagacttttttaaaggaaaaaatatgtgtatcttgaaagctatttaaaatacactacttacaaagagaa

SEQ ID NO: 177195 - DNA, 963 bp, Homo sapiens
  Payload ID: 14770
  Gene Symbol: RNF126
  Gene Name: ring finger protein 126
  ENST ID: ENST00000589762
  CDS Start-End: 113-963
gtgcgtgccgtgcgtgagcgtgcgcgggcgcgtcggccggcgagggagcagcaaacggccggcggcgggtgccgcgcggggggcgggcggcgcggagtaggtggcggcggccatggccgaggcgtcgccgcatcccggacggtacttctgccactgctgctccgtggagatcgtcccgcgcctgccggattatatctgtccaagatgcgagtctggttttatcgaggagcttccggaagagaccaggagcacagaaaatggttctgccccctccacagctcccacagaccagagccggccaccgttggagcacgtggaccagcacctgttcacgctgccgcagggctacggacagtttgctttcggcatcttcgatgacagcttcgagatccccacgttccctcctggggcgcaggctgacgacggcagggaccctgagagccggcgggagagagaccatccgtcccggcaccggatcatccagcagctcgtcaacggcatcatcacgcccgccaccatccccagcctgggcccctggggagtcctgcactcaaaccctatggactacgcctggggggccaacggcctggatgccatcatcacacagctcctcaatcagtttgaaaacacaggccccccaccggcagataaagagaaaatccaggccctccccaccgtccccgtcactgaggagcacgtaggctccgggctcgagtgccctgtgtgcaaggacgactacgcgctgggtgagcgtgtgcggcagctgccctgcaaccacctgttccacgacggctgcatcgtgccctggctggagcagcacgacagctgccccgtctgccgaaaaagcctcacgggacagaacacggccacgaacccccctggcctcactggggtgagcttctcctcctcgtcgtcatcgtcctcctccagctcgcccagcaacgagaacgccacaagcaactc

SEQ ID NO: 177196 - DNA, 1671 bp, Homo sapiens
  Payload ID: 14770
  Gene Symbol: RNF126
  Gene Name: ring finger protein 126
  ENST ID: ENST00000605891
  CDS Start-End: 74-298
gcgagggagcagcaaacggccggcggcgggtgccgcgcggggggcgggcggcgcggagtaggtggcggcggccatggccgaggcgtcgccgcatcccggacggtacttctgccactgctgctccgtggagatcgtcccgcgcctgccggattatatctgtccaagatgcgagtctggttttatcgaggagcttccggaagagaccaggagcacagaaaatggttctgccccctccacagctcccacagaccagagccggccaccgttggagcgcccccagcagactgcacgggcctgagcccccgaggtcacgcccccctcctctccccagcacgtggaccagcacctgttcacgctgccgcagggctacggacagtttgctttcggcatcttcgatgacagcttcgagatccccacgttccctcctggggcgcaggctgacgacggcagggaccctgagagccggcgggagagagaccatccgtcccggcaccggtacggcgcccgacagccccgcgcccgcctcaccacgcggcgggccaccggccggcacgaaggcgtccccacgctggaagggatcatccagcagctcgtcaacggcatcatcacgcccgccaccatccccagcctgggcccctggggagtcctgcactcaaaccctatggactacgcctggggggccaacggcctggatgccatcatcacacagctcctcaatcagtttgaaaacacaggccccccaccggcagataaagagaaaatccaggccctccccaccgtccccgtcactgaggagcacgtaggctccgggctcgagtgccctgtgtgcaaggacgactacgcgctgggtgagcgtgtgcggcagctgccctgcaaccacctgttccacgacggctgcatcgtgccctggctggagcagcacgacagctgccccgtctgccgaaaaagcctcacgggacagaacacggccacgaacccccctggcctcactggggtgagcttctcctcctcgtcgtcatcgtcctcctccagctcgcccagcaacgagaacgccacaagcaactcgtgagcccacgtcggccgtcgggaaagcacggggcctttcccacccaccctcagccagcgccacacggcacccacagactgggtgccccggcggcgccacgcttggctggtcagcgctgcaggtcccgcctgttccagggcaggacccgggcccggcccaccggccccctggcttgggaaggcgtgggccacatggtcccctctggggcgtccccagcctccccgtcctctgtctaacctcaccctctaaacgttcagcggtggaaagatttttataattttaaattattactgctttgaaataaacggacgtttgagctcacgtggcggccatgcatggtttgtggcggaagacggggcccagcggctcccccagcgctgaagcacggggttcagcggctcccccagtgctgcaggtgccgccaggacgggccacgtgggcccccagcctccccctcggccgcctccacgacccggagtaggggggctcgggaccatgaggatgaccagcaaaattcaagaacaaaactgctccaacagacttttttaaaggaaaaaatatgtgtatcttgaaagctatttaaaatacactacttacaaagagaa

SEQ ID NO: 177197 - DNA, 2817 bp, Homo sapiens
  Payload ID: 14771
  Gene Symbol: RNF128
  Gene Name: ring finger protein 128, E3 ubiquitin protein ligase
  Uniprot ID: Q8TEB7
  ENST ID: ENST00000255499
  CDS Start-End: 251-1537
gcttcacgctaaagccccagagcccgacgcggcagccgcggtagcggagaagactggagctccgaggagctgcatctgcggcaacctgtgtgctgacgctacgtgcctcctggctccgacgtagctcgcagctccccagtctcactccattccttccccacctggcgcgcacctgctcaagaccagggtcctgccaagcgctaggagggcgcgtgccaggggcgctagggaactgcggagcgcgcgcgccatggggccgccgcctggggccggggtctcctgccgcggtggctgcggcttttccagattgctggcatggtgcttcctgctggccctgagtccgcaggcacccggttcccggggggctgaagcagtgtggaccgcgtacctcaacgtgtcctggcgggttccgcacacgggagtgaaccgtacggtgtgggagctgagcgaggagggcgtgtacggccaggactcgccgctggagcctgtggctggggtcctggtaccgcccgacgggcccggggcgcttaacgcctgtaacccgcacacgaatttcacggtgcccacggtttggggaagcaccgtgcaagtctcttggttggccctcatccaacgcggcgggggctgcaccttcgcagacaagatccatctggcttatgagagaggggcgtctggagccgtcatctttaacttccccgggacccgcaatgaggtcatccccatgtctcacccgggtgcagtagacattgttgcaatcatgatcggcaatctgaaaggcacaaaaattctgcaatctattcaaagaggcatacaagtgacaatggtcatagaagtagggaaaaaacatggcccttgggtgaatcactattcaatttttttcgtttctgtgtccttttttattattacggcggcaactgtgggctattttatcttttattctgctcgaaggctacggaatgcaagagctcaaagcaggaagcagaggcaattaaaggcagatgctaaaaaagctattggaaggcttcaactacgcacactgaaacaaggagacaaggaaattggccctgatggagatagttgtgctgtgtgcattgaattgtataaaccaaatgatttggtacgcatcttaacgtgcaaccatattttccataagacatgtgttgacccatggctgttagaacacaggacttgccccatgtgcaaatgtgacatactcaaagctttgggaattgaggtggatgttgaagatggatcagtgtctttacaagtccctgtatccaatgaaatatctaatagtgcctcctcccatgaagaggataatcgcagcgagaccgcatcatctggatatgcttcagtacagggaacagatgaaccgcctctggaggaacacgtgcagtcaacaaatgaaagtctacagctggtaaaccatgaagcaaattctgtggcagtggatgttattcctcatgttgacaacccaacctttgaagaagacgaaactcctaatcaagagactgctgttcgagaaattaaatcttaaaatctgtgtaaatagaaaacttgaaccattagtaataacagaactgccaatcagggcctagtttctattaataaattggataaatttaataaaataagagtgatactgaaagtgctcagatgactaatattatgctatagttaaatggcttaaaatatttaacctgttaacttttttccacaaactcattataatatttttcataggcaagtttcctctcagtagtgataacaacatttttagacattcaaaactgtcttcaagaagtcacgtttttcatttataacaattttcttataaaaacatgttgcttttaaaatgtggagtagctgtaatcactttattttatgatagtatcttaatgaaaaatactacttctttagcttgggctacatgtgtcagggtttttctccaggtgcttatattgatctggaattgtaatgtaaaaagcaatgcaaacttaggcgagtacttcttgaaatgtctatttaagctgctttaagttaatagaaaagattaaagcaaaatattcatttttactttttcttatttttaaaattaggctgaatgtacttcatgtgatttgtcaaccatagtttatcagagattatggacttaattgattggtatattagtgacatcaacttgacacaagattagacaaaaaattccttacaaaaatactgtgtaactatttctcaaacttgtgggatttttcaaaagctcagtatatgaatcatcatactgtttgaaattgctaatgacagagtaagtaacactaatattggtcattgatcttcgttcatgaattagtctacagaaaaaaaatgttctgtaaaattagtctgttgaaaatgttttccaaacaatgttactttgaaaattgagtttatgtttgacctaaatgggctaaaattacattagataaactaaaattctgtccgtgtaactataaattttgtgaatgcattttcctggtgtttgaaaaagaagggggggagaattccaggtgccttaatataaagtttgaagcttcatccaccaaagttaaatagagctatttaaaaatgcactttatttgtactctgtgtggcttttgttttagaattttgttcaaattatagcagaatttaggcaaaaataaaacagacatgtatttttgtttgctgaatggatgaaaccattgcattcttgtacactgatttgaaatgctgtaaatatgtcccaatttgtattgattctctttaaatataaaatgtaaataaaatattccaataaaa

SEQ ID NO: 177198 - DNA, 2654 bp, Homo sapiens
  Payload ID: 14771
  Gene Symbol: RNF128
  Gene Name: ring finger protein 128, E3 ubiquitin protein ligase
  Uniprot ID: Q8TEB7
  ENST ID: ENST00000324342
  CDS Start-End: 166-1374
atagagctgatgtatccagaggttatgttgctagaggtgagatcagttacctacgtgcaactgaaatttcaaacttctgttcagcagggacgtgagtggacaatggtgactgatagttggaaatatcagcaaacatcttaaattttatactcaaatgaatgagcaatgaaccaggagaataggtccagttttttttggctccttgtaatttttacctttttacttaaaattacagcatctttttcaatgagtgcctatgtgactgtgacttattacaatgaaaccagcaactacactgcaatagagacatgtgaatgtggcgtttatggattagcttcaccagtggctaatgctatgggagtggtaggcatccctaagaacaataactaccaagcttgtgaccacaacactgagtttagtaatactaagaagccctggattgcgctgatagaaagaggtaattgtacattttcagaaaaaattcaaacagcgggcagaagaaatgctgatgctgttgtgatttacaatgctccagagactggcaatcagacgatacagatggcaaattttggtgcagtagacattgttgcaatcatgatcggcaatctgaaaggcacaaaaattctgcaatctattcaaagaggcatacaagtgacaatggtcatagaagtagggaaaaaacatggcccttgggtgaatcactattcaatttttttcgtttctgtgtccttttttattattacggcggcaactgtgggctattttatcttttattctgctcgaaggctacggaatgcaagagctcaaagcaggaagcagaggcaattaaaggcagatgctaaaaaagctattggaaggcttcaactacgcacactgaaacaaggagacaaggaaattggccctgatggagatagttgtgctgtgtgcattgaattgtataaaccaaatgatttggtacgcatcttaacgtgcaaccatattttccataagacatgtgttgacccatggctgttagaacacaggacttgccccatgtgcaaatgtgacatactcaaagctttgggaattgaggtggatgttgaagatggatcagtgtctttacaagtccctgtatccaatgaaatatctaatagtgcctcctcccatgaagaggataatcgcagcgagaccgcatcatctggatatgcttcagtacagggaacagatgaaccgcctctggaggaacacgtgcagtcaacaaatgaaagtctacagctggtaaaccatgaagcaaattctgtggcagtggatgttattcctcatgttgacaacccaacctttgaagaagacgaaactcctaatcaagagactgctgttcgagaaattaaatcttaaaatctgtgtaaatagaaaacttgaaccattagtaataacagaactgccaatcagggcctagtttctattaataaattggataaatttaataaaataagagtgatactgaaagtgctcagatgactaatattatgctatagttaaatggcttaaaatatttaacctgttaacttttttccacaaactcattataatatttttcataggcaagtttcctctcagtagtgataacaacatttttagacattcaaaactgtcttcaagaagtcacgtttttcatttataacaattttcttataaaaacatgttgcttttaaaatgtggagtagctgtaatcactttattttatgatagtatcttaatgaaaaatactacttctttagcttgggctacatgtgtcagggtttttctccaggtgcttatattgatctggaattgtaatgtaaaaagcaatgcaaacttaggcgagtacttcttgaaatgtctatttaagctgctttaagttaatagaaaagattaaagcaaaatattcatttttactttttcttatttttaaaattaggctgaatgtacttcatgtgatttgtcaaccatagtttatcagagattatggacttaattgattggtatattagtgacatcaacttgacacaagattagacaaaaaattccttacaaaaatactgtgtaactatttctcaaacttgtgggatttttcaaaagctcagtatatgaatcatcatactgtttgaaattgctaatgacagagtaagtaacactaatattggtcattgatcttcgttcatgaattagtctacagaaaaaaaatgttctgtaaaattagtctgttgaaaatgttttccaaacaatgttactttgaaaattgagtttatgtttgacctaaatgggctaaaattacattagataaactaaaattctgtccgtgtaactataaattttgtgaatgcattttcctggtgtttgaaaaagaagggggggagaattccaggtgccttaatataaagtttgaagcttcatccaccaaagttaaatagagctatttaaaaatgcactttatttgtactctgtgtggcttttgttttagaattttgttcaaattatagcagaatttaggcaaaaataaaacagacatgtatttttgtttgctgaatggatgaaaccattgcattcttgtacactgatttgaaatgctgtaaatatgtcccaatttgtattgattctctttaaatataaaatgtaaataaaatattccaataaaa

SEQ ID NO: 177199 - DNA, 839 bp, Homo sapiens
  Payload ID: 14771
  Gene Symbol: RNF128
  Gene Name: ring finger protein 128, E3 ubiquitin protein ligase
  ENST ID: ENST00000418562
  CDS Start-End: 92-839
tggaggaggggcaagcaaaggggaatgtagataactaaagtgaaatagagctgatgtatccagaggttatgttgctagagcatctttttcaatgagtgcctatgtgactgtgacttattacaatgaaaccagcaactacactgcaatagagacatgtgaatgtggcgtttatggattagcttcaccagtggctaatgctatgggagtggtaggcatccctaagaacaataactaccaagcttgtgaccacaacactgagtttagtaatactaagaagccctggattgcgctgatagaaagaggtaattgtacattttcagaaaaaattcaaacagcgggcagaagaaatgctgatgctgttgtgatttacaatgctccagagactggcaatcagacgatacagatggcaaattttggtgcagtagacattgttgcaatcatgatcggcaatctgaaaggcacaaaaattctgcaatctattcaaagaggcatacaagtgacaatggtcatagaagtagggaaaaaacatggcccttgggtgaatcactattcaatttttttcgtttctgtgtccttttttattattacggcggcaactgtgggctattttatcttttattctgctcgaaggctacggaatgcaagagctcaaagcaggaagcagaggcaattaaaggcagatgctaaaaaagctattggaaggcttcaactacgcacactgaaacaaggagacaaggaaattggccctgatggagatagttgtgctgtgtgcattgaattgtataaaccaaatgatttggtacgcatcttaacgtgcaaccatattttccataagacat

SEQ ID NO: 177200 - DNA, 2866 bp, Homo sapiens
  Payload ID: 14772
  Gene Symbol: RNF13
  Gene Name: ring finger protein 13
  Uniprot ID: O43567
  ENST ID: ENST00000344229
  CDS Start-End: 703-1848
cccgcccgggggcagcccggcagccgaatcttgggctactctgtcccaacagccggagcagatcagaccgaccggccctgcccgctcggtcccgcgccctccagaccctacggtctccgtttctaggggcacatggttagcggcaggcgcccacagccaatccactttgccagcctgccccttcctctgccaagagcagcttcttcagccgcgctccagttccgcagacgcctgccccaccctgctcttcccttccagggaagacggatcacgcggccaagaacgagactcgcaaactgggcatttctccgagccgggctagagcaagtagcgagactccgcgtgagagtgggaaagagccttaacaggcaaccatgttgcccagtgggttttctgtgcctttgggtgcggaccaatgaggcgcgtggggcgggacttccgcttcgcctaggtgttgtcgtccctgctagtactccgggctgtgggggtcggtgcggatattcagtcatgaaatcagggtagggacttctcccgcagcgacgcggctggcaagactgtttgtgttgcgggggccggacttcaagagagaaagagagagtgggcagacatcgaagccaaacagcagtatcccggaagcactcatgcaactttggtggcggccactcagttttctctgccagtgtctggtgattttacaacgagatgctgctctccatagggatgctcatgctgtcagccacacaagtctacaccatcttgactgtccagctctttgcattcttaaacctactgcctgtagaagcagacattttagcatataactttgaaaatgcatctcagacatttgatgacctccctgcaagatttggttatagacttccagctgaaggtttaaagggttttttgattaactcaaaaccagagaatgcctgtgaacccatagtgcctccaccagtaaaagacaattcatctggcactttcatcgtgttaattagaagacttgattgtaattttgatataaaggttttaaatgcacagagagcaggatacaaggcagccatagttcacaatgttgattctgatgacctcattagcatgggatccaacgacattgaggtactaaagaaaattgacattccatctgtctttattggtgaatcatcagctaattctctgaaagatgaattcacatatgaaaaagggggccaccttatcttagttccagaatttagtcttcctttggaatactacctaattcccttccttatcatagtgggcatctgtctcatcttgatagtcattttcatgatcacaaaatttgtccaggatagacatagagctagaagaaacagacttcgtaaagatcaacttaagaaacttcctgtacataaattcaagaaaggagatgagtatgatgtatgtgccatttgtttggatgagtatgaagatggagacaaactcagaatccttccctgttcccatgcttatcactgcaagtgtgtagacccttggctaactaaaaccaaaaaaacctgtccagtgtgcaagcaaaaagttgttccttctcaaggcgattcagactctgacacagacagtagtcaagaagaaaatgaagtgacagaacatacccctttactgagacctttagcttctgtcagtgcccagtcatttggggctttatcggaatcccgctcacatcagaacatgacagaatcttcagactatgaggaagacgacaatgaagatactgacagtagtgatgcagaaaatgaaattaatgaacatgatgtcgtggtccagttgcagcctaatggtgaacgggattacaacatagcaaatactgtttgactttcagaagatgattggtttatttccctttaaaatgattaggtatatactgtaatttgattttttgctcccttcaaagatttctgtagaaataacttattttttagtattctacagtttaatcaaattactgaaacaggacttttgatctggtatttatctgccaagaatatacttcattcactaataatagactggtgctgtaactcaagcatcaattcagctcttcttttggaatgaaagtatagccaaaacataaaaaaaaaaaaatcctcagtatagcttgcaattaagacctagatcacagtatttaagtgttttgcgttttatacatgaggtcagtgctacagccacctagcatgaactaacccagcttccacctccataaagttacctagagttgttgagttggaatatgttctggcatttacctgacctgccaatcattagggagaggcaacaaggtaattcagcctttcctcctatcagcacaaagaaactcaaagctgttttttccctttctgttccaaagcagtcttatcctgacaggagcggtctatactagtgcagatttcaacacttttttttaacgttttaattactatagtgttatgtagagatttgattgagcagctaatgtttctgaactttacttactaattttcagtgtccttaagggttctgtagtgttatcaaagcaaaaagaaaatgctgcataaaaataccaaacttcagcaactgttaatactcagatcatatacctcttaataaatagcatcttatgctaattagccctgctaaactatgtacagaggaaactgttcaagtattggatttgaaagtaagtgacttatgtttaacagaactaatgatgtattgaaacactgtattatgaaaagctaaattatacatcattgtaactatgtagaaagtgtagactaatgtataatcaaaatgctaaggatttttatatggccttgtatgaggggagtttgaatgttaataaacatgttttcca

SEQ ID NO: 177201 - DNA, 1939 bp, Homo sapiens
  Payload ID: 14772
  Gene Symbol: RNF13
  Gene Name: ring finger protein 13
  Uniprot ID: O43567
  ENST ID: ENST00000361785
  CDS Start-End: 129-917
agtgcctccaccagtaaaagacaattcatctggcactttcatcgtgttaattagaagacttgattgtaattttgatataaaggttttaaatgcacagagagcaggatacaaggcagccatagttcacaatgttgattctgatgacctcattagcatgggatccaacgacagtaagtacagttgaggtactaaagaaaattgacattccatctgtctttattggtgaatcatcagctaattctctgaaagatgaattcacatatgaaaaagggggccaccttatcttagttccagaatttagtcttcctttggaatactacctaattcccttccttatcatagtgggcatctgtctcatcttgatagtcattttcatgatcacaaaatttgtccaggatagacatagagctagaagaaacagacttcgtaaagatcaacttaagaaacttcctgtacataaattcaagaaaggagatgagtatgatgtatgtgccatttgtttggatgagtatgaagatggagacaaactcagaatccttccctgttcccatgcttatcactgcaagtgtgtagacccttggctaactaaaaccaaaaaaacctgtccagtgtgcaagcaaaaagttgttccttctcaaggcgattcagactctgacacagacagtagtcaagaagaaaatgaagtgacagaacatacccctttactgagacctttagcttctgtcagtgcccagtcatttggggctttatcggaatcccgctcacatcagaacatgacagaatcttcagactatgaggaagacgacaatgaagatactgacagtagtgatgcagaaaatgaaattaatgaacatgatgtcgtggtccagttgcagcctaatggtgaacgggattacaacatagcaaatactgtttgactttcagaagatgattggtttatttccctttaaaatgattaggtatatactgtaatttgattttttgctcccttcaaagatttctgtagaaataacttattttttagtattctacagtttaatcaaattactgaaacaggacttttgatctggtatttatctgccaagaatatacttcattcactaataatagactggtgctgtaactcaagcatcaattcagctcttcttttggaatgaaagtatagccaaaacataaaaaaaaaaaaatcctcagtatagcttgcaattaagacctagatcacagtatttaagtgttttgcgttttatacatgaggtcagtgctacagccacctagcatgaactaacccagcttccacctccataaagttacctagagttgttgagttggaatatgttctggcatttacctgacctgccaatcattagggagaggcaacaaggtaattcagcctttcctcctatcagcacaaagaaactcaaagctgttttttccctttctgttccaaagcagtcttatcctgacaggagcggtctatactagtgcagatttcaacacttttttttaacgttttaattactatagtgttatgtagagatttgattgagcagctaatgtttctgaactttacttactaattttcagtgtccttaagggttctgtagtgttatcaaagcaaaaagaaaatgctgcataaaaataccaaacttcagcaactgttaatactcagatcatatacctcttaataaatagcatcttatgctaattagccctgctaaactatgtacagaggaaactgttcaagtattggatttgaaagtaagtgacttatgtttaacagaactaatgatgtattgaaacactgtattatgaaaagctaaattatacatcattgtaactatgtagaaagtgtagactaatgtataatcaaaatgctaaggatttttatatggccttgtatgaggggagtttgaatgttaataaacatgttttccacttt

SEQ ID NO: 177202 - DNA, 2843 bp, Homo sapiens
  Payload ID: 14772
  Gene Symbol: RNF13
  Gene Name: ring finger protein 13
  Uniprot ID: O43567
  ENST ID: ENST00000392894
  CDS Start-End: 663-1808
ctctttagtaggtcgggtgagtgtagtgtgcagggaagagacgcgtcagcgccagggccaggcccgcccgggggcagcccggcagccgaatcttgggctactctgtcccaacagccggagcagatcagaccgaccggccctgcccgctcggtcccgcgccctccagaccctacggtctccgtttctaggggcacatggttagcggcaggcgcccacagccaatccactttgccagcctgccccttcctctgccaagagcagcttcttcagccgcgctccagttccgcagacgcctgccccaccctgctcttcccttccagggaagacggatcacgcggccaagaacgagactcgcaaactgggcatttctccgagccgggctagagcaagtagcgagactccgcgtgagagtgggaaagagccttaacaggcaaccatgttgcccagtgggttttctgtgcctttgggtgcggaccaatgaggcgcgtggggcgggacttccgcttcgcctaggtgttgtcgtccctgctagtactccgggctgtgggggtcggtgcggatattcagtcatgaaatcagggtagggacttctcccgcagcgacgcggctggcaagactgtttgtgttgcgggggccggacttcaaggtgattttacaacgagatgctgctctccatagggatgctcatgctgtcagccacacaagtctacaccatcttgactgtccagctctttgcattcttaaacctactgcctgtagaagcagacattttagcatataactttgaaaatgcatctcagacatttgatgacctccctgcaagatttggttatagacttccagctgaaggtttaaagggttttttgattaactcaaaaccagagaatgcctgtgaacccatagtgcctccaccagtaaaagacaattcatctggcactttcatcgtgttaattagaagacttgattgtaattttgatataaaggttttaaatgcacagagagcaggatacaaggcagccatagttcacaatgttgattctgatgacctcattagcatgggatccaacgacattgaggtactaaagaaaattgacattccatctgtctttattggtgaatcatcagctaattctctgaaagatgaattcacatatgaaaaagggggccaccttatcttagttccagaatttagtcttcctttggaatactacctaattcccttccttatcatagtgggcatctgtctcatcttgatagtcattttcatgatcacaaaatttgtccaggatagacatagagctagaagaaacagacttcgtaaagatcaacttaagaaacttcctgtacataaattcaagaaaggagatgagtatgatgtatgtgccatttgtttggatgagtatgaagatggagacaaactcagaatccttccctgttcccatgcttatcactgcaagtgtgtagacccttggctaactaaaaccaaaaaaacctgtccagtgtgcaagcaaaaagttgttccttctcaaggcgattcagactctgacacagacagtagtcaagaagaaaatgaagtgacagaacatacccctttactgagacctttagcttctgtcagtgcccagtcatttggggctttatcggaatcccgctcacatcagaacatgacagaatcttcagactatgaggaagacgacaatgaagatactgacagtagtgatgcagaaaatgaaattaatgaacatgatgtcgtggtccagttgcagcctaatggtgaacgggattacaacatagcaaatactgtttgactttcagaagatgattggtttatttccctttaaaatgattaggtatatactgtaatttgattttttgctcccttcaaagatttctgtagaaataacttattttttagtattctacagtttaatcaaattactgaaacaggacttttgatctggtatttatctgccaagaatatacttcattcactaataatagactggtgctgtaactcaagcatcaattcagctcttcttttggaatgaaagtatagccaaaacataaaaaaaaaaaaatcctcagtatagcttgcaattaagacctagatcacagtatttaagtgttttgcgttttatacatgaggtcagtgctacagccacctagcatgaactaacccagcttccacctccataaagttacctagagttgttgagttggaatatgttctggcatttacctgacctgccaatcattagggagaggcaacaaggtaattcagcctttcctcctatcagcacaaagaaactcaaagctgttttttccctttctgttccaaagcagtcttatcctgacaggagcggtctatactagtgcagatttcaacacttttttttaacgttttaattactatagtgttatgtagagatttgattgagcagctaatgtttctgaactttacttactaattttcagtgtccttaagggttctgtagtgttatcaaagcaaaaagaaaatgctgcataaaaataccaaacttcagcaactgttaatactcagatcatatacctcttaataaatagcatcttatgctaattagccctgctaaactatgtacagaggaaactgttcaagtattggatttgaaagtaagtgacttatgtttaacagaactaatgatgtattgaaacactgtattatgaaaagctaaattatacatcattgtaactatgtagaaagtgtagactaatgtataatcaaaatgctaaggatttttatatggccttgtatgaggggagtttgaatgttaataaacatgttttccactttaagatccagtaaa

SEQ ID NO: 177203 - DNA, 583 bp, Homo sapiens
  Payload ID: 14772
  Gene Symbol: RNF13
  Gene Name: ring finger protein 13
  ENST ID: ENST00000490631
  CDS Start-End: 8-583
caacgagatgctgctctccatagggatgctcatgctgtcagccacacaagtctacaccatcttgactgtccagctctttgcattcttaaacctactgcctgtagaagcagacattttagcatataactttgaaaatgcatctcagacatttgatgacctccctgcaagatttggttatagacttccagctgaaggtttaaagggttttttgattaactcaaaaccagagaatgcctgtgaacccatagtgcctccaccagtaaaagacaattcatctggcactttcatcgtgttaattagaagacttgattgtaattttgatataaaggttttaaatgcacagagagcaggatacaaggcagccatagttcacaatgttgattctgatgacctcattagcatgggatccaacgacagtaagtacaggggccaccttatcttagttccagaatttagtcttcctttggaatactacctaattcccttccttatcatagtgggcatctgtctcatcttgatagtcattttcatgatcacaaaatttgtccaggatagacatagagctagaagaaacagacttcgt

SEQ ID NO: 177204 - DNA, 586 bp, Homo sapiens
  Payload ID: 14772
  Gene Symbol: RNF13
  Gene Name: ring finger protein 13
  ENST ID: ENST00000466795
  CDS Start-End: 97-586
aagtacagatttctcaatgaagatgcacccattatttttccctttagtgtattttgattcgtgtcctgggagatcaggaggtgattttacaacgagatgctgctctccatagggatgctcatgctgtcagccacacaagtctacaccatcttgactgtccagctctttgcattcttaaacctactgcctgtagaagcagacattttagcatataactttgaaaatgcatctcagacatttgatgacctccctgcaagatttggttatagacttccagctgaaggtttaaagggttttttgattaactcaaaaccagagaatgcctgtgaacccatagtgcctccaccagtaaaagacaattcatctggcactttcatcgtgttaattagaagacttgattgtaattttgatataaaggttttaaatgcacagagagcaggatacaaggcagccatagttcacaatgttgattctgatgacctcattagcatgggatccaacgacattgaggtactaaagaaaattgacattccatctgtctttattggtgaatcatcagctaattctctgaaagatgaattcacat

SEQ ID NO: 177205 - DNA, 761 bp, Homo sapiens
  Payload ID: 14772
  Gene Symbol: RNF13
  Gene Name: ring finger protein 13
  ENST ID: ENST00000467977
  CDS Start-End: 312-761
gcctaggtgttgtcgtccctgctagtactccgggctgtgggggtcggtgcggatattcagtcatgaaatcagggtagggacttctcccgcagcgacgcggctggcaagactgtttgtgttgcgggggccggacttcaagggttttttgattaactcaaaaccagagaatgcctgtgaacccatagtgcctccaccagtaaaagacaattcatctggcactttcatcgtgttaattagaagacttgattgtaattttgatataaaggttttaaatgcacagagagcaggatacaaggcagccatagttcacaatgttgattctgatgacctcattagcatgggatccaacgacagtaagtacagttgaggtactaaagaaaattgacattccatctgtctttattggtgaatcatcagctaattctctgaaagatgaattcacatatgaaaaagggggccaccttatcttagttccagaatttagtcttcctttggaatactacctaattcccttccttatcatagtgggcatctgtctcatcttgatagtcattttcatgatcacaaaatttgtccaggatagacatagagctagaagaaacagacttcgtaaagatcaacttaagaaacttcctgtacataaattcaagaaaggagatgagtatgatgtatgtgccatttgtttggatgagtatgaagatggagacaaactcagaatccttccctgttcccatgcttatcactgcaagtgtgtagaccct

SEQ ID NO: 177206 - DNA, 777 bp, Homo sapiens
  Payload ID: 14772
  Gene Symbol: RNF13
  Gene Name: ring finger protein 13
  ENST ID: ENST00000482083
  CDS Start-End: 82-777
taattcatggcagaggtgggaattgaatgctcaaggttttaaatgcacagagagcaggatacaaggcagccatagttcacaatgttgattctgatgacctcattagcatgggatccaacgacagtaagtacagttgaggtactaaagaaaattgacattccatctgtctttattggtgaatcatcagctaattctctgaaagatgaattcacatatgaaaaagggggccaccttatcttagttccagaatttagtcttcctttggaatactacctaattcccttccttatcatagtgggcatctgtctcatcttgatagtcattttcatgatcacaaaatttgtccaggatagacatagagctagaagaaacagacttcgtaaagatcaacttaagaaacttcctgtacataaattcaagaaaggagatgagtatgatgtatgtgccatttgtttggatgagtatgaagatggagacaaactcagaatccttccctgttcccatgcttatcactgcaagtgtgtagacccttggctaactaaaaccaaaaaaacctgtccagtgtgcaagcaaaaagttgttccttctcaaggcgattcagactctgacacagacagtagtcaagaagaaaatgaagtgacagaacatacccctttactgagacctttagcttctgtcagtgcccagtcatttggggctttatcggaatcccgctcacatcagaacatgacagaatcttcagactatgaggaagacgacaatgaagatactgacagt

SEQ ID NO: 177207 - DNA, 1008 bp, Homo sapiens
  Payload ID: 14772
  Gene Symbol: RNF13
  Gene Name: ring finger protein 13
  ENST ID: ENST00000459632
  CDS Start-End: 512-1008
gctagggccagatactacggtcagtcagcagctctgcctgtatgcttgacttgacttgacttgcacttattaaataactttgtcccagagagaaagagagagtgggcagacatcgaagccaaacagcagtatcccggaagcactcatgcaactttggtggcggccactcagttttctctgccagtgtctggtaaattcctctattttgtcctaatctgacaatagtaaatagtaaatttccaaaactgtcgtttcatcatcagtttcagcaccgtgggcagctgctcgggtcctctcttgttgccccaaacctgcccggctattactgttcgtcagtgatgcagcagaaacagtgaaaactgatgcattcctttcaacaatgatgtgtttgttctccaaggagaacatctgcagtttttgatacaatataaataagtaaggtggctgtgcctccaaagagttcttctggagaaacagatcaattcaagatttaaggtgattttacaacgagatgctgctctccatagggatgctcatgctgtcagccacacaagtctacaccatcttgactgtccagctctttgcattcttaaacctactgcctgtagaagcagacattttagcatataactttgaaaatgcatctcagacatttgatgacctccctgcaagatttggttatagacttccagctgaaggtttaaagggttttttgattaactcaaaaccagagaatgcctgtgaacccatagtgcctccaccagtaaaagacaattcatctggcactttcatcgtgttaattagaagacttgattgtaattttgatataaaggttttaaatgcacagagagcaggatacaaggcagccatagttcacaatgttgattctgatgacctcattagcatgggatccaacgacattgaggtactaaagaaaattgacattccatctgtctttattggtgaatcatcagctaattctctgaaagatgaattcacatatgaaaa

SEQ ID NO: 177208 - DNA, 593 bp, Homo sapiens
  Payload ID: 14772
  Gene Symbol: RNF13
  Gene Name: ring finger protein 13
  ENST ID: ENST00000466478
  CDS Start-End: 378-593
agaacgagactcgcaaactgggcatttctccgagccgggctagagcaagtagcgagactccgcgtgagagtgggaaagagccttaacaggcaaccatgttgcccagtgggttttctgtgcctttgggtgcggaccaatgaggcgcgtggggcgggacttccgcttcgcctaggtgttgtcgtccctgctagtactccgggctgtgggggtcggtgcggatattcagtcatgaaatcagggtagggacttctcccgcagcgacgcggctggcaagactgtttgtgttgcgggggccggacttcaagctgaatcacgtgggtaaataagaaagtggaaagtggaacactaaagaacttgatctgtgattttacaacgagatgctgctctccatagggatgctcatgctgtcagccacacaagtctacaccatcttgactgtccagctctttgcattcttaaacctactgcctgtagaagcagacattttagcatataactttgaaaatgcatctcagacatttgatgacctccctgcaagatttggttatagacttccagctgaaggtttaaagggttttttgattaactcaaaa

SEQ ID NO: 177209 - DNA, 767 bp, Homo sapiens
  Payload ID: 14772
  Gene Symbol: RNF13
  Gene Name: ring finger protein 13
  ENST ID: ENST00000467996
  CDS Start-End: 343-396
ggatattcagtcatgaaatcagggtagggacttctcccgcagcgacgcggctggcaagactgtttgtgttgcgggggccggacttcaagtataactttgaaaatgcatctcagacatttgatgacctccctgcaagatttggttatagacttccagctgaaggtttaaagggttttttgattaactcaaaaccagagaatgcctgtgaacccatagtgcctccaccagtaaaagacaattcatctggcactttcatcgtgttaattagaagacttgattgtaattttgatataaaggttttaaatgcacagagagcaggatacaaggcagccatagttcacaatgttgattctgatgacctcattagcatgggatccaacgacattgaggtactaaagaaaattgacattccatctgtctttattggtgaatcatcagctaattctctgaaagatgaattcacatatgaaaaagggggccaccttatcttagttccagaatttagtcttcctttggaatactacctaattcccttccttatcatagtgggcatctgtctcatcttgatagtcattttcatgatcacaaaatttgtccaggatagacatagagctagaagaaacagacttcgtaaagatcaacttaagaaacttcctgtacataaattcaagaaaggagatgagtatgatgtatgtgccatttgtttggatgagtatgaagatggagacaaactcagaatccttccctgttcccatgcttatcactgc

SEQ ID NO: 177210 - DNA, 701 bp, Homo sapiens
  Payload ID: 14772
  Gene Symbol: RNF13
  Gene Name: ring finger protein 13
  ENST ID: ENST00000470151
  CDS Start-End: 461-701
cagaccgaccggccctgcccgctcggtcccgcgccctccagaccctacggtctccgtttctaggggcacatggttagcggcaggcgcccacagccaatccactttgccagcctgccccttcctctgccaagagcagcttcttcagccgcgctccagttccgcagacgcctgccccaccctgctcttcccttccagggaagacggatcacgcggccaagaacgagactcgcaaactgggcatttctccgagccgggctagagcaagtagcgagactccgcgtgagagtgggaaagagccttaacaggcaaccatgttgcccagtgggttttctgtgcctttggagagaaagagagagtgggcagacatcgaagccaaacagcagtatcccggaagcactcatgcaactttggtggcggccactcagttttctctgccagtgtctggtgattttacaacgagatgctgctctccatagggatgctcatgctgtcagccacacaagtctacaccatcttgactgtccagctctttgcattcttaaacctactgcctgtagaagcagacattttagcatataactttgaaaatgcatctcagacatttgatgacctccctgcaagatttggttatagacttccagctgaaggtttaaagggttttttgattaactcaaaaccagagaatgcctgtgaacccatag

SEQ ID NO: 177211 - DNA, 570 bp, Homo sapiens
  Payload ID: 14772
  Gene Symbol: RNF13
  Gene Name: ring finger protein 13
  ENST ID: ENST00000468648
  CDS Start-End: 224-570
tttgggacttaacccctgctagggccagatactacggtcagtcagcagctctgcctgtatgcttgacttgacttgacttgcacttattaaataactttgtcccagagagaaagagagagtgggcagacatcgaagccaaacagcagtatcccggaagcactcatgcaactttggtggcggccactcagttttctctgccagtgtctggtgattttacaacgagatgctgctctccatagggatgctcatgctgtcagccacacaagtctacaccatcttgactgtccagctctttgcattcttaaacctactgcctgtagaagcagacattttagcatataactttgaaaatgcatctcagacatttgatgacctccctgcaagatttggttatagacttccagctgaaggtttaaagggttttttgattaactcaaaaccagagaatgcctgtgaacccatagtgcctccaccagtaaaagacaattcatctggcactttcatcgtgttaattagaagacttgattgtaattttgatataaaggttttaaatgcacagagagcaggata

SEQ ID NO: 177212 - DNA, 1027 bp, Homo sapiens
  Payload ID: 14772
  Gene Symbol: RNF13
  Gene Name: ring finger protein 13
  ENST ID: ENST00000474348
  CDS Start-End: 143-565
cgtccctgctagtactccgggctgtgggggtcggtgcggatattcagtcatgaaatcagggtagggacttctcccgcagcgacgcggctggcaagactgtttgtgttgcgggggccggacttcaaggtgattttacaacgagatgctgctctccatagggatgctcatgctgtcagccacacaagtctacaccatcttgactgtccagctctttgcattcttaaacctactgcctgtagaagcagacattttagcatataactttgaaaatgcatctcagacatttgatgacctccctgcaagatttggttatagacttccagctgaaggtttaaagggttttttgattaactcaaaaccagagaatgcctgtgaacccatagtgcctccaccagtaaaagacaattcatctggcactttcatcgtgttaattagaagacttgattgtaattttgatataaaggttttaaatgcacagagagcaggatacaaggcagccatagttcacaatgttgattctgatgacctcattagcatgggatccaacgacagtaagtacagttgaggtactaaagaaaattgacattccatctgtctttattggtgaatcatcagctaattctctgaaagatgaattcacatatgaaaaagggggccaccttatcttagttccagaatttagtcttcctttggaatactacctaattcccttccttatcatagtgggcatctgtctcatcttgatagtcattttcatgatcacaaaatttgtccaggatagacatagagctagaagaaacagacttcgtaaagatcaacttaagaaacttcctgtacataaattcaagaaaggagatgagtatgatgtatgtgccatttgtttggatgagtatgaagatggagacaaactcagaatccttccctgttcccatgcttatcactgcaagtgtgtagacccttggctaactaaaaccaaaaaaacctgtccagtgtgcaagcaaaaagttgttccttctcaaggcgattc

SEQ ID NO: 177213 - DNA, 820 bp, Homo sapiens
  Payload ID: 14772
  Gene Symbol: RNF13
  Gene Name: ring finger protein 13
  ENST ID: ENST00000468289
  CDS Start-End: 1-550
agttccagaatttagtcttcctttggaatactacctaattcccttccttatcatagtgggcatctgtctcatcttgatagtcattttcatgatcacaaaatttgtccaggatagacatagagctagaagaaacagacttcgtaaagatcaacttaagaaacttcctgtacataaattcaagaaagcttatcactgcaagtgtgtagacccttggctaactaaaaccaaaaaaacctgtccagtgtgcaagcaaaaagttgttccttctcaaggcgattcagactctgacacagacagtagtcaagaagaaaatgaagtgacagaacatacccctttactgagacctttagcttctgtcagtgcccagtcatttggggctttatcggaatcccgctcacatcagaacatgacagaatcttcagactatgaggaagacgacaatgaagatactgacagtagtgatgcagaaaatgaaattaatgaacatgatgtcgtggtccagttgcagcctaatggtgaacgggattacaacatagcaaatactgtttgactttcagaagatgattggtttatttccctttaaaatgattaggtatatactgtaatttgattttttgctcccttcaaagatttctgtagaaataacttattttttagtattctacagtttaatcaaattactgaaacaggacttttgatctggtatttatctgccaagaatatacttcattcactaataatagactggtgctgtaactcaagcatcaattcagctcttcttttggaatgaaagtatagccaaaacataaaaaaaaaaaaa

SEQ ID NO: 177214 - DNA, 1104 bp, Homo sapiens
  Payload ID: 14772
  Gene Symbol: RNF13
  Gene Name: ring finger protein 13
  ENST ID: ENST00000491086
  CDS Start-End: 404-1104
acttccgcttcgcctaggtgttgtcgtccctgctagtactccgggctgtgggggtcggtgcggatattcagtcatgaaatcagggtagggacttctcccgcagcgacgcggctggcaagactgtttgtgttgcgggggccggacttcaagtataactttgaaaatgcatctcagacatttgatgacctccctgcaagatttggttatagacttccagctgaaggtttaaagggttttttgattaactcaaaaccagagaatgcctgtgaacccatagtgcctccaccagtaaaagacaattcatctggcactttcatcgtgttaattagaagacttgattgtaattttgatataaaggttttaaatgcacagagagcaggatacaaggcagccatagttcacaatgttgattctgatgacctcattagcatgggatccaacgacagtaagtacagttgaggtactaaagaaaattgacattccatctgtctttattggtgaatcatcagctaattctctgaaagatgaattcacatatgaaaaagggggccaccttatcttagttccagaatttagtcttcctttggaatactacctaattcccttccttatcatagtgggcatctgtctcatcttgatagtcattttcatgatcacaaaatttgtccaggatagacatagagctagaagaaacagacttcgtaaagatcaacttaagaaacttcctgtacataaattcaagaaaggagatgagtatgatgtatgtgccatttgtttggatgagtatgaagatggagacaaactcagaatccttccctgttcccatgcttatcactgcaagtgtgtagacccttggctaactaaaaccaaaaaaacctgtccagtgtgcaagcaaaaagttgttccttctcaaggcgattcagactctgacacagacagtagtcaagaagaaaatgaagtgacagaacatacccctttactgagacctttagcttctgtcagtgcccagtcatttggggctttatcggaatcccgctcacatcagaacatgacagaatcttcagactatgaggaagacgacaatgaagatactgacagtagtga

SEQ ID NO: 177215 - DNA, 1766 bp, Homo sapiens
  Payload ID: 14773
  Gene Symbol: RNF130
  Gene Name: ring finger protein 130
  Uniprot ID: Q86XS8
  ENST ID: ENST00000261947
  CDS Start-End: 400-1554
ggactttgtgttccgctgaccctcctcggggcgcttcctcccgtgccgcccttcccctcccccgccgcgtccttgcgaggcgcctcccattcggtgggaccgacccggggggatggagggggcacgcttctacaaccctcctgggaccccgaagagacgcccgcgtgcgacctgagacgccgccctcgccgagggcccatgggcgcgtccccacaggcgggcagtggacgtgagggcggcgagcggcggggccgcggcgtccaggagggccgcgctcgggctcggccccgcgcaggccgcgcgcgcgcgctcccgccgccgcccgggccgcgcccgccccgcctctaggcgccggccccggagcccggtccgcgagcagcggcggctgccggagggacgatgagctgcgcggggcgggcgggccctgcccggctcgccgcgctcgccctgctgacctgcagcctgtggccggcacgggcagacaacgcgagccaggagtactacacggcgctcatcaacgtgacggtgcaggagcccggccgcggcgccccgctcacgtttcgcatcgaccgcgggcgctacgggcttgactcccccaaggccgaggtccgcggccaggtgctggcgccgctgcccctccacggagttgctgatcatctgggctgtgatccacaaacccggttctttgtccctcctaatatcaaacagtggattgccttgctgcagaggggaaactgcacgtttaaagagaaaatatcacgggccgctttccacaatgcagttgctgtagtcatctacaataataaatccaaagaggagccagttaccatgactcatccaggcactggagatattattgctgtcatgataacagaattgaggggtaaggatattttgagttatctggagaaaaacatctctgtacaaatgacaatagctgttggaactcgaatgccaccgaagaacttcagccgtggctctctagtcttcgtgtcaatatcctttattgttttgatgattatttcttcagcatggctcatattctacttcattcagaagatcaggtacacaaatgcacgcgacaggaaccagcgtcgtctcggagatgcagccaagaaagccatcagtaaattgacaaccaggacagtaaagaagggtgacaaggaaactgacccagactttgatcattgtgcagtctgcatagagagctataagcagaatgatgtcgtccgaattctcccctgcaagcatgttttccacaaatcctgcgtggatccctggcttagtgaacattgtacctgtcctatgtgcaaacttaatatattgaaggccctgggaattgtgccgaatttgccatgtactgataacgtagcattcgatatggaaaggctcaccagaacccaagctgttaaccgaagatcagccctcggcgacctcgccggcgacaactcccttggccttgagccacttcgaacttcggggatctcacctcttcctcaggatggggagctcactccgagaacaggagaaatcaacattgcagtaacaaggtagaatggttttgaagaagaaaaaacctgctttctgactgattttgccttgaaggaaaaaagaacctatttttgtgcatcatttaccaatcatgccacacaagcatttatttttagtacattttattttttcataaaattgctaatgccaaagctttgtattaaaagaaataaataataaaataaaaagtctgtgctgttgagtcttattaacca

SEQ ID NO: 177216 - DNA, 9945 bp, Homo sapiens
  Payload ID: 14773
  Gene Symbol: RNF130
  Gene Name: ring finger protein 130
  ENST ID: ENST00000522208
  CDS Start-End: 20-1279
ggcggctgccggagggacgatgagctgcgcggggcgggcgggccctgcccggctcgccgcgctcgccctgctgacctgcagcctgtggccggcacgggcagacaacgcgagccaggagtactacacggcgctcatcaacgtgacggtgcaggagcccggccgcggcgccccgctcacgtttcgcatcgaccgcgggcgctacgggcttgactcccccaaggccgaggtccgcggccaggtgctggcgccgctgcccctccacggagttgctgatcatctgggctgtgatccacaaacccggttctttgtccctcctaatatcaaacagtggattgccttgctgcagaggggaaactgcacgtttaaagagaaaatatcacgggccgctttccacaatgcagttgctgtagtcatctacaataataaatccaaagaggagccagttaccatgactcatccaggcactggagatattattgctgtcatgataacagaattgaggggtaaggatattttgagttatctggagaaaaacatctctgtacaaatgacaatagctgttggaactcgaatgccaccgaagaacttcagccgtggctctctagtcttcgtgtcaatatcctttattgttttgatgattatttcttcagcatggctcatattctacttcattcagaagatcaggtacacaaatgcacgcgacaggaaccagcgtcgtctcggagatgcagccaagaaagccatcagtaaattgacaaccaggacagtaaagaagggtgacaaggaaactgacccagactttgatcattgtgcagtctgcatagagagctataagcagaatgatgtcgtccgaattctcccctgcaagcatgttttccacaaatcctgcgtggatccctggcttagtgaacattgtacctgtcctatgtgcaaacttaatatattgaaggccctgggaattgtgccgaatttgccatgtactgataacgtagcattcgatatggaaaggctcaccagaacccaagctgttaaccgaagatcagccctcggcgacctcgccggcgacaactcccttggccttgagccacttcgaacttcggggatctcacctcttcctcaggatggggagctcactccgagaacaggagaaatcaacattgcagtaacaagtggtcacttctttcatcgaaactccttgtcccctcggagtctggtgtatgaaagtgaattctccaccatcgaaccttctttggacatgtatgatgagaacaaaacctgaattttaaacatggcctggctgttggggtcactgcttttgtgatttgatttctgatcacctttcttattttgtattctcctgtcagcatccgttttggaagaatggcagcactttccaagcacaggttggggttcagggttaatttgcaaagttcccccaaggtgaggctttgaggacagtagcattgcccaggtgagccttgtggtattgaaaacccgcccaagctgatcattgaaggtgggcgcccagcaaggctggctgtttccagagaagaggccgggcccaggattaatgttgcattgcagacgcatctctgaacaatcacatgctgttctgcaccagggaagctggggtttttaacatccttttgtggtccctgcttacgatgcatactgccctgtgggagaagcttcctacccgcgtggagtacaggtgctgctccctgacctggctctggatgttcccctctcgcttattctacttcctgctgaagggccccttctaaagggggttgagagaaggccttgcctttgtatctcctctgagactctgaccacccacttcctgccagggcagggccgtgggagacccaggccgtggggccgggtctgtgtgcggggccaggcagccgtctgcgtcgctgttttccagcctccgtgttgagcatgacgtaaagtgacaagtgtttaagtcagcacgaaaacactgaaggcccctccgtccctgcagcctgtgaacacgtctactcggccacccgtcagtatagggagtgtgtgtatagggaggtggcacctgggagcccagcccagcagtgtctctgggcacagtgatttcagggggatggccagcagttgtgaaagacagaatgatctggaatgtctcattgggaagaccaaacccccttctcgctgcagataccagataagcacccatcttcactgtccactgtgcagcccagtcccctccagcagccccagcacagcatgaagaaggcacatgagcaccggccgacaggcttacaggacagggtgcagtggccagcatcccaggcatcagggacatgtgggatcttcccacacacctgggatgacatcgaattaacatgatgagaaaattgcatcttactgctaatcccagtacagaaccactatgggcaaatttataaaactaatctgcacaccctctttgcaaaaggacacacctgagttgagtctgcctctcattggcatgagctttgtgggggcgtgaggcgcacagacccttgctgtgagaacaggaaccccagtctccacatgcccagggtcagatccgacagcaaacgaagcagatgcgtgaatcccctgccctgttctcactgactgtggaatatacgtttgaagtgaacacttgccatttttccacgtgcagcttctcctaaagtgtcttttctcctaacgcgtcaataacgcctcagacacaggtgtgcctgaaggaaacctgcagagccccggatggggacaggcttcaggagcattgtcagagagcgggcagcggcatttcgttttcgctcatttgaggctagaatggtgcagattttaaaggtcttagcagcttttgtgttttaccttttaccaagggctttgggggtttttttgttttgtttttctttatgatagtcttcgtactataaaaatattttcaatgagcagcttcaatatagcatcgttcagaaaagcaggtttccccattgggctctcagagagagggtgagtctgcaggaagctggagcccatttgctggaggttccagacacgcgtctgcatttgtatgtgtttgacccacctgaaaggtaggagagctcagttcggatcattgccgtgttgtctataccacctccttgttttcccaaaccaaaacgcagatcctgatgtagcattttctcctgatttgaggtcttaccaatgtgtatacgttaaattccactcaagacagtttctttactgaaaaggtatgaaattacgtgagaagaagtacaaatttcaggcccctagaatctgtctattaatataacatttgaatttctgggaaatctggggcacacattcacggtagaataacaaggaggcattgcttgcaggggagcgtactcagaacagtgctgtggatcctggcttgacacccttttctggaaaattggggtcactctctggctcagctacagaatggcctgtctttgtcaggagggacactaacttctcattaaggccatgctcttcaggaacagagaggatgatttggtttttggtttcaggtttttatttttatttttgttttgagacagtctcactctgtcacccaggctgaagggcagtggcgcaaccttggctcactgcagcctccacctcctgggctcaagtgatcctcccacctcagcccaccgagtagctggcaccacaggcacgtgccaccacacccagctaatttttggattttctgtagagatatgggactttgccatgttgcccaggctggtcttgaattcctgggctcaagcaatccacccccacctcggcctcccaaagttccgggattccagttgtgagccaccatgcccagccaagaatggcattttttttttaatcccaaataacagcctctttactagctgctatgctgggggaaatccctgctaagtcgggaccctggcaggaagtggccggggctgcttgtccggtgagcattgtgaagacacacgtcgccacatgggcagcgcttccctgaggcgcttggggagcagtgttccgcctgctgcaggtgtgatggggtgcagagagtgagtgcctccgtggttgcaagtcttgccaccagcagcggttattaggaaatgtatgataacctcagtcattgttgaggggggaactgtttgaagtaaggaagaggctgaggagtcagctatttacaccacacatccacccccctgcctccagtggactgctgtgagctgggcctgtgcccgggtgaggagaccatgggcctgtgtggcaggatcagcaagtctagggccagggcagccatcagcatcctctgggagttggttgtgactattgaaatgcaaatgcttccgctttggtgattttttttttttttgagacggagtcttgctctgtcacccaggctggagtgcagtggcgcgatcttggctcactgcaacttccgcctcccgggttcacaccatcctcctgcctcagcctcccgagcagctgggactacaggcacctgccacgacgcccagctaattttttgtatttttagtagagatggggttttactgtgttagccaggctggtctcgatctcctgacctcgtgatccgcctgccttggcctcccaaagtgctgggattacaggcatgagccaccacgcctggccaagctttggtgacttttaacatcctaagggaggagtaacccctctttcctgttaatccagagggaggggagggaaggccagatagccagggcttccagcgcaggaggcagagcttggcagccactgatggtggtaagcatgtctgcccagggctgcctgcctctgccctcctcttgggaagacaagctctgcccccagctaaaaactcctcacaaccctgatgagccttgcttttgcagagaggccccagctcccctggtggtcctcaggcctggctgcgaggcacattcacgaggcactgccttgagcactgaggtctggcacctgccggcttccctgatgcggcaacagccccagctgccagtgagtctgatgatatttggaaaagtatttttaaaaacgagattactgaattttacaagcttgacattttctattggctttataagctcttctcatgtttttattaccctcacatccaatccgttcgagctacacgctaaatcaaattggtattttatatttttatttttttagaggcaggatctcgctctgtcacccaggcaggagtgcagtggcacagtcatggctcgctgcagccttgacctcgcctcagcctccccagtagctgggaccacaggctcatgccacgcacgcccggctgaagctagttttaactgaagaaaactcaaagtgttctctcgccgttaacctttattattgaggcattggctctgctataggaaaacgaggtgacgttaatgtcggtggttgacattaaccactggcaagtgacagtgtggctccttgacaagtggttgctgctcataaatgtcatgaaacaaaaacactgattttagagaagtgggattctacagttaatatcgccagcaaacttttattaagctctcactctgtgccaaacacatgcttgaagttggggtgaatctgtgaccattaagatgttggctgttcatgggcacgttatcaagcaactggggtgtgagagcgaatgataagagggtgaatctggatgaggagggacttccagggcacaggtggaggagaggcattgcagccatagagaggcccaagggaacagtcaagacaaggcggggacagtggccaggaggcgagggcagcacttcctgggcagggaaggcttgccagggagaccagactcctgtctctgtttggaaagaaaaggaaccgcactgggggtcagggaggctaggcacggcaccagcctgggatgccagtcccgcctgaggggccaaggcaaaggggaagcattcacagaccccacaccaggctctgacgccaagtggaagaagagggagatagaagcagaagcctgggcttccaggcctggttcctgggcgggtgttgatgggacccagggagagtcctgtggggatactttgggtctgggctggcaggggctctggaaggagaggcatggaggtgcgaacctggtgcccaggtggaggtgcagtgggggtaaggtggccaggctgcagacccctgcatcagaatgcctgcgaagctgtgggttttttgtttgtttgtttgttttatttcgagacagggtgtcactctgtcgcccagactggagtgcagtagcgccgtctcggctcactgcaagctccgcctcccaggatcaagtgattctcctgcctcagcctcccgagtagctggatttacagatgcatgccaccacgcccagctaattttttgtatttttagtagaaacgaggtttcaccacgttggccaggctggtctcaaactcctgacctcaaatgatccacctgcctcgtcctcccaagtgctggaattacaggtgtgagccgcaccagcctgttttttaattttatttagagacagggtctcactctgttgcccagactggagtgcagtggtgtaatcttggctcactgcagcctcaacttccagcgctaaagcaatcctcccacctctgcctcccgagtaactgggactacacacgcatgccactacacccaggtaatttttaaaaattttttttagagacagagcttctccatgttgcccaggctagcctcaaactcctgggctccagtgaccctcccgccttagtgtctcaaagtgctgggattacaggtatgagccaccacgcccggtcagaagctgtgtttttaagtggacataccatcttgtcctgctgaagtatctccatgtaatcacaatatctatgtcacccaaatctcctccttcctcctccctcccccaaaacacccccacaggcatgcataccctcccatgcgctggaggcagaatctcccaaggggagctggccaggagaggtgtccctgagttcagatggaggtggaagccagagtggggctgggaccacccagtgacatgaggatggggcttgggataaagccctggggacactgacatttaaagtgtggacagaaggagctactgaaggcaatggatttagaaaagcaattgagtatgatttccttcttcaagaaaggctgtccaactagctctcacttcctctcgtgtgttcagtgtcacccggaagcagagtttaatgtgactaaagtcaacattggctcacactgtcagggagtgtgggaagatgagtaaggactcatcgcagggcgatacccacagcttaaaataggcaccttcccctcccaggtctggttagggcagttgttacatatgaggggcgtggagttttgtcttgtattttggccttgttggtaaagcattccaaagcttcgacacaccctcctttcagcccattaggaaaggctgttgattgtaatattcacacagctccctgggctatggttaagagccttgcagaaggactgggagaagccctgtgtgtttgaagtattgtagcatcagaaaaaaacaccggaagaaggcaggtggggacaaggtgcctatgtctgctccttggaattcctttccttactgtccgaggcaactacagggaaagcaaagcgtgagcccccaaatccacacctgggaggaacgttcccctttgcaaggcatgggactggctggccctgtgtctcacgggggctctgagttttgaggtcacactagcctcctgaggcctggctgagagggctgggttgggggtcaggaggccccctgtagccacgaagctcctctggggcattgttaaaggttcaccctcttttttgtgggtatcctggaagatctcaagaaactgagcttggaagaagagaggctgagagggtctcccgccgcctgcgttctctgcagctatggccccacagcctccagtgaccatggaggggaaggtgccacccgccttggctgctgaaagggtgatgctcttatgcctgagtcttggctcctgtggtcctgcagagaccctgtgggggccgcccggtcgtcacctgcactcatcttgggttttccttccttttccaccctaagctgaaggtatttttttcctgttttcttcactctaacttggggaagaaggaagatcctttatggaaaagaaaaaaaaaaaagcacctttgaacgtcctgcaacttgagtttcaagctttcagaaggattcggtgctgctggcctgctcagacctccgcctgggctgtggagttcctcctgttggcccctcctctctgtaccacaaaagctctaggcggcccagccacccctgtgaaagcggcgcccgtagccagacgccaaggctgccgtcccgagccgagggtggcaccttgcccagcgcacgtgcattctcctgtgggaactcggagggcatgtggtgagcagtctcctgtcagttgaggtggaggctcccggcccatctttgctctcctcaggctgcccagctcctggcggcacatggtggcctggcaaagctgacttggcctcctcagttccccacccatccgcggatcatcgccttccctagccacctctctctatagccaccgacatctgcggagcgtcacagactggttctgagctgtggtttacaaattcaacccaacacagagtgaattcaaatttgcttttggaacagcctttatctccaattaagtgcaagtatatttacactatgtgatattaaaggacttctccaatgactgggaggtactgaaccaagatgtttgtaaagaaacggtggggtgaggtggttaggtagaatataccgtcctggccatttctcttccttcaggcgagtaagcgctccttcagcagaaaggctgcggattgctggctgtgctctgtggactgggccagtaggtgtggcccaggtccaggtcctggcacctctgctgagtgcccagcctgagatgacacatgccatcctggagagaagcagagagggtgctgtctccaggcgttctccagacagcctgggcctggcttgctgagccagctgcaggaggggatctcctgactggggcttgggaccagatctgctgcagagaggcaataactctgtctaaaaagaaaacttgtcccgtgtgattacaaaaacaggaaaaggctccaagctaggaaatgagatttgaggtatggagaacattctcacctgatggaagcatcctgttcctgtacaggaggaggagctggtgcaagccctaggccacatatgtcacagttgttttggaccctccgtagcttttatactcataaaatattaaagttgcccctttcatatttgggtcattgaaagagcccaccgtactctaggttcctgctcactatgcacaacatctcagaagatggcgtacaaaactatttttctaactatagcacaggtaatgtgggggtggggaggcttgggatatacctaaatgtggcaaatgatttatcttccaccttgagggatgaaaaggaaactatgcacttgaattttaattaaaattttaatttaattcattggatagcttgtgccagaaagaacagtcaatattcaagaagcaaaactgacgattagctcagtttcgggcctccctgtcgggggagttttcttgtctggaacacaaacacctacaagtagagtgtgagctggttcttgacaatcagatctcatcaaccctttgaaatgttctgggcagcacagctccttggtctgcatggttggtgtaagtataatcaagtagtgaaattgtatggtatatacctatatgccaacagtgtacacccgtatgtgcagaatttgctaatataaccatttcaataaaaacctattgaaaaagctga

SEQ ID NO: 177217 - DNA, 2263 bp, Homo sapiens
  Payload ID: 14773
  Gene Symbol: RNF130
  Gene Name: ring finger protein 130
  Uniprot ID: Q86XS8
  ENST ID: ENST00000521389
  CDS Start-End: 417-1676
cggcagccgcgcgagagggactttgtgttccgctgaccctcctcggggcgcttcctcccgtgccgcccttcccctcccccgccgcgtccttgcgaggcgcctcccattcggtgggaccgacccggggggatggagggggcacgcttctacaaccctcctgggaccccgaagagacgcccgcgtgcgacctgagacgccgccctcgccgagggcccatgggcgcgtccccacaggcgggcagtggacgtgagggcggcgagcggcggggccgcggcgtccaggagggccgcgctcgggctcggccccgcgcaggccgcgcgcgcgcgctcccgccgccgcccgggccgcgcccgccccgcctctaggcgccggccccggagcccggtccgcgagcagcggcggctgccggagggacgatgagctgcgcggggcgggcgggccctgcccggctcgccgcgctcgccctgctgacctgcagcctgtggccggcacgggcagacaacgcgagccaggagtactacacggcgctcatcaacgtgacggtgcaggagcccggccgcggcgccccgctcacgtttcgcatcgaccgcgggcgctacgggcttgactcccccaaggccgaggtccgcggccaggtgctggcgccgctgcccctccacggagttgctgatcatctgggctgtgatccacaaacccggttctttgtccctcctaatatcaaacagtggattgccttgctgcagaggggaaactgcacgtttaaagagaaaatatcacgggccgctttccacaatgcagttgctgtagtcatctacaataataaatccaaagaggagccagttaccatgactcatccaggcactggagatattattgctgtcatgataacagaattgaggggtaaggatattttgagttatctggagaaaaacatctctgtacaaatgacaatagctgttggaactcgaatgccaccgaagaacttcagccgtggctctctagtcttcgtgtcaatatcctttattgttttgatgattatttcttcagcatggctcatattctacttcattcagaagatcaggtacacaaatgcacgcgacaggaaccagcgtcgtctcggagatgcagccaagaaagccatcagtaaattgacaaccaggacagtaaagaagggtgacaaggaaactgacccagactttgatcattgtgcagtctgcatagagagctataagcagaatgatgtcgtccgaattctcccctgcaagcatgttttccacaaatcctgcgtggatccctggcttagtgaacattgtacctgtcctatgtgcaaacttaatatattgaaggccctgggaattgtgccgaatttgccatgtactgataacgtagcattcgatatggaaaggctcaccagaacccaagctgttaaccgaagatcagccctcggcgacctcgccggcgacaactcccttggccttgagccacttcgaacttcggggatctcacctcttcctcaggatggggagctcactccgagaacaggagaaatcaacattgcagtaacaaaagaatggtttattattgccagttttggcctcctcagtgccctcacactctgctacatgatcatcagagccacagctagcttgaatgctaatgaggtagaatggttttgaagaagaaaaaacctgctttctgactgattttgccttgaaggaaaaaagaacctatttttgtgcatcatttaccaatcatgccacacaagcatttatttttagtacattttattttttcataaaattgctaatgccaaagctttgtattaaaagaaataaataataaaataaaaagtctgtgctgttgagtcttattaaccagacctgtgttttgagggctgatttgaagctcgcagacccagattgcatttgtttgtgtttcagagacagaatgtgctcctggctcccgtgagaggaacagggattgacacttactattggtgtcttcacattggctcctacccacatagggcgcaagagcggggacatcctgctggtgatgccgcttaggatggtcagttgatttactcattcttcaagggggacattcactctgtgataatttcttctctgtggttgatcagcctccaccagagctgcagcacccccagcagcagggacttgtaacatttgctccccactgtgcccctgcacccaacagagtgctttgcacatcgtaagtgctcaataaatatttgtggaatgaa

SEQ ID NO: 177218 - DNA, 1790 bp, Homo sapiens
  Payload ID: 14773
  Gene Symbol: RNF130
  Gene Name: ring finger protein 130
  ENST ID: ENST00000520911
  CDS Start-End: 412-837
gccgcgcgagagggactttgtgttccgctgaccctcctcggggcgcttcctcccgtgccgcccttcccctcccccgccgcgtccttgcgaggcgcctcccattcggtgggaccgacccggggggatggagggggcacgcttctacaaccctcctgggaccccgaagagacgcccgcgtgcgacctgagacgccgccctcgccgagggcccatgggcgcgtccccacaggcgggcagtggacgtgagggcggcgagcggcggggccgcggcgtccaggagggccgcgctcgggctcggccccgcgcaggccgcgcgcgcgcgctcccgccgccgcccgggccgcgcccgccccgcctctaggcgccggccccggagcccggtccgcgagcagcggcggctgccggagggacgatgagctgcgcggggcgggcgggccctgcccggctcgccgcgctcgccctgctgacctgcagcctgtggccggcacgggcagacaacgcgagccaggagtactacacggcgctcatcaacgtgacggtgcaggagcccggccgcggcgccccgctcacgtttcgcatcgaccgcgggcgctacgggcttgactcccccaaggccgaggtccgcggccaggtgctggcgccgctgcccctccacggagttgctgatcatctgggctgtgatccacaaacccggttctttgtccctcctaatatcaaacagtggattgccttgctgcagaggggaaactgcacgtttaaagagaaaatatcacgggccgctttccacaatgcagttgctgtagtcatctacaataataaatccaaagaggagaattgaggggtaaggatattttgagttatctggagaaaaacatctctgtacaaatgacaatagctgttggaactcgaatgccaccgaagaacttcagccgtggctctctagtcttcgtgtcaatatcctttattgttttgatgattatttcttcagcatggctcatattctacttcattcagaagatcaggtacacaaatgcacgcgacaggaaccagcgtcgtctcggagatgcagccaagaaagccatcagtaaattgacaaccaggacagtaaagaagggtgacaaggaaactgacccagactttgatcattgtgcagtctgcatagagagctataagcagaatgatgtcgtccgaattctcccctgcaagcatgttttccacaaatcctgcgtggatccctggcttagtgaacattgtacctgtcctatgtgcaaacttaatatattgaaggccctgggaattgtgccgaatttgccatgtactgataacgtagcattcgatatggaaaggctcaccagaacccaagctgttaaccgaagatcagccctcggcgacctcgccggcgacaactcccttggccttgagccacttcgaacttcggggatctcacctcttcctcaggatggggagctcactccgagaacaggagaaatcaacattgcagtaacaaaagaatggtttattattgccagttttggcctcctcagtgccctcacactctgctacatgatcatcagagccacagctagcttgaatgctaatgaggtagaatggttttgaagaagaaaaaacctgctttctgactgattttgccttgaaggaaaaaagaacctatttttgtgcatcatttaccaatcatgccacacaagcatttatttttagtacattttattttttcataaaattgctaatgccaaagctttgtattaaaagaaataaataataaaataaaaa

SEQ ID NO: 177219 - DNA, 1445 bp, Homo sapiens
  Payload ID: 14774
  Gene Symbol: RNF133
  Gene Name: ring finger protein 133
  Uniprot ID: Q8WVZ7
  ENST ID: ENST00000340112
  CDS Start-End: 239-1369
aagcagtatctagagttaacagtaggggatttatttttcaatctaaagtttttcacctctctctagtaagacatctgaaactcataagccatctttaagaatttcttacaaaaacatgctggaagacagtggatcttgtttgtatcctgaagatttttttctcttcgttattttaaattaattgtcaacagatgtgcaactgttaggttggttcttaagtcactcggagaagagagagatgcatctactcaaggttggcacttggagaaacaacactgcctcttcctggcttatgaagttcagtgttctttggcttgttagtcagaactgttgcagagcaagtgttgtttggatggcttatatgaacatatcatttcatgttgggaatcatgtgttgtcagagttgggagagactggagtctttggaagaagctccactttgaagagagtggcaggagttatagtgccaccagagggaaaaatccaaaatgcatgtaatcccaataccattttcagccgatcaaagtactcagagacctggcttgcacttattgaacggggaggttgtaccttcacacagaaaattaaagtggcaactgagaagggagccagtggagtgatcatctataacgttccaggtactggcaaccaggtgttccccatgtttcatcaggcatttgaagatgtcgttgtggttatgattggtaacttaaaaggcacggaaattttccatttaattaagaagggagttctcattacagccgtggttgaggtggggagaaagcacatcatctggatgaatcactatttggtctcttttgtgattgtcacaactgctaccttagcatatttcatcttttatcacattcatagactttgtttagcaaggattcagaaccggagatggcagcgattaacaacagatcttcagaacacatttggacaactccaacttcgagtagtaaaagagggggatgaagaaataaatccaaatggggatagctgcgtaatttgctttgaacgctataagcctaatgacatagttcgtattctgacttgtaaacattttttccacaagaattgcattgacccctggattttaccccatgggacatgccccatttgcaaatgtgatattcttaaagttttggggattcaagtggttgttgaaaatggaacagaacctttgcaagttctaatgtcaaatgaactgcctgaaaccttatcacctagtgaagaggagacaaataatgaagtttctcctgcaggaacctcagataaagtaatccatgtggaggagaaccctacttctcagaataatgacatccagcctcattcagtagtggaagatgttcatccttcaccttgatggcatgacttttgaggaagtgtattaaacctgtatgtgaaatcaggtcctaatactgacaagcagtttgtctgtt

SEQ ID NO: 177220 - DNA, 1905 bp, Homo sapiens
  Payload ID: 14775
  Gene Symbol: RNF135
  Gene Name: ring finger protein 135
  Uniprot ID: Q8IUD6
  ENST ID: ENST00000324689
  CDS Start-End: 52-684
gagactcgcccggctcaaccccgacgtccgcgccccggccgcctgttggccatggcgggcctgggcctgggctccgccgttcccgtgtggctggccgaggacgacctcggctgcatcatctgccaggggctgctggactggcccgccacgctgccctgcggccacagcttctgccgccactgcctggaggccctgtggggcgcccgcgacgcccgccgctgggcctgccccacttgccgccagggcgccgcgcagcagccgcacctgcggaagaacacgctactgcaggacctggccgacaagtaccgccgcgccgcacgcgagatacaggcgggctccgaccctgcccactgcccctgcccgggctccagttccctctccagcgcggccgcgaggccccggcgccgcccggaactgcagcgggtggcagtagagaagagcatcacagaagttgctcaggagctgacagagctggtggaacatcttgtagacattgtcagaagcctgcagaatcagaggcccctatcagaatctggaccagacaacgaactgagcatcctgggcaaggagaactcctggaagccccgtcttcctcctcatgcccattgcctgaccagagccaccctgcactcaggagagcttctcggtttgctcagtgggccatccatccaacctttaacttgaagagcctttcctgcagcctggaggtgtccaaggattcccgtacagtgactgtgtctcaccgcccacaaccctatcgctggagctgtgagaggttttctaccagccaggtcttatgttcccaggccctgtcttctggaaagcattactgggaagtggacactaggaattgcagccactgggcagttggggtggcttcctgggagatgagccgcgaccaggtcctgggaaggactatggactcttgttgtgtggaatggaaggggactagccagctctctgcatggcacatggtcaaggaaactgtccttggctcagacagacctggggtggtgggcatctggctgaaccttgaggagggaaagcttgccttctattcagtggacaatcaggagaagcttctgtatgagtgtaccatctctgcctcctctcctttgtaccctgccttctggctgtatggcttacatcctggaaattacctgataataaagcaagtaaaggtgtaaggtttcctaagggattacaacacagtggtttcctggtctctctccctgtcatcaatcagggtagtaacttgacttaagaataccactttttagaaaaattacgatagagatgggatctcactaggttgcccaggctggtgtcgaattcctggtctcaagcagtcctcccacctcagcctcccaaggtgctgggattacaggtgtgagccaccacacctggccaagaataccacttttgaagttaatccttttgtgtgatacaggatgaacttgggatgtttgaaccctggacattccaaataaagaataggcccctgcctggctcctgggagataacctctaagccattagaatatcttgcctgataagagtgtttttgtttacctgtgggccttgggccatgcagtatcagcttgaccttgcaaggtcaagctgaggagactaagttagccatgtgggcagtgaagcatgccaatgtgatcaatccctagtaaaagccctggacacctaggcatgggtgagctactctggttggtaatactctgtgcacacatcattgtagccacacatcattgctgggagaattaagcattatcctgaagactctgccaggagaggataattggaagttctcttggaccttaccttatgtgcctttcttcattgctgattttaatctgtatcctttcactgtaataaactgtaactatgagtgcaa

SEQ ID NO: 177221 - DNA, 2892 bp, Homo sapiens
  Payload ID: 14775
  Gene Symbol: RNF135
  Gene Name: ring finger protein 135
  Uniprot ID: Q8IUD6
  ENST ID: ENST00000328381
  CDS Start-End: 874-2172
tttttaacctctttgggtcatctgggaggacgtggtgctcttttagctctaacattttctggttgcaatgcgtttaggactgggatgcgaagtgagtgagtgagtgagccttctcaggaaaacactttctagaattttgtccgagtgtctgttgggaaacgcgcttacatcccgcagaaggcggtaaggacacagcgcacaactctgcattatacctgcgagttaaaaagccaagggttcgctcactcaaccttgaatgcgcgtcagaatcacctgggggaggttttacaaaatacccgtgctccacccaagacaatgaaatcagactccctgcgagcggggccgaacatcagcatttttgaggacgctccctgtggctgtgcatcggtgatctttaatcccctgctacttgttagaggagctggatgacacttcgtgggctcattctcataaataagctgctgaatggagtcctctcctcccaagagttgtcggtgttgcatcttttttgttgtttatttttttttaagccaacggacgaagacatccaacggtgctgcatcttaatggagggacatccagctaaagggaatcttggagacctccgcgggtttctagcagctcgcggcatgttggtttcccagggcaagaggccgccactgaaggtcagctctgtctttccagctgggcactggaggctctaagtctgttttcagcaggatcggaggaaggagacggggtggcgccaaggaaggaggagaaaaggcggccgagaaaaggaggagggcaaggggaagaggaagggcgagggaggagcctgaggagactcgcccggctcaaccccgacgtccgcgccccggccgcctgttggccatggcgggcctgggcctgggctccgccgttcccgtgtggctggccgaggacgacctcggctgcatcatctgccaggggctgctggactggcccgccacgctgccctgcggccacagcttctgccgccactgcctggaggccctgtggggcgcccgcgacgcccgccgctgggcctgccccacttgccgccagggcgccgcgcagcagccgcacctgcggaagaacacgctactgcaggacctggccgacaagtaccgccgcgccgcacgcgagatacaggcgggctccgaccctgcccactgcccctgcccgggctccagttccctctccagcgcggccgcgaggccccggcgccgcccggaactgcagcgggtggcagtagagaagagcatcacagaagttgctcaggagctgacagagctggtggaacatcttgtagacattgtcagaagcctgcagaatcagaggcccctatcagaatctggaccagacaacgaactgagcatcctgggcaaggctttttcttctggggtggatctttccatggcttctccaaagctggtgacttccgacacagctgcagggaaaatcagagatattctccatgacctagaagaaattcaggaaaaattacaagaaagcgtcacctggaaagaggctcctgaagcacaaatgcagggagaactcctggaagccccgtcttcctcctcatgcccattgcctgaccagagccaccctgcactcaggagagcttctcggtttgctcagtgggccatccatccaacctttaacttgaagagcctttcctgcagcctggaggtgtccaaggattcccgtacagtgactgtgtctcaccgcccacaaccctatcgctggagctgtgagaggttttctaccagccaggtcttatgttcccaggccctgtcttctggaaagcattactgggaagtggacactaggaattgcagccactgggcagttggggtggcttcctgggagatgagccgcgaccaggtcctgggaaggactatggactcttgttgtgtggaatggaaggggactagccagctctctgcatggcacatggtcaaggaaactgtccttggctcagacagacctggggtggtgggcatctggctgaaccttgaggagggaaagcttgccttctattcagtggacaatcaggagaagcttctgtatgagtgtaccatctctgcctcctctcctttgtaccctgccttctggctgtatggcttacatcctggaaattacctgataataaagcaagtaaaggtgtaaggtttcctaagggattacaacacagtggtttcctggtctctctccctgtcatcaatcagggtagtaacttgacttaagaataccactttttagaaaaattacgatagagatgggatctcactaggttgcccaggctggtgtcgaattcctggtctcaagcagtcctcccacctcagcctcccaaggtgctgggattacaggtgtgagccaccacacctggccaagaataccacttttgaagttaatccttttgtgtgatacaggatgaacttgggatgtttgaaccctggacattccaaataaagaataggcccctgcctggctcctgggagataacctctaagccattagaatatcttgcctgataagagtgtttttgtttacctgtgggccttgggccatgcagtatcagcttgaccttgcaaggtcaagctgaggagactaagttagccatgtgggcagtgaagcatgccaatgtgatcaatccctagtaaaagccctggacacctaggcatgggtgagctactctggttggtaatactctgtgcacacatcattgtagccacacatcattgctgggagaattaagcattatcctgaagactctgccaggagaggataattggaagttctcttggaccttaccttatgtgcctttcttcattgctgattttaatctgtatcctttcactgtaataaactgtaactatgagtgcaaca

SEQ ID NO: 177222 - DNA, 1261 bp, Homo sapiens
  Payload ID: 14775
  Gene Symbol: RNF135
  Gene Name: ring finger protein 135
  ENST ID: ENST00000443677
  CDS Start-End: 91-579
agggcaaggggaagaggaagggcgagggaggagcctgaggagactcgcccggctcaaccccgacgtccgcgccccggccgcctgttggccatggcgggcctgggcctgggctccgccgttcccgtgtggctggccgaggacgacctcggctgcatcatctgccaggggctgctggactggcccgccacgctgccctgcggccacagcttctgccgccactgcctggaggccctgtggggcgcccgcgacgcccgccgctgggcctgccccacttgccgccagggcgccgcgcagcagccgcacctgcggaagaacacgctactgcaggacctggccgacaagtaccgccgcgccgcacgcgagatacaggcgggctccgaccctgcccactgcccctgcccgggctccagttccctctccagcgcggccgcgaggccccggcgccgcccggaactgcagcgggagaactcctggaagccccgtcttcctcctcatgcccattgcctgaccagagccaccctgcactcaggagagcttctcggtttgctcagtgggccatccatccaacctttaacttgaagagcctttcctgcagcctggaggtgtccaaggattcccgtacagtgactgtgtctcaccgcccacaaccctatcgctggagctgtgagaggttttctaccagccaggtcttatgttcccaggccctgtcttctggaaagcattactgggaagtggacactaggaattgcagccactgggcagttggggtggcttcctgggagatgagccgcgaccaggtcctgggaaggactatggactcttgttgtgtggaatggaaggggactagccagctctctgcatggcacatggtcaaggaaactgtccttggctcagacagacctggggtggtgggcatctggctgaaccttgaggagggaaagcttgccttctattcagtggacaatcaggagaagcttctgtatgagtgtaccatctctgcctcctctcctttgtaccctgccttctggctgtatggcttacatcctggaaattacctgataataaagcaagtaaaggtgtaaggtttcctaagggattacaacacagtggtttcctggtctctctccctgtcatcaatcagggtagtaacttgacttaagaataccactttttagaaaaattacgatagagatgggatctcactaggttgcccaggctggtgtcgaattcctggtctcaagcagtcctcccacctcagcct

SEQ ID NO: 177223 - DNA, 2098 bp, Homo sapiens
  Payload ID: 14775
  Gene Symbol: RNF135
  Gene Name: ring finger protein 135
  Uniprot ID: Q8IUD6
  ENST ID: ENST00000535306
  CDS Start-End: 15-875
gccgcctgttggccatggcgggcctgggcctgggctccgccgttcccgtgtggctggccgaggacgacctcggctgcatcatctgccaggggctgctggactggcccgccacgctgccctgcggccacagcttctgccgccactgcctggaggccctgtggggcgcccgcgacgcccgccgctgggcctgccccacttgccgccagggcgccgcgcagcagccgcacctgcggaagaacacgctactgcaggacctggccgacaagtaccgccgcgccgcacgcgagatacaggcgggctccgaccctgcccactgcccctgcccgggctccagttccctctccagcgcggccgcgaggccccggcgccgcccggaactgcagcgggtggcagtagagaagagcatcacagaagttgctcaggagctgacagagctggtggaacatcttgtagacattgtcagaagcctgcagaatcagaggcccctatcagaatctggaccagacaacgaactgagcatcctgggcaaggctttttcttctggggtggatctttccatggcttctccaaagctggtgacttccgacacagctgcagggaaaatcagagatattctccatgacctagaagaaattcaggaaaaattacaagaaagcgtcacctggaaagaggctcctgaagcacaaatgcagggttctctgttgcccaggctggagtgcagtggcacaatcactgcagcctcgatctctcaggctcaggagaactcctggaagccccgtcttcctcctcatgcccattgcctgaccagagccaccctgcactcaggagagcttctcggtttgctcagtgggccatccatccaacctttaacttgaagagcctttcctgcagcctggaggtgtccaaggattcccgtacagtgactgtgtctcaccgcccacaaccctatcgctggagctgtgagaggttttctaccagccaggtcttatgttcccaggccctgtcttctggaaagcattactgggaagtggacactaggaattgcagccactgggcagttggggtggcttcctgggagatgagccgcgaccaggtcctgggaaggactatggactcttgttgtgtggaatggaaggggactagccagctctctgcatggcacatggtcaaggaaactgtccttggctcagacagacctggggtggtgggcatctggctgaaccttgaggagggaaagcttgccttctattcagtggacaatcaggagaagcttctgtatgagtgtaccatctctgcctcctctcctttgtaccctgccttctggctgtatggcttacatcctggaaattacctgataataaagcaagtaaaggtgtaaggtttcctaagggattacaacacagtggtttcctggtctctctccctgtcatcaatcagggtagtaacttgacttaagaataccactttttagaaaaattacgatagagatgggatctcactaggttgcccaggctggtgtcgaattcctggtctcaagcagtcctcccacctcagcctcccaaggtgctgggattacaggtgtgagccaccacacctggccaagaataccacttttgaagttaatccttttgtgtgatacaggatgaacttgggatgtttgaaccctggacattccaaataaagaataggcccctgcctggctcctgggagataacctctaagccattagaatatcttgcctgataagagtgtttttgtttacctgtgggccttgggccatgcagtatcagcttgaccttgcaaggtcaagctgaggagactaagttagccatgtgggcagtgaagcatgccaatgtgatcaatccctagtaaaagccctggacacctaggcatgggtgagctactctggttggtaatactctgtgcacacatcattgtagccacacatcattgctgggagaattaagcattatcctgaagactctgccaggagaggataattggaagttctcttggaccttaccttatgtgcctttcttcattgctgattttaatctgtatcctttcactgtaataaactgtaactatgagtgcaaca

SEQ ID NO: 177224 - DNA, 475 bp, Homo sapiens
  Payload ID: 14775
  Gene Symbol: RNF135
  Gene Name: ring finger protein 135
  ENST ID: ENST00000580444
  CDS Start-End: 1-475
tctgccaggggctgctggactggcccgccacgctgccctgcggccacagcttctgccgccactgcctggaggccctgtggggcgcccgcgacgcccgccgctgggcctgccccacttgccgccagggcgccgcgcagcagccgcacctgcggaagaacacgctactgcaggacctggccgacaagtaccgccgcgccgcacgcgagatacaggcgggctccgaccctgcccactgcccctgcccgggctccagttccctctccagcgcggccgcgaggccccggcgccgcccggaactgcagcgggctttttcttctggggtggatctttccatggcttctccaaagctggtgacttccgacacagctgcagggaaaatcagagatattctccatgacctagaagaaattcaggaaaaattacaagaaagcgtcacctggaaagaggctcctgaagcacaaatgcagggagaact

SEQ ID NO: 177225 - DNA, 257 bp, Homo sapiens
  Payload ID: 14775
  Gene Symbol: RNF135
  Gene Name: ring finger protein 135
  ENST ID: ENST00000434242
  CDS Start-End: 1-257
ggaaagaggctcctgaagcacaaatgcagggttctctgttgcccaggctggagtgcagtggcacaatcactgcagcctcgatctctcaggctcaggagaactcctggaagccccgtcttcctcctcatgcccattgcctgaccagagccaccctgcactcaggagagcttctcggtttgctcagtgtccctccacggggggagctgattgcaaaggcaaagcaggttgagactctagacccaagagcactcagagtc

SEQ ID NO: 177226 - DNA, 2071 bp, Homo sapiens
  Payload ID: 14776
  Gene Symbol: RNF138
  Gene Name: ring finger protein 138, E3 ubiquitin protein ligase
  Uniprot ID: Q8WVD3
  ENST ID: ENST00000257190
  CDS Start-End: 88-543
gttcatgtagggagtcgggccccgggccgccaccgtcacctcggccgctgccgctgtcgccatcgccttgtttccccatcccccgccatggccgaggacctctctgcggccacgtcctacaccgaagatgatttctactgccccgtctgtcaggaggtgctcaaaacgcccgtgcggaccacggcctgtcagcacgtcaataggagtgaaacatccacatctgataacacagaaacttaccaagagaatacaagttcttctggtcatcctacttttaagtgtcccctgtgtcaagaatcaaattttaccagacagcgtttactggatcactgtaacagtaatcacctatttcagatagttcctgtgacatgtcctatttgtgtgtctcttccttggggagatcctagccagattaccagaaatttcgttagtcatctaaatcagagacatcaatttgattatggagaatttgtgaatcttcagctagatgaagaaacccaataccaaactgctgttgaagaatcttttcaagtaaacatctgaaggctgtagacatctctgcatctttgtacctgcaagtgccatctttaagggggaaactacatgaagtcaccgttacagtaacttgatgtgtatattaataaaagtaattcagtcattttagtttttgattgaaaataaaggtagggcttctaaaaacttcatcatcttgataagttaaaaaatgaaagttatgacattagctttaaaggtgtaaaaaagatgtttcactaatgtaacggtgaaagagaatccctgttgtactttatctttttgtaatattatttttgaatttttcattattatgttgcttttgaaatttgatgcattcctcccatttactttattattgtacacatttaacacacagtagcaaattttgaacgatgtgattgatataacctaacaaatctgagccagttattattagagttgcagaatagaaacttgaagtgctaaatggaataatccaaaggaaattttttaaatgcaggttctagctgaaaaattcaactataagaaaattgtatttatataacatttactatttttgaagactagtgagatttctgtaataattttaattctttaaaaagtgaaagcttgttgtaaagatattttctttttgttattagaaggaaatacaaagagaaaaatttctttctttcatgggcatttgataatttcagtctttgactgatttgtaagcctagaatatactaagctgaataacagctctttggcctcagaattttcagtagccagtatttctgattaactaagttgaaactcttattagaaactttcagttggtgatattgtattctagaagatataaatgagaggtttggcttcatctcagtttagaaatttattcaaagctaaagatgtatatatacatatacttttgtgtgtatatatacacatatgtgtgtatgcagtttgtcaggttatatatagaatttctattaaggattttttaaatggacaagcaatagggggttgaagtgtttatctgatttgtttaaaattttgtatatcaccaaatttttaaaaagtgatagtcacagtgctaagttatctagttggctactattacaccttaaaaattgagtttacacacacacaattacctgtttatatggtgctcatttgttattctcaaatataatgtgtgaccgtgatatagtgagaaagattctaccaaccactgtttcactactttttagttaaaattgggtatgttcttaatattcattagtgagaatcacaaagtattttgtagaaggcccaaatcacagaataaaggactaagagtggatttgctgacattccatactaatatacattgtttatgctttctttaaaataactagaagaacataaaagaaagagaatctcagaagtagtttgctgctaatatatacatatattgtataaaaaggtatattttggttttgttaaaacccttgttgacttttctacactgaacattttttttaacttgatttaataaaaatgttaattttgg

SEQ ID NO: 177227 - DNA, 3570 bp, Homo sapiens
  Payload ID: 14776
  Gene Symbol: RNF138
  Gene Name: ring finger protein 138, E3 ubiquitin protein ligase
  Uniprot ID: Q8WVD3
  ENST ID: ENST00000261593
  CDS Start-End: 459-1196
gtcacaacccgcggaaggcgccgtgcgccggttgctatacaggccgcacttcacaccccgtgcctccccgcctctcctggctcctccgcccagatccccggcgctcccgcgttcggtgacggccgggtaggctgtaggcagcgcaatgccaagacagagctgctggcggcggcgggcgaatctccctgcaccatgagcctcggctccggccccgttaggggccgataagcacagcgcacgccgccctccatttgccccggggcctcggctgcgaagatagcggcggccggacaggaagctcgaggaaagcgctgggccgggtctctacgaacacgtgaaggaaaagcagctccgtccacaacgccgcttcggggctcctagggagtcgggccccgggccgccaccgtcacctcggccgctgccgctgtcgccatcgccttgtttccccatcccccgccatggccgaggacctctctgcggccacgtcctacaccgaagatgatttctactgccccgtctgtcaggaggtgctcaaaacgcccgtgcggaccacggcctgtcagcacgttttctgtagaaaatgtttcctgactgcaatgagggaaagcggagcacattgtcccctatgtcgtggaaatgtgactagaagagagagagcatgtcctgaacgggccttagaccttgaaaatataatgaggaagttttctggtagctgcagatgctgtgcaaaacagattaaattctatcgcatgagacatcattacaaatcttgtaagaagtatcaggatgaatatggtgtttcttctatcattccaaactttcagatctctcaagattcagtagggaacagcaataggagtgaaacatccacatctgataacacagaaacttaccaagagaatacaagttcttctggtcatcctacttttaagtgtcccctgtgtcaagaatcaaattttaccagacagcgtttactggatcactgtaacagtaatcacctatttcagatagttcctgtgacatgtcctatttgtgtgtctcttccttggggagatcctagccagattaccagaaatttcgttagtcatctaaatcagagacatcaatttgattatggagaatttgtgaatcttcagctagatgaagaaacccaataccaaactgctgttgaagaatcttttcaagtaaacatctgaaggctgtagacatctctgcatctttgtacctgcaagtgccatctttaagggggaaactacatgaagtcaccgttacagtaacttgatgtgtatattaataaaagtaattcagtcattttagtttttgattgaaaataaaggtagggcttctaaaaacttcatcatcttgataagttaaaaaatgaaagttatgacattagctttaaaggtgtaaaaaagatgtttcactaatgtaacggtgaaagagaatccctgttgtactttatctttttgtaatattatttttgaatttttcattattatgttgcttttgaaatttgatgcattcctcccatttactttattattgtacacatttaacacacagtagcaaattttgaacgatgtgattgatataacctaacaaatctgagccagttattattagagttgcagaatagaaacttgaagtgctaaatggaataatccaaaggaaattttttaaatgcaggttctagctgaaaaattcaactataagaaaattgtatttatataacatttactatttttgaagactagtgagatttctgtaataattttaattctttaaaaagtgaaagcttgttgtaaagatattttctttttgttattagaaggaaatacaaagagaaaaatttctttctttcatgggcatttgataatttcagtctttgactgatttgtaagcctagaatatactaagctgaataacagctctttggcctcagaattttcagtagccagtatttctgattaactaagttgaaactcttattagaaactttcagttggtgatattgtattctagaagatataaatgagaggtttggcttcatctcagtttagaaatttattcaaagctaaagatgtatatatacatatacttttgtgtgtatatatacacatatgtgtgtatgcagtttgtcaggttatatatagaatttctattaaggattttttaaatggacaagcaatagggggttgaagtgtttatctgatttgtttaaaattttgtatatcaccaaatttttaaaaagtgatagtcacagtgctaagttatctagttggctactattacaccttaaaaattgagtttacacacacacaattacctgtttatatggtgctcatttgttattctcaaatataatgtgtgaccgtgatatagtgagaaagattctaccaaccactgtttcactactttttagttaaaattgggtatgttcttaatattcattagtgagaatcacaaagtattttgtagaaggcccaaatcacagaataaaggactaagagtggatttgctgacattccatactaatatacattgtttatgctttctttaaaataactagaagaacataaaagaaagagaatctcagaagtagtttgctgctaatatatacatatattgtataaaaaggtatattttggttttgttaaaacccttgttgacttttctacactgaacattttttttaacttgatttaataaaaatgttaattttggaagtgcagttttgtaaaaacctttttcagtcaaacagtaaagactttatttatggattgtaataacaaccacaagaaaagccatacatcttaatgaacatacgcctttgttctgtcattttaaagagtggtgtttactatgtgtgtgcttgagcattttctttcagttacatgggtgtaatttaaaaaacagctcctttttaagacttttgaccatagtgttttccagtttaaagcaataactttcatagtttctttcaaagtttaatacatccaatatgtcaagttaaaccattctgggatttgcaaagtttaatacatccaatatgtcaagttaaaccattctgggatttgcaaagtttaatacatccaatatgtcaagttaaaccattctgggatttgggaacttctttaaaggaaaattgtagtagaggtcatcttgatggaattgtgttttaaagttttgtgaatgagttaaatatcattgatagtcttgtgtgtctcacatatcagctttttcataaggaaaatactttatttgcttttatctgagaatttctcagtatgaaaatgattgtttaaaatttcccctctttttgtcagtgcattgggaatagggatagactttacagatttatggaaattaaatttatggggaaaagtttatttttaatattacttatagctgagtcagaattaaaggagggaattgtattgatactccaatacctaaatttcacaataccacttaggaaagctatttcaacaaattacagttttattgttaaaacagagtcttatttgagatgtattgctttatttttcaattaaaagtggttttctccta

SEQ ID NO: 177228 - DNA, 613 bp, Homo sapiens
  Payload ID: 14776
  Gene Symbol: RNF138
  Gene Name: ring finger protein 138, E3 ubiquitin protein ligase
  ENST ID: ENST00000578914
  CDS Start-End: 374-613
atacaggccgcacttcacaccccgtgcctccccgcctctcctggctcctccgcccagatccccggcgctcccgcgttcggtgacggccgggtaggctgtaggcagcgcaatgccaagacagagctgctggcggcggcgggcgaatctccctgcaccatgagcctcggctccggccccgttaggggccgataagcacagcgcacgccgccctccatttgccccggggcctcggctgcgaagatagcggcggccggacaggaagctcgaggaaagcgctgggccgggtctctacgaacacgtgaaggaaaagcagctccgtccacaacgccgcttcggggctcctagtttctgtagaaaatgtttcctgactgcaatgagggaaagcggagcacattgtcccctatgtcgtggaaatgtgactagaagagagagagcatgtcctgaacgggccttagaccttgaaaatataatgaggaagttttctggtagctgcagatgctgtgcaaaacagattaaattctatcgcatgagacatcattacaaatcttgtaagaagtatcaggatgaatatggtgtttcttctatcattccaaactttcagatctctcaagat

SEQ ID NO: 177229 - DNA, 493 bp, Homo sapiens
  Payload ID: 14776
  Gene Symbol: RNF138
  Gene Name: ring finger protein 138, E3 ubiquitin protein ligase
  ENST ID: ENST00000578107
  CDS Start-End: 168-493
gttcggccccgccctacccagggccccgcccccttcctggcgcgcgctgtatcctgatgcgatccccctcccccctccgggttcatgtagggagtcgggccccgggccgccaccgtcacctcggccgctgccgctgtcgccatcgccttgtttccccatcccccgccatggccgaggacctctctgcggccacgtcctacaccgaagatgatttctactgccccgtctgtcaggaggtgctcaaaacgcccgtgcggaccacggcctgtcagcacgttttctgtagaaaatgtttcctgactgcaatgagggaaagcggagcacattgtcccctatgtcgtggaaatgtgactagaagagagagagcatgtcctgaacgggccttagaccttgaaaatataatgaggaagttttctggtagctgcagatgctgtgcaaaacagattaaattctatcgcatgagacatcattacaaatcttgtaagaagtatca

SEQ ID NO: 177230 - DNA, 503 bp, Homo sapiens
  Payload ID: 14776
  Gene Symbol: RNF138
  Gene Name: ring finger protein 138, E3 ubiquitin protein ligase
  ENST ID: ENST00000580499
  CDS Start-End: 76-503
agtcgggccccgggccgccaccgtcacctcggccgctgccgctgtcgccatcgccttgtttccccatcccccgccatggccgaggacctctctgcggccacgtcctacaccgaagatgatttctactgccccgtctgtcaggaggtgctcaaaacgcccgtgcggaccacggcctgtcagcacgttttctgtagaaaatgtttcctgactgcaatgagggaaagcggagcacattgtcccctatgtcgtggaaatgtgactagaagagagagagcatgtcctgaacgggccttagaccttgaaaatataatgaggaagttttctggtagctgcagatgctgtgcaaaacagattaaattctatcgcatgagacatcattacaaatcttgtaagaagtatcaggatgaatatggtgtttcttctatcattccaaactttcagatctctcaagattcagtagggaacagttcttctggtcatcctacttttaagtgtcccctgtg

SEQ ID NO: 177231 - DNA, 420 bp, Homo sapiens
  Payload ID: 14776
  Gene Symbol: RNF138
  Gene Name: ring finger protein 138, E3 ubiquitin protein ligase
  ENST ID: ENST00000577999
  CDS Start-End: 1-201
agtgaaacatccacatctgataacacagaaacttaccaagagaatacaagttcttctggtcatcctacttttaagtgtcccctgtgtcaagaatcaaattttaccagacagcgtttactggatcactgtaacagtaatcacctatttcagatagttcctgtgatcctagccagattaccagaaatttcgttagtcatctaaatcagagacatcaatttgattatggagaatttgtgaatcttcagctagatgaagaaacccaataccaaactgctgttgaagaatcttttcaagtaaacatctgaaggctgtagacatctctgcatctttgtacctgcaagtgccatctttaagggggaaactacatgaagtcaccgttacagtaacttgatgtgtatattaataaaagtaattcagtca

SEQ ID NO: 177232 - DNA, 2637 bp, Homo sapiens
  Payload ID: 14777
  Gene Symbol: RNF139
  Gene Name: ring finger protein 139
  Uniprot ID: Q8WU17
  ENST ID: ENST00000303545
  CDS Start-End: 373-2367
gactgacggcgcagcctccgggcctagccacagcagcaacggcagaggccagcgggcgaggtcaagatggtggctccgcgggcgggggaggcagtggagggaggaggagtcagaccttagccagccggaaacaccgaaacccagagacctcctggggagccgccgccgccgccctctcggccatcgctgcctccgccgcctgctccacctcgagggacgcgagcgggcggcggggctggccgtgagagagacaggagaggaaggagggcaggggcggagttgcccgccttagcccccgcccccggccgcggccccgggccctgccccgcgcggccctgcccggcccaccgagccctggtgtggcagcggctcatggcggccgtggggcccccgcagcagcaggtgcggatggcccatcagcaggtctgggcggcgctcgaagtggcgctccgggtgccctgcctttacatcatcgacgccatcttcaactcctacccggattccagccaaagccggttctgcatcgtgctccagatcttcctccggctctttggtgtatttgcatccagtattgttctgatcttgtcacaacgatcacttttcaagttttacacgtacagctcagcctttctgttagctgcaacttcagtgttggtgaattattatgcttctttgcacattgacttctatggtgcctacaacacgtcagcttttggaattgagctgcttcctcgaaaaggtccctcgctgtggatggcacttatcgttctacagctaacatttggaattggatacgttacactactccagattcattccatctattcacaattaattattttggatctcttggttcctgtaataggcttaatcacagagctaccattacacatcagagagactttactgtttacttcttccttgattctcacattaaatacagtgtttgtcctggcagtgaaactgaagtggttttattattccacacgatatgtttatcttttggtgaggcacatgtatcgaatttacggattacagttattgatggaggacacatggaagaggattcgtttcccagacatactacgagtcttttggctaacaagagttacagctcaggctacagtgttaatgtacatcttaaggatggcaaatgaaactgattccttctttatttcttgggatgatttttgggacctcatttgcaatcttataattagtgggtgcgattctacactaactgtactgggcatgagtgctgtaatttcctcagtagcccattatttggggcttggaatattggcctttattggatcaactgaggaagatgacaggcgtcttggctttgttgcacctgttttattttttattttggctcttcagactgggttaagtgggctaagaccagaagagagacttattcgcttaagtagaaacatgtgccttttattaactgcagtcctgcattttatccatggaatgacagaccctgtattaatgtctctcagtgcctctcatgtgtcatcttttcgtagacattttcctgtgctgtttgtctctgcttgcctgtttattcttcctgtcttactcagttatgttctttggcatcactatgcactaaatacatggttgtttgcagttacagcattttgtgtggaactgtgcttaaaagtaattgtttctctcactgtttatacgttattcatgattgatggctactataatgtcctctgggaaaagcttgacgattatgtctactacgttcgttcaacaggcagtattattgaatttatatttggagttgtaatgtttggaaatggggcttacactatgatgtttgagtcgggaagtaaaattcgggcttttatgatgtgcctacatgcatattttaacatctacttacaagccaaaaatggctggaagacatttatgaatcgtaggactgctgtgaagaaaattaattcacttcctgaaataaaagggagccgcttacaagaaataaatgatgtatgtgcaatctgctatcatgagtttacaacatctgctcgtattacaccgtgtaatcattatttccatgcactttgccttcggaaatggctgtacattcaagatacttgtccaatgtgccatcagaaagtatacatcgaagatgatatcaaggataattcaaatgtatctaacaacaatggatttattccacccaatgaaactccagaggaagctgtaagagaagctgctgctgaatctgacagggaattgaacgaagatgacagtacagattgtgatgatgatgttcaaagagaaagaaatggagtgattcagcacacaggcgcagcagctgaagaatttaatgatgatactgactgatgaaaatagcatttattaatgattgaggtatttgtttaaaattcagttcatccaaaatggagtaatatccttcaccttcagtgtgtaaccaagcacaaaaacagtatcaatgttgaatctgtgaatggttttccgtttactgtgatgtgctactgtaaatatacctctttaattacttctggtctctttggtgacctgtttaaatttgtgtacattattgtacatagaataaaatgttttcacatttttatgacaaaatttgaacaaata

SEQ ID NO: 177233 - DNA, 467 bp, Homo sapiens
  Payload ID: 14777
  Gene Symbol: RNF139
  Gene Name: ring finger protein 139
  ENST ID: ENST00000517684
  CDS Start-End: 264-467
agtggattgtgaaatgcgtctactgtaataatatgcaatgtcttgattacctgctgaaataaggtgtatttgcatccagtattgttctgatcttgtcacaacgatcacttttcaagttttacacgtacagctcagcctttctgttagctgcaacttcagtgttggtgaattattatgcttctttgcacattgacttctatggtgcctacaacacgtcagcttttggaattgagctgcttcctcgaaaaggtccctcgctgtggatggcacttatcgttctacagctaacatttggaattggatacgttacactactccagattcattccatctattcacaattaattattttggatctcttggttcctgtaataggcttaatcacagagctaccattacacatcagagagactttactgtttacttcttccttgattctcacattaaatacagtgtttgtcctggca

SEQ ID NO: 177234 - DNA, 4213 bp, Homo sapiens
  Payload ID: 14778
  Gene Symbol: RNF14
  Gene Name: ring finger protein 14
  Uniprot ID: Q9UBS8
  ENST ID: ENST00000347642
  CDS Start-End: 289-1713
aaaaattcgaattctcgggccccatcagaactactgaaaagagcctcctgtgagcacagggctcgcagtaagtgggggtgacggtggtcgcgccggcagcgccgccttgggcctgcgggaggcgcccgagaggcaggggcgaccacggcggctgcgcagagtcctccctatgccggcggtcgcgccagcgggatccgcctggctcagctgacagctcccgagaacggaagaggcggcgcgccggttgagcagggcgtctctaggcctggtcggctggcggcggtccttatgtcgtcagaagatcgagaagctcaggaggatgaattgctggccctggcaagtatttacgatggagatgaatttagaaaagcagagtctgtccaaggtggagaaaccaggatctatttggatttgccacagaatttcaagatatttgtgagcggcaattcaaatgagtgtctccagaatagtggctttgaatacaccatttgctttctgcctccacttgtgctgaactttgaactgccaccagattatccatcctcttccccaccttcattcacacttagtggcaaatggctgtcaccaactcagctatctgctctatgcaagcacttagacaacctatgggaagaacaccgtggcagcgtggtcctgtttgcctggatgcaatttcttaaggaagagaccctagcatacttgaatattgtctctccttttgagctcaagattggttctcagaaaaaagtgcagagaaggacagctcaagcttctcccaacacagagctagattttggaggagctgctggatctgatgtagaccaagaggaaattgtggatgagagagcagtgcaggatgtggaatcactgtcaaatctgatccaggaaatcttggactttgatcaagctcagcagataaaatgctttaatagtaaattgttcctgtgcagtatctgtttctgtgagaagctgggtagtgaatgcatgtacttcttggagtgcaggcatgtgtactgcaaagcctgtctgaaggactactttgaaatccagatcagagatggccaggttcaatgcctcaactgcccagaaccaaagtgcccttcggtggccactcctggtcaggtcaaagagttagtggaagcagagttatttgcccgttatgaccgccttctcctccagtcctccttggacctgatggcagatgtggtgtactgcccccggccgtgctgccagctgcctgtgatgcaggaacctggctgcaccatgggtatctgctccagctgcaattttgccttctgtactttgtgcaggttgacctaccatggggtctccccatgtaaggtgactgcagagaaattaatggacttacgaaatgaatacctgcaagcggatgaggctaataaaagacttttggatcaaaggtatggtaagagagtgattcagaaggcactggaagagatggaaagtaaggagtggctagagaagaactcaaagagctgcccatgttgtggaactcccatagagaaattagacggatgtaacaagatgacatgtactggctgtatgcaatatttctgttggatttgcatgggttctctctctagagcaaacccttacaaacatttcaatgaccctggttcaccatgttttaaccggctgttttatgctgtggatgttgacgacgatatttgggaagatgaggtagaagactagttaactactgctcaagatatggaagtggattgtttttccctaatcttccgtcaagtacacaaagtaactttgcgggatatttagggtactattcattcactcttcctgcgtagaagatatggaagaacgaggtttatattttcatgtggtactactgaagaaggtgcattgatacatttttaaatgtaagttgagaaaaatttataagccaaaggttcagaaaattaaactacagaatattaaatattataatgtgcccaaagctctgaatagttaaaaattaaatatttattttcttccccaagctttaggtaaggagaagaggggtcaagagttaaacttagagaccctttgtctctgagaagcatccttctaagacattctgttggagttccctcagtactattccttacaactggagtgggtagaagccttatgaaaattatactgagaacctgatctcgtttactccatgttaatcacattcctaccaacctaaatttctgccaagtcagttctctttggaggaagcccattactccgtaactgactggatggtccagtgtcattttgatctgcttttcagaatggaaatttataatataaatatatgttttaataccacaaacactgtggggcacttgatatttattagtggtgtatatggtccactggtttcaggccaaatctagaatttagtgatactggctcagaagaatttaagttctattcagccttcctgggtgttagaacctagattcaaaatggcttgtctttgctacttttgttccacattctctctctttacctttgccctaccttctgtttgtaaggatgattttaatattaattccaggaacacatgtttttatttcctctgctggaataggagaaagcttaatatattcccaagctgaatgttcttgaattatatctgcatttaccactgtatatgcatatagtgacagtataacctgtctatactacagtagttccagtcctaactttctgaattatttttaaagatcttctctaacaagctatgggaatttggcttcatactctttctttgcaacagcagtgttctgggtgataattttgaattgatacctgttcctttttctgggttttgttggctttttgaaaaattgtctttccttatcattggtgggaggcttggtagcaaagtaacattttttggaaaagaggacagaaaaattgaactacagcttgagaacgtattctttttttcctactttgttattgcaaattgaggaatcacttttaactgttttaggtgtgtgtgtccagagtgagcaaggattatgtttttggattgtcaaagaggatgcttagtcttaaaataaaaataaatttaaaaatcatcttataattagaacagagttgctgctatttgttctgtcaccaaggcaactaatcacattttaaaactgttcggcatataacatattcttaaagtaagaaaaaaaaggtcacagaatagcatctcttttacctgggcttgtgactgagcttaggttttagggcccatattttgtttaaaccagatagtttcatggtcttccattcaggacattttgtgtaaaaattgaggttaatttgctgggcacagtggctcacgcctgtaatcccagcactttgggaggcctaggcgggcggatcacgaggtcaggagttcgagaccatcatggctaacacggtgaaaccccgtctctactaaaaatacaaaaaattagctgggcatggtggcaggcgcctgtagtcccagctactcaggaggctgaggcaggagaatggcatgaacctgggaggtggagcttgcagtgagccgagatagcgccactgcactccagcctgagcgacagagcgagactccttctcaaaaaaaaaaaaaaaaaaaattgaggttaaagaataaattaaagataagaaatggaaattaaaatgatttgttctacagtatatacctgagaagagtgatttctgtgatcaaagagttcaattcagatttattcagaaagagctactcagaagctctatagttcgtgagctacttgatattttctagagatcattttatgttaagctgttatacattgttgatgatgtcatagaagtaggaaagaagcctttataatacagttttatgaaagaaatgggagccttttttcccatttatgatattaaaaacaacacaggtatttggtgtttagtctcaaaaatttgtttggtcaccttagtgattcttaggtacaaagtcttcatcactcaattttaacaaagaaaatagggcttataaagttatacttttgaagcatgagttatgagctaattttaagatgtatagttttggtagagtacttttgtctcagtaaaatgaaagatttgggtaactccccaaatgccctgtaaaacaaatgggtttgtggaaggttgtggtgtcagcaaaatatatgatagaataaagagttttgtacct

SEQ ID NO: 177235 - DNA, 3999 bp, Homo sapiens
  Payload ID: 14778
  Gene Symbol: RNF14
  Gene Name: ring finger protein 14
  Uniprot ID: Q9UBS8
  ENST ID: ENST00000356143
  CDS Start-End: 75-1499
gtgcatgggcttcctcacttttttcctcacgaagaggtctctggtctcccctctctgagcactctgaggtccttatgtcgtcagaagatcgagaagctcaggaggatgaattgctggccctggcaagtatttacgatggagatgaatttagaaaagcagagtctgtccaaggtggagaaaccaggatctatttggatttgccacagaatttcaagatatttgtgagcggcaattcaaatgagtgtctccagaatagtggctttgaatacaccatttgctttctgcctccacttgtgctgaactttgaactgccaccagattatccatcctcttccccaccttcattcacacttagtggcaaatggctgtcaccaactcagctatctgctctatgcaagcacttagacaacctatgggaagaacaccgtggcagcgtggtcctgtttgcctggatgcaatttcttaaggaagagaccctagcatacttgaatattgtctctccttttgagctcaagattggttctcagaaaaaagtgcagagaaggacagctcaagcttctcccaacacagagctagattttggaggagctgctggatctgatgtagaccaagaggaaattgtggatgagagagcagtgcaggatgtggaatcactgtcaaatctgatccaggaaatcttggactttgatcaagctcagcagataaaatgctttaatagtaaattgttcctgtgcagtatctgtttctgtgagaagctgggtagtgaatgcatgtacttcttggagtgcaggcatgtgtactgcaaagcctgtctgaaggactactttgaaatccagatcagagatggccaggttcaatgcctcaactgcccagaaccaaagtgcccttcggtggccactcctggtcaggtcaaagagttagtggaagcagagttatttgcccgttatgaccgccttctcctccagtcctccttggacctgatggcagatgtggtgtactgcccccggccgtgctgccagctgcctgtgatgcaggaacctggctgcaccatgggtatctgctccagctgcaattttgccttctgtactttgtgcaggttgacctaccatggggtctccccatgtaaggtgactgcagagaaattaatggacttacgaaatgaatacctgcaagcggatgaggctaataaaagacttttggatcaaaggtatggtaagagagtgattcagaaggcactggaagagatggaaagtaaggagtggctagagaagaactcaaagagctgcccatgttgtggaactcccatagagaaattagacggatgtaacaagatgacatgtactggctgtatgcaatatttctgttggatttgcatgggttctctctctagagcaaacccttacaaacatttcaatgaccctggttcaccatgttttaaccggctgttttatgctgtggatgttgacgacgatatttgggaagatgaggtagaagactagttaactactgctcaagatatggaagtggattgtttttccctaatcttccgtcaagtacacaaagtaactttgcgggatatttagggtactattcattcactcttcctgcgtagaagatatggaagaacgaggtttatattttcatgtggtactactgaagaaggtgcattgatacatttttaaatgtaagttgagaaaaatttataagccaaaggttcagaaaattaaactacagaatattaaatattataatgtgcccaaagctctgaatagttaaaaattaaatatttattttcttccccaagctttaggtaaggagaagaggggtcaagagttaaacttagagaccctttgtctctgagaagcatccttctaagacattctgttggagttccctcagtactattccttacaactggagtgggtagaagccttatgaaaattatactgagaacctgatctcgtttactccatgttaatcacattcctaccaacctaaatttctgccaagtcagttctctttggaggaagcccattactccgtaactgactggatggtccagtgtcattttgatctgcttttcagaatggaaatttataatataaatatatgttttaataccacaaacactgtggggcacttgatatttattagtggtgtatatggtccactggtttcaggccaaatctagaatttagtgatactggctcagaagaatttaagttctattcagccttcctgggtgttagaacctagattcaaaatggcttgtctttgctacttttgttccacattctctctctttacctttgccctaccttctgtttgtaaggatgattttaatattaattccaggaacacatgtttttatttcctctgctggaataggagaaagcttaatatattcccaagctgaatgttcttgaattatatctgcatttaccactgtatatgcatatagtgacagtataacctgtctatactacagtagttccagtcctaactttctgaattatttttaaagatcttctctaacaagctatgggaatttggcttcatactctttctttgcaacagcagtgttctgggtgataattttgaattgatacctgttcctttttctgggttttgttggctttttgaaaaattgtctttccttatcattggtgggaggcttggtagcaaagtaacattttttggaaaagaggacagaaaaattgaactacagcttgagaacgtattctttttttcctactttgttattgcaaattgaggaatcacttttaactgttttaggtgtgtgtgtccagagtgagcaaggattatgtttttggattgtcaaagaggatgcttagtcttaaaataaaaataaatttaaaaatcatcttataattagaacagagttgctgctatttgttctgtcaccaaggcaactaatcacattttaaaactgttcggcatataacatattcttaaagtaagaaaaaaaaggtcacagaatagcatctcttttacctgggcttgtgactgagcttaggttttagggcccatattttgtttaaaccagatagtttcatggtcttccattcaggacattttgtgtaaaaattgaggttaatttgctgggcacagtggctcacgcctgtaatcccagcactttgggaggcctaggcgggcggatcacgaggtcaggagttcgagaccatcatggctaacacggtgaaaccccgtctctactaaaaatacaaaaaattagctgggcatggtggcaggcgcctgtagtcccagctactcaggaggctgaggcaggagaatggcatgaacctgggaggtggagcttgcagtgagccgagatagcgccactgcactccagcctgagcgacagagcgagactccttctcaaaaaaaaaaaaaaaaaaaattgaggttaaagaataaattaaagataagaaatggaaattaaaatgatttgttctacagtatatacctgagaagagtgatttctgtgatcaaagagttcaattcagatttattcagaaagagctactcagaagctctatagttcgtgagctacttgatattttctagagatcattttatgttaagctgttatacattgttgatgatgtcatagaagtaggaaagaagcctttataatacagttttatgaaagaaatgggagccttttttcccatttatgatattaaaaacaacacaggtatttggtgtttagtctcaaaaatttgtttggtcaccttagtgattcttaggtacaaagtcttcatcactcaattttaacaaagaaaatagggcttataaagttatacttttgaagcatgagttatgagctaattttaagatgtatagttttggtagagtacttttgtctcagtaaaatgaaagatttgggtaactccccaaatgccctgtaaaacaaatgggtttgtggaaggttgtggtgtcagcaaaatatatgatagaataaagagttttgtacct

SEQ ID NO: 177236 - DNA, 2905 bp, Homo sapiens
  Payload ID: 14778
  Gene Symbol: RNF14
  Gene Name: ring finger protein 14
  Uniprot ID: Q9UBS8
  ENST ID: ENST00000394514
  CDS Start-End: 464-1510
ggaagaggcggcgcgccggttgagcagggcgtctctaggcctggtcggctggcggcgatggcaggattttcataatatatgtagtatgagttccacatcttggcctcttacccagcttcagcagtctcagctccaccagttagagaataaatgggatttgcatgaactccactctgagctgaaatacagactgcggtgttaatatccttttcttctgattgttattaacaggtccttatgtcgtcagaagatcgagaagctcaggaggatgaattgctggccctggcaagtatttacgatggagatgaatttagaaaagcagagtctgtccaaggtggagaaaccaggatctatttggatttgccacagaatttcaagatatttgtgagcgctatctgctctatgcaagcacttagacaacctatgggaagaacaccgtggcagcgtggtcctgtttgcctggatgcaatttcttaaggaagagaccctagcatacttgaatattgtctctccttttgagctcaagattggttctcagaaaaaagtgcagagaaggacagctcaagcttctcccaacacagagctagattttggaggagctgctggatctgatgtagaccaagaggaaattgtggatgagagagcagtgcaggatgtggaatcactgtcaaatctgatccaggaaatcttggactttgatcaagctcagcagataaaatgctttaatagtaaattgttcctgtgcagtatctgtttctgtgagaagctgggtagtgaatgcatgtacttcttggagtgcaggcatgtgtactgcaaagcctgtctgaaggactactttgaaatccagatcagagatggccaggttcaatgcctcaactgcccagaaccaaagtgcccttcggtggccactcctggtcaggtcaaagagttagtggaagcagagttatttgcccgttatgaccgccttctcctccagtcctccttggacctgatggcagatgtggtgtactgcccccggccgtgctgccagctgcctgtgatgcaggaacctggctgcaccatgggtatctgctccagctgcaattttgccttctgtactttgtgcaggttgacctaccatggggtctccccatgtaaggtgactgcagagaaattaatggacttacgaaatgaatacctgcaagcggatgaggctaataaaagacttttggatcaaaggtatggtaagagagtgattcagaaggcactggaagagatggaaagtaaggagtggctagagaagaactcaaagagctgcccatgttgtggaactcccatagagaaattagacggatgtaacaagatgacatgtactggctgtatgcaatatttctgttggatttgcatgggttctctctctagagcaaacccttacaaacatttcaatgaccctggttcaccatgttttaaccggctgttttatgctgtggatgttgacgacgatatttgggaagatgaggtagaagactagttaactactgctcaagatatggaagtggattgtttttccctaatcttccgtcaagtacacaaagtaactttgcgggatatttagggtactattcattcactcttcctgcgtagaagatatggaagaacgaggtttatattttcatgtggtactactgaagaaggtgcattgatacatttttaaatgtaagttgagaaaaatttataagccaaaggttcagaaaattaaactacagaatattaaatattataatgtgcccaaagctctgaatagttaaaaattaaatatttattttcttccccaagctttaggtaaggagaagaggggtcaagagttaaacttagagaccctttgtctctgagaagcatccttctaagacattctgttggagttccctcagtactattccttacaactggagtgggtagaagccttatgaaaattatactgagaacctgatctcgtttactccatgttaatcacattcctaccaacctaaatttctgccaagtcagttctctttggaggaagcccattactccgtaactgactggatggtccagtgtcattttgatctgcttttcagaatggaaatttataatataaatatatgttttaataccacaaacactgtggggcacttgatatttattagtggtgtatatggtccactggtttcaggccaaatctagaatttagtgatactggctcagaagaatttaagttctattcagccttcctgggtgttagaacctagattcaaaatggcttgtctttgctacttttgttccacattctctctctttacctttgccctaccttctgtttgtaaggatgattttaatattaattccaggaacacatgtttttatttcctctgctggaataggagaaagcttaatatattcccaagctgaatgttcttgaattatatctgcatttaccactgtatatgcatatagtgacagtataacctgtctatactacagtagttccagtcctaactttctgaattatttttaaagatcttctctaacaagctatgggaatttggcttcatactctttctttgcaacagcagtgttctgggtgataattttgaattgatacctgttcctttttctgggttttgttggctttttgaaaaattgtctttccttatcattggtgggaggcttggtagcaaagtaacattttttggaaaagaggacagaaaaattgaactacagcttgagaacgtattctttttttcctactttgttattgcaaattgaggaatcacttttaactgttttaggtgtgtgtgtccagagtgagcaaggattatgtttttggattgtcaaagaggatgcttagtcttaaaataaaaataaatttaaaaatcatcttataatt

SEQ ID NO: 177237 - DNA, 4173 bp, Homo sapiens
  Payload ID: 14778
  Gene Symbol: RNF14
  Gene Name: ring finger protein 14
  Uniprot ID: Q9UBS8
  ENST ID: ENST00000394519
  CDS Start-End: 249-1673
gtgcatgggcttcctcacttttttcctcacgaagaggtctctggtctcccctctctgagcactctgagatggcaggattttcataatatatgtagtatgagttccacatcttggcctcttacccagcttcagcagtctcagctccaccagttagagaataaatgggatttgcatgaactccactctgagctgaaatacagactgcggtgttaatatccttttcttctgattgttattaacaggtccttatgtcgtcagaagatcgagaagctcaggaggatgaattgctggccctggcaagtatttacgatggagatgaatttagaaaagcagagtctgtccaaggtggagaaaccaggatctatttggatttgccacagaatttcaagatatttgtgagcggcaattcaaatgagtgtctccagaatagtggctttgaatacaccatttgctttctgcctccacttgtgctgaactttgaactgccaccagattatccatcctcttccccaccttcattcacacttagtggcaaatggctgtcaccaactcagctatctgctctatgcaagcacttagacaacctatgggaagaacaccgtggcagcgtggtcctgtttgcctggatgcaatttcttaaggaagagaccctagcatacttgaatattgtctctccttttgagctcaagattggttctcagaaaaaagtgcagagaaggacagctcaagcttctcccaacacagagctagattttggaggagctgctggatctgatgtagaccaagaggaaattgtggatgagagagcagtgcaggatgtggaatcactgtcaaatctgatccaggaaatcttggactttgatcaagctcagcagataaaatgctttaatagtaaattgttcctgtgcagtatctgtttctgtgagaagctgggtagtgaatgcatgtacttcttggagtgcaggcatgtgtactgcaaagcctgtctgaaggactactttgaaatccagatcagagatggccaggttcaatgcctcaactgcccagaaccaaagtgcccttcggtggccactcctggtcaggtcaaagagttagtggaagcagagttatttgcccgttatgaccgccttctcctccagtcctccttggacctgatggcagatgtggtgtactgcccccggccgtgctgccagctgcctgtgatgcaggaacctggctgcaccatgggtatctgctccagctgcaattttgccttctgtactttgtgcaggttgacctaccatggggtctccccatgtaaggtgactgcagagaaattaatggacttacgaaatgaatacctgcaagcggatgaggctaataaaagacttttggatcaaaggtatggtaagagagtgattcagaaggcactggaagagatggaaagtaaggagtggctagagaagaactcaaagagctgcccatgttgtggaactcccatagagaaattagacggatgtaacaagatgacatgtactggctgtatgcaatatttctgttggatttgcatgggttctctctctagagcaaacccttacaaacatttcaatgaccctggttcaccatgttttaaccggctgttttatgctgtggatgttgacgacgatatttgggaagatgaggtagaagactagttaactactgctcaagatatggaagtggattgtttttccctaatcttccgtcaagtacacaaagtaactttgcgggatatttagggtactattcattcactcttcctgcgtagaagatatggaagaacgaggtttatattttcatgtggtactactgaagaaggtgcattgatacatttttaaatgtaagttgagaaaaatttataagccaaaggttcagaaaattaaactacagaatattaaatattataatgtgcccaaagctctgaatagttaaaaattaaatatttattttcttccccaagctttaggtaaggagaagaggggtcaagagttaaacttagagaccctttgtctctgagaagcatccttctaagacattctgttggagttccctcagtactattccttacaactggagtgggtagaagccttatgaaaattatactgagaacctgatctcgtttactccatgttaatcacattcctaccaacctaaatttctgccaagtcagttctctttggaggaagcccattactccgtaactgactggatggtccagtgtcattttgatctgcttttcagaatggaaatttataatataaatatatgttttaataccacaaacactgtggggcacttgatatttattagtggtgtatatggtccactggtttcaggccaaatctagaatttagtgatactggctcagaagaatttaagttctattcagccttcctgggtgttagaacctagattcaaaatggcttgtctttgctacttttgttccacattctctctctttacctttgccctaccttctgtttgtaaggatgattttaatattaattccaggaacacatgtttttatttcctctgctggaataggagaaagcttaatatattcccaagctgaatgttcttgaattatatctgcatttaccactgtatatgcatatagtgacagtataacctgtctatactacagtagttccagtcctaactttctgaattatttttaaagatcttctctaacaagctatgggaatttggcttcatactctttctttgcaacagcagtgttctgggtgataattttgaattgatacctgttcctttttctgggttttgttggctttttgaaaaattgtctttccttatcattggtgggaggcttggtagcaaagtaacattttttggaaaagaggacagaaaaattgaactacagcttgagaacgtattctttttttcctactttgttattgcaaattgaggaatcacttttaactgttttaggtgtgtgtgtccagagtgagcaaggattatgtttttggattgtcaaagaggatgcttagtcttaaaataaaaataaatttaaaaatcatcttataattagaacagagttgctgctatttgttctgtcaccaaggcaactaatcacattttaaaactgttcggcatataacatattcttaaagtaagaaaaaaaaggtcacagaatagcatctcttttacctgggcttgtgactgagcttaggttttagggcccatattttgtttaaaccagatagtttcatggtcttccattcaggacattttgtgtaaaaattgaggttaatttgctgggcacagtggctcacgcctgtaatcccagcactttgggaggcctaggcgggcggatcacgaggtcaggagttcgagaccatcatggctaacacggtgaaaccccgtctctactaaaaatacaaaaaattagctgggcatggtggcaggcgcctgtagtcccagctactcaggaggctgaggcaggagaatggcatgaacctgggaggtggagcttgcagtgagccgagatagcgccactgcactccagcctgagcgacagagcgagactccttctcaaaaaaaaaaaaaaaaaaaattgaggttaaagaataaattaaagataagaaatggaaattaaaatgatttgttctacagtatatacctgagaagagtgatttctgtgatcaaagagttcaattcagatttattcagaaagagctactcagaagctctatagttcgtgagctacttgatattttctagagatcattttatgttaagctgttatacattgttgatgatgtcatagaagtaggaaagaagcctttataatacagttttatgaaagaaatgggagccttttttcccatttatgatattaaaaacaacacaggtatttggtgtttagtctcaaaaatttgtttggtcaccttagtgattcttaggtacaaagtcttcatcactcaattttaacaaagaaaatagggcttataaagttatacttttgaagcatgagttatgagctaattttaagatgtatagttttggtagagtacttttgtctcagtaaaatgaaagatttgggtaactccccaaatgccctgtaaaacaaatgggtttgtggaaggttgtggtgtcagcaaaatatatgatagaataaagagttttgtacct

SEQ ID NO: 177238 - DNA, 4235 bp, Homo sapiens
  Payload ID: 14778
  Gene Symbol: RNF14
  Gene Name: ring finger protein 14
  Uniprot ID: Q9UBS8
  ENST ID: ENST00000394520
  CDS Start-End: 310-1734
gcgcagagtcctccctatgccggcggtcgcgccagcgggatccgcctggctcagctgacagctcccgagaacggaagaggcggcgcgccggttgagcagggcgtctctaggcctggtcggctggcggcgatggcaggattttcataatatatgtagtatgagttccacatcttggcctcttacccagcttcagcagtctcagctccaccagttagagaataaatgggatttgcatgaactccactctgagctgaaatacagactgcggtgttaatatccttttcttctgattgttattaacaggtccttatgtcgtcagaagatcgagaagctcaggaggatgaattgctggccctggcaagtatttacgatggagatgaatttagaaaagcagagtctgtccaaggtggagaaaccaggatctatttggatttgccacagaatttcaagatatttgtgagcggcaattcaaatgagtgtctccagaatagtggctttgaatacaccatttgctttctgcctccacttgtgctgaactttgaactgccaccagattatccatcctcttccccaccttcattcacacttagtggcaaatggctgtcaccaactcagctatctgctctatgcaagcacttagacaacctatgggaagaacaccgtggcagcgtggtcctgtttgcctggatgcaatttcttaaggaagagaccctagcatacttgaatattgtctctccttttgagctcaagattggttctcagaaaaaagtgcagagaaggacagctcaagcttctcccaacacagagctagattttggaggagctgctggatctgatgtagaccaagaggaaattgtggatgagagagcagtgcaggatgtggaatcactgtcaaatctgatccaggaaatcttggactttgatcaagctcagcagataaaatgctttaatagtaaattgttcctgtgcagtatctgtttctgtgagaagctgggtagtgaatgcatgtacttcttggagtgcaggcatgtgtactgcaaagcctgtctgaaggactactttgaaatccagatcagagatggccaggttcaatgcctcaactgcccagaaccaaagtgcccttcggtggccactcctggtcaggtcaaagagttagtggaagcagagttatttgcccgttatgaccgccttctcctccagtcctccttggacctgatggcagatgtggtgtactgcccccggccgtgctgccagctgcctgtgatgcaggaacctggctgcaccatgggtatctgctccagctgcaattttgccttctgtactttgtgcaggttgacctaccatggggtctccccatgtaaggtgactgcagagaaattaatggacttacgaaatgaatacctgcaagcggatgaggctaataaaagacttttggatcaaaggtatggtaagagagtgattcagaaggcactggaagagatggaaagtaaggagtggctagagaagaactcaaagagctgcccatgttgtggaactcccatagagaaattagacggatgtaacaagatgacatgtactggctgtatgcaatatttctgttggatttgcatgggttctctctctagagcaaacccttacaaacatttcaatgaccctggttcaccatgttttaaccggctgttttatgctgtggatgttgacgacgatatttgggaagatgaggtagaagactagttaactactgctcaagatatggaagtggattgtttttccctaatcttccgtcaagtacacaaagtaactttgcgggatatttagggtactattcattcactcttcctgcgtagaagatatggaagaacgaggtttatattttcatgtggtactactgaagaaggtgcattgatacatttttaaatgtaagttgagaaaaatttataagccaaaggttcagaaaattaaactacagaatattaaatattataatgtgcccaaagctctgaatagttaaaaattaaatatttattttcttccccaagctttaggtaaggagaagaggggtcaagagttaaacttagagaccctttgtctctgagaagcatccttctaagacattctgttggagttccctcagtactattccttacaactggagtgggtagaagccttatgaaaattatactgagaacctgatctcgtttactccatgttaatcacattcctaccaacctaaatttctgccaagtcagttctctttggaggaagcccattactccgtaactgactggatggtccagtgtcattttgatctgcttttcagaatggaaatttataatataaatatatgttttaataccacaaacactgtggggcacttgatatttattagtggtgtatatggtccactggtttcaggccaaatctagaatttagtgatactggctcagaagaatttaagttctattcagccttcctgggtgttagaacctagattcaaaatggcttgtctttgctacttttgttccacattctctctctttacctttgccctaccttctgtttgtaaggatgattttaatattaattccaggaacacatgtttttatttcctctgctggaataggagaaagcttaatatattcccaagctgaatgttcttgaattatatctgcatttaccactgtatatgcatatagtgacagtataacctgtctatactacagtagttccagtcctaactttctgaattatttttaaagatcttctctaacaagctatgggaatttggcttcatactctttctttgcaacagcagtgttctgggtgataattttgaattgatacctgttcctttttctgggttttgttggctttttgaaaaattgtctttccttatcattggtgggaggcttggtagcaaagtaacattttttggaaaagaggacagaaaaattgaactacagcttgagaacgtattctttttttcctactttgttattgcaaattgaggaatcacttttaactgttttaggtgtgtgtgtccagagtgagcaaggattatgtttttggattgtcaaagaggatgcttagtcttaaaataaaaataaatttaaaaatcatcttataattagaacagagttgctgctatttgttctgtcaccaaggcaactaatcacattttaaaactgttcggcatataacatattcttaaagtaagaaaaaaaaggtcacagaatagcatctcttttacctgggcttgtgactgagcttaggttttagggcccatattttgtttaaaccagatagtttcatggtcttccattcaggacattttgtgtaaaaattgaggttaatttgctgggcacagtggctcacgcctgtaatcccagcactttgggaggcctaggcgggcggatcacgaggtcaggagttcgagaccatcatggctaacacggtgaaaccccgtctctactaaaaatacaaaaaattagctgggcatggtggcaggcgcctgtagtcccagctactcaggaggctgaggcaggagaatggcatgaacctgggaggtggagcttgcagtgagccgagatagcgccactgcactccagcctgagcgacagagcgagactccttctcaaaaaaaaaaaaaaaaaaaattgaggttaaagaataaattaaagataagaaatggaaattaaaatgatttgttctacagtatatacctgagaagagtgatttctgtgatcaaagagttcaattcagatttattcagaaagagctactcagaagctctatagttcgtgagctacttgatattttctagagatcattttatgttaagctgttatacattgttgatgatgtcatagaagtaggaaagaagcctttataatacagttttatgaaagaaatgggagccttttttcccatttatgatattaaaaacaacacaggtatttggtgtttagtctcaaaaatttgtttggtcaccttagtgattcttaggtacaaagtcttcatcactcaattttaacaaagaaaatagggcttataaagttatacttttgaagcatgagttatgagctaattttaagatgtatagttttggtagagtacttttgtctcagtaaaatgaaagatttgggtaactccccaaatgccctgtaaaacaaatgggtttgtggaaggttgtggtgtcagcaaaatatatgatagaataaagagttttgtaccta

SEQ ID NO: 177239 - DNA, 582 bp, Homo sapiens
  Payload ID: 14778
  Gene Symbol: RNF14
  Gene Name: ring finger protein 14
  ENST ID: ENST00000506938
  CDS Start-End: 70-582
gagaacggaagaggcggcgcgccggttgagcagggcgtctctaggcctggtcggctggcggcggtccttatgtcgtcagaagatcgagaagctcaggaggatgaattgctggccctggcaagtatttacgatggagatgaatttagaaaagcagagtctgtccaaggtggagaaaccaggatctatttggatttgccacagaatttcaagatatttgtgagcggcaattcaaatgagtgtctccagaatagtggctttgaatacaccatttgctttctgcctccacttgtgctgaactttgaactgccaccagattatccatcctcttccccaccttcattcacacttagtggcaaatggctgtcaccaactcagctatctgctctatgcaagcacttagacaacctatgggaagaacaccgtggcagcgtggtcctgtttgcctggatgcaatttcttaaggaagagaccctagcatacttgaatattgtctctccttttgagctcaagattggttctcagaaaaaagtgcagagaaggacagctcaagcttctcccaacacagagctagattttggagga

SEQ ID NO: 177240 - DNA, 563 bp, Homo sapiens
  Payload ID: 14778
  Gene Symbol: RNF14
  Gene Name: ring finger protein 14
  ENST ID: ENST00000513019
  CDS Start-End: 266-563
atttcccaagctggttggtgcatgggcttcctcacttttttcctcacgaagaggtctctggtctcccctctctgagcactctgagatggcaggattttcataatatatgtagtatgagttccacatcttggcctcttacccagcttcagcagtctcagctccaccagttagagaataaatgggatttgcatgaactccactctgagctgaaatacagactgcggtgttaatatccttttcttctgattgttattaacaggtccttatgtcgtcagaagatcgagaagctcaggaggatgaattgctggccctggcaagtatttacgatggagatgaatttagaaaagcagagtctgtccaaggtggagaaaccaggatctatttggatttgccacagaatttcaagatatttgtgagcggcaattcaaatgagtgtctccagaatagtggctttgaatacaccatttgctttctgcctccacttgtgctgaactttgaactgccaccagattatccatcctcttccccaccttcattcacacttagtggcaaatggctgtcac

SEQ ID NO: 177241 - DNA, 815 bp, Homo sapiens
  Payload ID: 14778
  Gene Symbol: RNF14
  Gene Name: ring finger protein 14
  ENST ID: ENST00000507163
  CDS Start-End: 259-815
ggctggcggcggtgagtgggccccaggcaagggcggagggcggaactttggggttcggcactgccgggcggccggaagatggcaggattttcataatatatgtagtatgagttccacatcttggcctcttacccagcttcagcagtctcagctccaccagttagagaataaatgggatttgcatgaactccactctgagctgaaatacagactgcggtgttaatatccttttcttctgattgttattaacaggtccttatgtcgtcagaagatcgagaagctcaggaggatgaattgctggccctggcaagtatttacgatggagatgaatttagaaaagcagagtctgtccaaggtggagaaaccaggatctatttggatttgccacagaatttcaagatatttgtgagcggcaattcaaatgagtgtctccagaatagtggctttgaatacaccatttgctttctgcctccacttgtgctgaactttgaactgccaccagattatccatcctcttccccaccttcattcacacttagtggcaaatggctgtcaccaactcagctatctgctctatgcaagcacttagacaacctatgggaagaacaccgtggcagcgtggtcctgtttgcctggatgcaatttcttaaggaagagaccctagcatacttgaatattgtctctccttttgagctcaagattggttctcagaaaaaagtgcagagaaggacagctcaagcttctcccaacacagagctagattttggaggagctgctggatctgatgtagaccaagaggaaattgtggatgagag

SEQ ID NO: 177242 - DNA, 753 bp, Homo sapiens
  Payload ID: 14778
  Gene Symbol: RNF14
  Gene Name: ring finger protein 14
  ENST ID: ENST00000515613
  CDS Start-End: 198-392
ctggtcggctggcggcgatggcaggattttcataatatatgtagtatgagttccacatcttggcctcttacccagcttcagcagtctcagctccaccagttagagaataaatgggatttgcatgaactccactctgagctgaaatacagactgcggtgttaatatccttttcttctgattgttattaacaggtccttatgtcgtcagaagatcgagaagctcaggaggatgaattgctggccctggcaagtatttacgatggagatgaatttagaaaagcagagtctgtccaaggtggagaaaccaggatctatttggatttgccacagaatttcaagatatttgtgagcggtcaaagagttagtggaagcagagttatttgcccgttatgaccgccttctcctccagtcctccttggacctgatggcagatgtggtgtactgcccccggccgtgctgccagctgcctgtgatgcaggaacctggctgcaccatgggtatctgctccagctgcaattttgccttctgtactttgtgcaggttgacctaccatggggtctccccatgtaaggtgactgcagagaaattaatggacttacgaaatgaatacctgcaagcggatgaggctaataaaagacttttggatcaaaggtatggtaagagagtgattcagaaggcactggaagagatggaaagtaaggagtggctagagaagaactcaaagagctgcccatgttgtggaactcccatagag

SEQ ID NO: 177243 - DNA, 667 bp, Homo sapiens
  Payload ID: 14778
  Gene Symbol: RNF14
  Gene Name: ring finger protein 14
  ENST ID: ENST00000506822
  CDS Start-End: 270-667
ggccggggctccggggacaggccagatgggaagctgctgtccacgcagcaaggcggctgctgagggaaagggagcctctgcatcaccaaatggcaggattttcataatatatgtagtatgagttccacatcttggcctcttacccagcttcagcagtctcagctccaccagttagagaataaatgggatttgcatgaactccactctgagctgaaatacagactgcggtgttaatatccttttcttctgattgttattaacaggtccttatgtcgtcagaagatcgagaagctcaggaggatgaattgctggccctggcaagtatttacgatggagatgaatttagaaaagcagagtctgtccaaggtggagaaaccaggatctatttggatttgccacagaatttcaagatatttgtgagcggcaattcaaatgagtgtctccagaatagtggctttgaatacaccatttgctttctgcctccacttgtgctgaactttgaactgccaccagattatccatcctcttccccaccttcattcacacttagtggcaaatggctgtcaccaactcagctatctgctctatgcaagcacttagacaacctatgggaagaacaccgtggcagcgtggtcctgtttgcctggatgcaatttcttaaggaaga

SEQ ID NO: 177244 - DNA, 473 bp, Homo sapiens
  Payload ID: 14778
  Gene Symbol: RNF14
  Gene Name: ring finger protein 14
  ENST ID: ENST00000507291
  CDS Start-End: 290-473
ggaccgggctgggactgtacactgggcctcagtccctcaaatccgggaccgggcgtccgcagctcggctggccgggactcccttcgggacgctgaggaggaaggggaagatggcaggattttcataatatatgtagtatgagttccacatcttggcctcttacccagcttcagcagtctcagctccaccagttagagaataaatgggatttgcatgaactccactctgagctgaaatacagactgcggtgttaatatccttttcttctgattgttattaacaggtccttatgtcgtcagaagatcgagaagctcaggaggatgaattgctggccctggcaagtatttacgatggagatgaatttagaaaagcagagtctgtccaaggtggagaaaccaggatctatttggatttgccacagaatttcaagatatttgtgagcggcaattcaaatgagtgtctccagaatagtg

SEQ ID NO: 177245 - DNA, 938 bp, Homo sapiens
  Payload ID: 14778
  Gene Symbol: RNF14
  Gene Name: ring finger protein 14
  ENST ID: ENST00000511961
  CDS Start-End: 105-938
ggaggatgaggccggggctccggggacaggccagatgggaagctgctgtccacgcagcaaggcggctgctgagggaaagggagcctctgcatcaccaagtccttatgtcgtcagaagatcgagaagctcaggaggatgaattgctggccctggcaagtatttacgatggagatgaatttagaaaagcagagtctgtccaaggtggagaaaccaggatctatttggatttgccacagaatttcaagatatttgtgagcggcaattcaaatgagtgtctccagaatagtggctttgaatacaccatttgctttctgcctccacttgtgctgaactttgaactgccaccagattatccatcctcttccccaccttcattcacacttagtggcaaatggctgtcaccaactcagctatctgctctatgcaagcacttagacaacctatgggaagaacaccgtggcagcgtggtcctgtttgcctggatgcaatttcttaaggaagagaccctagcatacttgaatattgtctctccttttgagctcaagattggttctcagaaaaaagtgcagagaaggacagctcaagcttctcccaacacagagctagattttggaggagctgctggatctgatgtagaccaagaggaaattgtggatgagagagcagtgcaggatgtggaatcactgtcaaatctgatccaggaaatcttggactttgatcaagctcagcagataaaatgctttaatagtaaattgttcctgtgcagtatctgtttctgtgagaagctgggtagtgaatgcatgtacttcttggagtgcaggcatgtgtactgcaaagcctgtctgaaggactactttgaaatccagatcagagatggccaggttcaatgcctcaactgcccagaaccaaagtgcccttcggtggccactcctggtcag

SEQ ID NO: 177246 - DNA, 575 bp, Homo sapiens
  Payload ID: 14778
  Gene Symbol: RNF14
  Gene Name: ring finger protein 14
  ENST ID: ENST00000506004
  CDS Start-End: 530-575
agagaaggggaccgggctgggactgtacactgggcctcagtccctcaaatccgggaccgggcgtccgcagctcggctggccgggactcccttcgggacgctgaggaggaaggggaaggtgtgggccctgctccttcgggacgccccaggctggccagcagctcacacatccgcattgcgccctctgatcccagcgttggggcggatagctagcgttgggcctgcccctgttttggggcagtcgcccaaacgacgccgcacgcctagtggcgagctgaacccagactaggacacccgaagaccaaatggatagagtgagaaggaaatgggggttagcaacctgaattgagatggcaggattttcataatatatgtagtatgagttccacatcttggcctcttacccagcttcagcagtctcagctccaccagttagagaataaatgggatttgcatgaactccactctgagctgaaatacagactgcggtgttaatatccttttcttctgattgttattaacaggtccttatgtcgtcagaagatcgagaagctcaggaggatgaattgctggccc

SEQ ID NO: 177247 - DNA, 670 bp, Homo sapiens
  Payload ID: 14778
  Gene Symbol: RNF14
  Gene Name: ring finger protein 14
  ENST ID: ENST00000512565
  CDS Start-End: 213-670
agggcgtctctaggcctggtcggctggcggcgatggcaggattttcataatatatgtagtatgagttccacatcttggcctcttacccagcttcagcagtctcagctccaccagttagagaataaatgggatttgcatgaactccactctgagctgaaatacagactgcggtgttaatatccttttcttctgattgttattaacaggtccttatgtcgtcagaagatcgagaagctcaggaggatgaattgctggccctggcaagtatttacgatggagatgaatttagaaaagcagagtctgtccaaggtggagaaaccaggatctatttggatttgccacagaatttcaagatatttgtgagcgagaaattaatggacttacgaaatgaatacctgcaagcggatgaggctaataaaagacttttggatcaaaggtatggtaagagagtgattcagaaggcactggaagagatggaaagtaaggagtggctagagaagaactcaaagagctgcccatgttgtggaactcccatagagaaattagacggatgtaacaagatgacatgtactggctgtatgcaatatttctgttggatttgcatgggttctctctctagagcaaacccttacaaacatttcaatgaccctggttcaccatgttttaaccg

SEQ ID NO: 177248 - DNA, 4074 bp, Homo sapiens
  Payload ID: 14779
  Gene Symbol: RNF141
  Gene Name: ring finger protein 141
  Uniprot ID: Q8WVD5
  ENST ID: ENST00000265981
  CDS Start-End: 144-836
cgggtcccggcctgagtcgcggccacccgcaggtctgagctgtgggctgaggcagcgcagccgctgccgcagggtgcgcgatgccttgaacctgggaaactatgtgaagcaacactctggattttgaaagacatcttttcatcatgggacagcaaatttcggatcagacacagttggttattaacaagttaccagaaaaagtagcaaaacatgttacgttggttcgagagagtggctccttaacttatgaagaatttcttgggagagtagctgagcttaatgatgtaacggctaaagtggcttctggccaggaaaaacatcttctctttgaggtacaacctgggtctgattcctctgctttttggaaagtggttgtacgggtggtctgtaccaagattaacaaaagcagtggcattgtggaggcatcacggatcatgaatttataccagtttattcaactttataaagatatcacaagtcaagcagcaggagtattggcacagagctccacctctgaagaacctgatgaaaactcatcctctgtaacatcttgtcaggctagtctttggatgggaagggtgaagcagctgaccgatgaggaggagtgttgtatctgtatggatgggcgggctgacctcatcctgccttgtgctcacagcttttgtcagaagtgtattgataaatggagtgatcgacacaggaattgccctatttgtcgcctacagatgactggagcaaatgaatcttgggtggtatcagatgcacccactgaagatgatatggctaactatattcttaacatggctgatgaggcaggccagccccacaggccatgaccttgaagtgaaagtcttctgttgctattgtgggctcaaatatttggtcatgggggaagaatgtagggttgtggcactggcacagacacaggaaaatccattttccccactcttttatttttgctattctgatcatttgtcccccttttaaaaataaacttcccatgtcttccatttgtggtactaaaatttgctactgttttagaccatattttcctattatttatctgttcaaatttgtattattacaactaatagctcttgaattctttgctaaaggtaacagcaacacttccagaggcttctaaaacactactgttttgcagggcaggagtattctggaatctttttacttagatataaaataaacctcgaatattaaaaagttgtagccatctgagagaggaaagtttaagtgactgaaaatgtagaatacttcaacgtgcatgttactacttaaaactagtctttctgctggaatctaaggagtatatatatatatgcccccttgtggttaattattgctcctttaataatttttacttgaaatgatccacaattatttcataactttagcagtgtgttttggaactactgtacttaaaggtttgtttgtttgtttttgccatactgtataatttgggtgaggtctacaaaattgggtgtgactttcctttgcaaatggatttctcctggggaattttcttggctgttctggaaatgctttcccacagctgggtaactgttctaaatggctttgataatgctcacacatcttggagtttcagaaggaaattattctgcatcacaaatactaaattttatatttctaaattactataggtcatttaatattggtttatggtgcttttatttccttaacttgaaaacatctttctgagatttcagagtcctcaaatttcttagattaagagacaagaggccagtgcagtggttcacacctgtaatcccagcactttgggaggccgaggtgggtggatcatttgaggttaggagtttgagaccagcctggccaacatggcgaaatcctctctctactaaaatacaaaaattagctgggcatggtggcaggtgcctgtaatctcagctactcgggaggctgaggcagaattgcttgaacccaggaggtggaggttgcagtgagccgagatcacaccactgcactccagcctgggagacagaacgagactcctaatcaaaaaaaaaacacaagaaaatagagtgaggcttttttaccgtatatacataaaatacttatgaaaattagaagataatttggcattcctactgtttcactgtacttccattgaaatactctttccattaaaatattctgaaacaatatagtaataatggaattgtgatcttcagttgcacctcaaccattttttttgcttatgaactaaaatttctaacattaacatttcggcatgtaataaaacaagggcctatctcctttaaaatttaacattccatgtaacttttctgacttatcattcataagttgcaaatattactattttcctaaaccagggtacacaatttaagttgccacttattgatgacagaatttctggatagtaggattttaataggcgagcaaataaaattcaaatcaatttcaaggaaaaacatctggccaggggtagcttgatttcgcccccaaaaatactgaagactaatccattgacattcataatgggacagctaagtaccaaatagctaactactccctatggaggtttatgcaagcagagtaccaggggttccatcatatcaacctggcaatgcacttggtggttgtgtgaccttgagaaagtctcttactcttgtttatgtgttcttactttagaaactgagactttatttgtggttttcacactatttcagcagcaaaaactttttcaaggaaaatcttacagaacctttaaacacgtgtgcatacacacataccctataccccactatataaaagtcatattattataaatttccttattatataaactttatatactataaatgtgattaagtcaatgaataaaaacattaatgcattggtgatatccagcatgtttgaatttggtgagtaacacacatatagtgggagtcgttttttttaaaaaaattttttaattaaattcaagtcaaatttgcagaaccctgtatctcctccatagattcttagtattccatggaacatattttgaaaaccttgggatagatgatccactgaaatcttttccagctctaagattttaaattgtccttttagattagacttgctgagtttaattcagattacctaattttaaaatgtttctgaaaagtgaacagagttaccttacagagttttggatctttccagggatagccaatgattttatcccccagaatccttcacctttcaaggagttatttaacaatgagcccagtgactcaatagggcccaaacctttttattttacaatatgagctccaagacacttactgatctactgtgaatataaaatgttattagccttatcaaataaataaatgagcacagctctttgttcgctctattgaactgggtgataattatttagatgtgaatgttaggtcagttctactgtaataactaatcgtaaaagttgtaaatttgtttaatggatgaaatgtacactttttgtattctgtacagctttgtcttttttaaatatgaagtacttaaatgtacttactatgataggaaatataatgtgtgccttctaggatttgtgaagtggtttcatgaactctaaggaatttgttttccctatcctaactcagtaacagagggtttactccgattatgtatagaaccttagtttgagaaaatgaattttactatgtactgaatttagaggttgagaataataggatctgtgttattcttagtacccactgataaattgtgcaataaataatctttcgcaagtgattttagctaattgaagagattattttcctatgtaatttcacattctaatatactaaatgtttatattccttagagaactattttatattgtgcgctgggggcttgtgatgtttgtgtgctgttttaaaattcatttcaaattggactcgatttccttatatctaatatatatctgggagaaaaggctgcttgaaaatatcttttgattcagtgatttttaacattgggaagttgagtttattaaaaggtagtctg

SEQ ID NO: 177249 - DNA, 1374 bp, Homo sapiens
  Payload ID: 14779
  Gene Symbol: RNF141
  Gene Name: ring finger protein 141
  ENST ID: ENST00000528665
  CDS Start-End: 117-662
cgcaggtctgagctgtgggctgaggcagcgcagccgctgccgcagggtgcgcgatgccttgaacctgggaaactatgtgaagcaacactctggattttgaaagacatcttttcatcatgggacagcaaatttcggatcagacacagttggttattaacaagttaccagaaaaagtagcaaaacatgttacgttggttcgagagagtggctccttaacttatgaagaatttcttgggagagtagctgagcttaatgatgtaacggctaaagtggcttctggccaggaaaaacatcttctctttgaggtacaacctgggtctgattcctctgctttttggaaagtggttgtacgggtggtctgtaccaagattaacaaaagcagtggcattgtggaggcatcacggatcatgaatttataccagtttattcaactttataaagatatcacaagtcaagcagcaggagtattggcacagagctccacctctgaagaacctgatgaaaactcatcctctgtaacatcttgtcaggctagtctttggatgggaagggtgaagcagctgaccgatgaggaggagtgttgtatctgtatggatgggcgggctgacctcatcctgccttgtgctcacagcttttgtcagaagtgtattgataaatggtaagttacctactgcattcatgggctgggccaaggtcagtgggatagtgtacatgaataaactttgaaaagtgcaaaaatactgtagttaagtatgagagagattttattctttagtactttgaattttatggcatgccttctactggttaaaactatttttgtttttacacctaacatttattaaatatgggggtgtaccttagttttgacacttttcttttgctgtatgaaaatttgtgcctgacttaagtctaaaatcaaacatttccctttttcctcctttttttctcctcatttctacatttattctgtgtatgtgtttagaaggaataaattcttgaatactggacctcagggaactttagagatcagctagtcaagttcattattttacaaaataagacttgagcgtttaggataatttataaaatacatacaataaactacatgtatttaatgtacagtttaatatgttttggcatatatacacacccataaaagttatgaatttttataaatggaatcatataatatgtgctttttttgtctggcttctttcattcagtctaattaccttggtatttattcatgttgtagcatgtatcaatagttcatgcctttttattgctgagtaatgtctgttatgtggataccatagcttgtttattcacctattgagggaaattagattattttccatatttatctattac

SEQ ID NO: 177250 - DNA, 743 bp, Homo sapiens
  Payload ID: 14779
  Gene Symbol: RNF141
  Gene Name: ring finger protein 141
  ENST ID: ENST00000533412
  CDS Start-End: 202-743
cagttgcccggggtggcggtggcttgtcccgcctcggggtggttctgagggacccggagagagtttttccttctctatcccaaaacggttgtttgaatattgccgccggctcagtcattcggccgccggacttagctgttggttaaatgtccagaaactatgtgaagcaacactctggattttgaaagacatcttttcatcatgggacagcaaatttcggatcagacacagttggttattaacaagttaccagaaaaagtagcaaaacatgttacgttggttcgagagagtggctccttaacttatgaagaatttcttgggagagtagctgagcttaatgatgtaacggctaaagtggcttctggccaggaaaaacatcttctctttgaggtacaacctgggtctgattcctctgctttttggaaagtggttgtacgggtggtctgtaccaagattaacaaaagcagtggcattgtggaggcatcacggatcatgaatttataccagtttattcaactttataaagatatcacaagtcaagcagcaggagtattggcacagagctccacctctgaagaacctgatgaaaactcatcctctgtaacatcttgtcaggctagtctttggatgggaagggtgaagcagctgaccgatgaggaggagtgttgtatctgtatggatgggcgggctgacctcatcctgccttgtgctcacagcttttgtcagaagtgtattgataaatg

SEQ ID NO: 177251 - DNA, 779 bp, Homo sapiens
  Payload ID: 14779
  Gene Symbol: RNF141
  Gene Name: ring finger protein 141
  ENST ID: ENST00000530156
  CDS Start-End: 157-315
acagaggtgcgaccgggtcccggcctgagtcgcggccacccgcaggtctgagctgtgggctgaggcagcgcagccgctgccgcagggtgcgcgatgccttgaacctgggaaactatgtgaagcaacactctggattttgaaagacatcttttcatcatgggacagcaaatttcggatcagacacagttggttattaacaagttaccagaaaaagtagcaaaacatgttacgttggttcgagagagtggctccttaacttatgaagaatttcttgggagagtagctgagcttaatgatgtcacaggatatttctgactggatttgattcttaaaaccaatttccatgggtcagaattggcatttcagacgtgcagtgatctccgagaactgtagaattaaacctatacaggacgaagcttggcagctagaaaacagagctggaaactggcacggctgaattattttcaccgaagactttgtttcctaagaacggctaaagtggcttctggccaggaaaaacatcttctctttgaggtacaacctgggtctgattcctctgctttttggaaagtggttgtacgggtggtctgtaccaagattaacaaaagcagtggcattgtggaggcatcacggatcatgaatttataccagtttattcaactttataaagatatcacaagtcaagcagcaggagtattggcacagagctccacctctgaagaacctgatgaaaactcatcctctgtaacatcttgtcaggctagtctttggatgggaag

SEQ ID NO: 177252 - DNA, 5743 bp, Homo sapiens
  Payload ID: 14780
  Gene Symbol: RNF144A
  Gene Name: ring finger protein 144A
  Uniprot ID: P50876
  ENST ID: ENST00000320892
  CDS Start-End: 443-1321
gagcctcccgcgtgcccggcctctgtgcgcgctcgcgccccgcccgcgcagccgcttctccccgcgcgggctctcggcaggcgggaggcggcagggctggcattgcagtgcgggccgtgcgggctgcgcgggcgcggggaggcgcgggcggcaaactgcgggcacccggcaccccgcagccagtaccgggcggaggcgtcagagccgcgcaccgcggacgagcaggcccaggcatccagtaccctgctgactctgacatgcccccagcctcccccagctctgcagggagccctggtgccagagaccttctcccatttctccctatgggtgcctgacctgagggcagagacatctgagtgtgtataagcacagcaggacaccaggacctggcctgaagacatttcctctcctcccctctggatttctcagagactgttctgcgatgaccacaacaaggtaccggcccacctgggacctggccctcgacccgctggtgtcttgcaagctctgtcttggggagtacccagtggagcagatgacaaccatagcccagtgccaatgcatcttctgtactctgtgcctgaaacagtatgttgagctcttgatcaaagaaggattagaaaccgcaattagctgcccagatgctgcctgccctaaacagggccacctacaggagaacgagattgagtgcatggttgcagctgaaattatgcaaagatataaaaagctacaatttgaaagagaggtgctgtttgatccctgtcggacttggtgcccggcgtccacctgccaagctgtgtgtcagctccaggacgtggggctgcagaccccccagccagtgcagtgcaaagcctgccgtatggaattctgctccacctgcaaagccagctggcaccctggccagggctgcccggagaccatgccgatcaccttcctccccggggagaccagtgctgctttcaaaatggaagaagatgacgcgcccatcaagcgctgccccaagtgcaaagtctacatcgagcgagacgaaggctgcgcgcagatgatgtgcaagaactgcaagcacgccttctgctggtactgcctggagtctctggacgatgatttccttctgatacactacgataagggaccctgccggaacaagctgggccactcccgggcatctgtgatctggcatcggacacaggttgtgggcatttttgcaggatttgggctgctgctcttggtggcctcacctttcctactcctggccactccctttgtactttgctgcaagtgcaagtgcagtaaaggtgacgacgacccgttacccacctagaggaagcgcgatgctggaacacatccctgcctccgggaagtgtggctctcccccaaccctccccaccgtccccccttcactaaacatctttcttgccttatgtgccccattgagcttcacagtgtcaggctggacgccgtgatttcagggacctatgtcacaatgttcgctgaggccccaggtgtggtggggaggggaggcaggtgtgggtagcgcacatccccacagatcaatctctgcagatgacagggaggtgctgtgagaagtgcaccaggcagctttctctctgtggtagactaggcatgtctggggatggcctaagagactttctgctccttggcttctagatggcaccatgttgtcagagaagtcttttaaggactgccactctcttcagacagaatctgattattccagcttgagagaagcactctgtttatgacaactgtttttattactaatggcatttagtaaaatcctttttagaaggtattttttttccaactgagtagtgaaaatcaacaaggtgcatataaaccatcctatgcctttcttgaaatgtgcattttaagaagttatagttaaacgacttttcaggagatttagaaagccttatgcactctttgtgtttttcttgaaacttgctgtagtaactttttgaacgctgtaagctgtgtactgttataagtgtgcttcctatattgttgcatttccttgataatattgacgtgtttaaaggaacatctcatctccattagatttgccttttgttgttttctctctttggtgattcagctcagctcatgggcctcatcccttctctcccaggtagcagaaaacgctttttattgtattcaatcccactgctttgctcggcaatggttctcctccgaattgctgccgtctggcctctggcctcagtcttcagatagacagtaagaagaaagcagcctcattgatccgcagatgtaggggcctcttggcagaggctggaggactctgggggctagggaagagcctgccagattttcacatttttaaaatgttctagtcattttgagaaatcatatatcttacacagttccaagtcctgttgctaaccgttttgctcttgttggggaaaagaacctcccatttcacttcgttttaacgtggggattttaccacttgatcttttacagggctgtctgtgaccatttccatggcagcaggatgcagggattaataaggacacatacacattattccaccaattgactttgaaaagtggagaaagtgtattctttaaagagaatttacttctaaaagccacaggtgcttttacaaagcaaactgcattgaatttaaaacttctaaaaataacaggcaaatattgtagctatattacagtgggattttaaaaatcttgttaaacattctataaagaagtaaaacaaaatccttttatctcagttatttgcccatcacaagcacatttttaaaatgttgctttgtgtgtgtttgacttctgcatttgagtatcagtctcaggtcctagtttactttccctggttggaaatttatttcttatttcctaacattgaattcgttagaaaaaacagcgtcacctcactcttcacctgtcatgttgattttccttatgaacccgaagccatttagaaaatccctgtgtgtcaaaattacattcaaaaagctctccttgtaattgcaagtttagtaactcagtaagaacatgcctgcgactccctttctggatggaacctgggctgtggctctctgtcgtttgtggtgctgtgatggtgtctactgttagaatagcttttctggaggtgggtggcaactccacgcgggagtcattggctgggcttgagccctcagcctgtgatatgtggatgcagctgtccagccactgccctttaacatgcccagcacacatgggaggcctgtggccctgtgtccagtggcccacaggacacgcctccaccatatgctcatccttcctgcctgaaattgctgctgcccatcgcatgagcccacacagtagcacccccgtccttaggatgagagtcagagcctttggaaaggctgcatccccagggctagagctcagatgaccttatttctagagggacaggctgttctgttggaagagtctctggcccagtcatgcacatctgtagccccagccatccttgtgccttcacctctgatgtgtttcacaagcacgtagttcaacccagatagggaccacagagattctggggccagccaggggcagtcaaattggcacctactggctctgactttttgtatgaagcatgcctcagtttcctcattttgatctagatataaaattaaaattgtccatttcctatataaataccagcaagatcactctgagatacataaactcgcatttccttctgttttagtaaggagtgccagacttatctttgatgggaatacagtatgaaccctgcttgatgtaaaatggaaatagcacacaggcagatggccctgggtttggactttgatcttgccatcattccccagtaaaacctggggagttctgcgttgagtggacggacttattcctgtgaagcggcataatttgtctccattgaaaaatggcattcactcttacagatggtgttcactgcaagccccagaagcatatggcatgtgttcactaagaggcctttaatcctggggagtaaggggcgaaggcccttagacaaccatggctgctgtactgccgcccagggtgggtggccagtgaggactggccttagcccagtggacctgtggcttctctgaggcccttgagtaactgaccacatttggaggttttgctggaaatgcctgacctctcagtctggctctgctgtgtagtccatagcccagccagatgagcttgcagcctcataggaggtcagcaccttgcaaagatgcagtcaccatagatgtccacgtagcagagactgacttaggatctgagataaagcatcggattgcaggaataactgtccaaattagttcttcctcctcaactcataggagtagctgtggacagaggaaccaacatctgccacctctggcattttctttctttttttttctttttgagacggagtttcgcttttgtcccccaagctggagtacaatgacaggatctcggctcactgcaagctctgcctcccgggttcaagcgattctcctgcctcagcctcccaagtagctgggattacaggcacccaccacctcacccagctaatttttgtattttcagtagagacggggtttcaccatgttggccaggctactctcaaactcctgacctcaggtgatctgcccacctcggcttcccaaagtgctggaattacaggcctgagccaccccacccggcctattttcttaaaggggaacaaatgatcttgacaacatattattccataaaaccagtttagggcacaggccagttcctgattagaacacaggacctgtgggagggactatcagagatgcaaaaattacttcaagatgagtttattgttttcatttgtattgcaaaagttagaagtcattttacaaattaaaaaaacatttttttcttggtagtctttaaaaattaggggattgaaaggatccaggatgggctttgtgtgtgtgtctcagattctcatttattagtgagcacacctgtgtatatatataaatcacaaggagatcatcaagggaaaacattttgcatgtgtaaagcttcatgaagttctctttaaaaaataccaaagcttgtttatttctgataattaacctaagcccttatgaaaataaacaaaatgaagggattatgacaggtattaccaaaaacaccaaaaggaacaaaggggcctgcgttaaaacctaattgctaatgcttcacaactaggagagcatgccgtcttgatgtttaaaaaacccagggtctccacccttcctttgatttgtgcaattctgtcttccacagttccggagccttcagtgaggggtagctacatgccccatgcctgccctttctttccttctttgctcactttactatgggtgtattttaatcttgtataaaaatatgcatgaatgagtcatgcacatgtatacgttatgtatttgacaagtggtggtgaaacaaaatcaaaacagatttgatttgtgtttttgaaatgtcagtacattttgtgccactaacactgtgatgtataaaagagctgtttgaatgccttttaatgttgtgttttgtactctggaatcatatggaaaaagtttgatttgtaatttcaatacatattttaaatgtattgtgtcttacgtagtttgtccccccctttagcagggattcctttttaaagctattttggctggaatacaggtgacttttgtaaaccc

SEQ ID NO: 177253 - DNA, 392 bp, Homo sapiens
  Payload ID: 14780
  Gene Symbol: RNF144A
  Gene Name: ring finger protein 144A
  ENST ID: ENST00000433456
  CDS Start-End: 228-392
aggaaaggttgcatcagtttatgtgatcatgttcaagtccctcgaggttggactcagaaccaagctgaatgctcaggaaacaagtaggctggttctgcagtctgagcctggaccctgtctgtttggaggctttccttctctctttgtgaatattctctttagaagagagctctctttctgcacctgtggggatcatcaccaccatgtcagaactgaactgttctgcgatgaccacaacaaggtaccggcccacctgggacctggccctcgacccgctggtgtcttgcaagctctgtcttggggagtacccagtggagcagatgacaaccatagcccagtgccaatgcatcttctgtactctgtgcctgaaacagtatgttgagctcttgatc

SEQ ID NO: 177254 - DNA, 805 bp, Homo sapiens
  Payload ID: 14780
  Gene Symbol: RNF144A
  Gene Name: ring finger protein 144A
  ENST ID: ENST00000432850
  CDS Start-End: 1-794
ggtaccggcccacctgggacctggccctcgacccgctggtgtcttgcaagctctgtcttggggagtacccagtggagcagatgacaaccatagcccagtgccaatgcatcttctgtactctgtgcctgaaacagtatgttgagctcttgatcaaagaaggattagaaaccgcaattagctgcccagatgctgcctgccctaaacagggccacctacaggagaacgagattgagtgcatggttgcagctgaaattatgcaaagatataaaaagctacaatttgaaagagaggtgctgtttgatccctgtcggacttggtgcccggcgtccacctgccaagctgtgtgtcagctccaggacgtggggctgcagaccccccagccagtgcagtgcaaagcctgccgtatggaattctgctccacctgcaaagccagctggcaccctggccagggctgcccggagaccatgccgatcaccttcctccccggggagaccagtgctgctttcaaaatggaagaagatgacgcgcccatcaagcgctgccccaagtgcaaagtctacatcgagcgagacgaaggctgcgcgcagatgatgtgcaagaactgcaagcacgccttctgctggtactgcctggagtctctggacgatgatttccttctgatacactacgataagggaccctgccggaacaagctgggccactcccgggcatctgtgatctggcatcggacacagggtgatgccatcttagagaaatgcattctccataatactgaatctgagtgtcatctgtaagaggtgggttg

SEQ ID NO: 177255 - DNA, 564 bp, Homo sapiens
  Payload ID: 14780
  Gene Symbol: RNF144A
  Gene Name: ring finger protein 144A
  ENST ID: ENST00000416587
  CDS Start-End: 400-564
gtgaaaacctccacttatagcggctgcataagcttaactgcgcagagctatactgctttttgaaatactaacttgcaagttcagcaacagctaagaaaacaatcctagacttggaaattgaaagattggaagagaagtggagggattcctttggaaccctttacgtacgtatgtgtaaggaattgtaggcatccagtaccctgctgactctgacatgcccccagcctcccccagctctgcagggagccctggtgccagagaccttctcccatttctccctatgggtgcctgacctgagggcagagacatctgagtgtgtataagcacagcaggacaccaggacctggcctgaagacatttcctctcctcccctctggatttctcagagactgttctgcgatgaccacaacaaggtaccggcccacctgggacctggccctcgacccgctggtgtcttgcaagctctgtcttggggagtacccagtggagcagatgacaaccatagcccagtgccaatgcatcttctgtactctgtgcctgaaacagtatgttgagctcttgatc

SEQ ID NO: 177256 - DNA, 5036 bp, Homo sapiens
  Payload ID: 14781
  Gene Symbol: RNF144B
  Gene Name: ring finger protein 144B
  Uniprot ID: Q7Z419
  ENST ID: ENST00000259939
  CDS Start-End: 318-1229
gagctgtgccccacgctcccgctgcaacagtcccgggcatcgcagctgccagtcaaggctaggaggcggtcggggactccgcctcctcccgacccgtaggtctgggagcgcaagtcctgttgcagtcttgcaaagtgtaaagctgtcagccgcagagcacggaggaaagacggagagaatggaagagctcctgtccggtgtgccagcagcccggactggcggtgagcgcgagggaggctactgagaagcccggcgacggaggaacgcaggtctgctgccagggattgaggagactgaagaatgctgaagacaggctgatgggctcagctggtaggctccactatctcgccatgactgctgaaaatcccactcctggagacctggctccggcccccctcatcacttgcaaactctgcctgtgtgagcagtctctggacaagatgaccacactccaggaatgccagtgcatcttttgcacagcttgcctgaaacagtacatgcagctggcaatccgagaaggatgtgggtctcccatcacttgccctgacatggtgtgcctaaaccacgggaccctgcaggaagctgagattgcctgtttggtacctgtggaccagtttcaactttatcagaggttaaaatttgaaagagaagttcatctggacccctaccgaacatggtgtcctgttgcagactgtcagacagtgtgccctgttgcctcgagtgacccaggacagcctgtgctggtggaatgcccttcttgccacctgaaattctgctcgtgttgcaaggatgcttggcatgcagaggtctcctgtagagacagtcagcctattgtcctgccaacagagcaccgagccctctttgggacagatgcagaagcccccattaagcagtgcccagtttgccgggtttatatcgaacgcaatgaaggctgcgctcagatgatgtgcaaaaactgcaagcatacattttgctggtactgcctccagaacttggataatgacattttcctcagacattatgacaaagggccatgcaggaataaacttggccactcaagagcatcagtgatgtggaaccgaacacaggtggtggggattctcgtaggcttgggcatcattgccttggttacttcacccttgttactcctggcctccccatgtataatctgttgtgtctgcaagtcctgtcggggcaagaagaaaaagcacgacccatccacaacctaaagatctctgtgttcatacgccccagatatgtgagttacatgagatggcacagtgataaagccccatttagtgaccttgcctccttctccttgccaactttgaaagtgcctccgtgtccagactttgaacttgcctgccagccttcagcatcaggaaaggccaagtcctgggtgtgagtgttcctgtgtaacaagaactgggctcaacggtccagctgtttctatggagctttggggttccttgagatgaatgaacatatcattttatcatccaaaggatctcactggactgttcaacttccagccaaattcaaggagcttgcgggaacatttgatataacaaatgtgttgtcattgttggcaacatacaagataaccaagaagctggagtctgttctgtgttgatttgactgccatgagaaacacaggggaaacctgatgaggagaaggataagactgcgtaaggagaaatcctcataggagctataaagcaggctgctgatctcagcagttgatatggtggttgtgcctctgctggctactgggtgtgctgtccccatgttcccgctgtgatttggcagaaacacaataggcttctccttgtgtgatctcagcttcaagcaggtgaaactgctgtgcagagggagttgccccttcccagtaaaagagttgcagcctgttaaacaatgtggtctaatttagtgtctctcccttggcaaatgtaagttttctaagttggccaacttgtctcttacagccagtggctgtggtctacagaattgtttcatataaaatacgggtagagtggtagagtttcaaaactttcgtcatagatatctgggacctttctcaggatctgtgttcacacagccaatagatttggaatcaggcctaagagtacacatggagggtaaatattaaagtgcgtattatgtacatctagaatccatgtgacttgcagcctacctgtaatttctatccattgagcatgcatggatatacccaatagtacacacaaaataaatgtttacttaagagccattctatccttttgtgactgaaatggtttattgtaaatctgcctaaagattttttgcatattatatatgtgaattttggttgtaagttcataacttacccaagggtatagactcataactcttttaaaacagtgcttagtacaatatcctgccatctctgtaaaaacgctaattgataaccgagtcatttacatgttttcgaacacagaatagctcttttctcagcatcattattgctctttcagcatctgttaggacagtctgaatactttctgtttcaaggcactgataaaaccgcaacaaaaacatgtaagaaataaaatagaaatgctttatataatttagtttaaatttatgtatcacctcattgtgacttattttttccattataccattagtcagatttgaataacgaggttttgaaaggataaaaccttttctccaatgacaggattatataattgctattggcaatgtagcctggtgcttcatgagacctatgctaaatgttactggagagttcttgaagccagggataccatatcaggaactattcaggatctatgatattttctgaggtaactgggtaatagaatatcaaattgctgctatctcggacctattgttaaaggatgatgctttgcctatgtaataggatatatcctaagtggggatgtgtatatttcaggaactttaattcacaagtatatattgatatctgatgtgtgtatagtacatctgttggttatgtacattttaatttacatgttgtgtagaacatagatgagaactctgggaaaacttgggaatggcaaccaaccaaaatcatttttaatcatttattagaaatttctcaatattgtgtctttttcttttgaaactctaaacacttcagaaaaaaacactatcagtgtagttcatgttagtataattatagatttacatatatttgaatagttaatttgctttgttttacacgtagcccactgcctcattataggtaaaaggcatttataactgctcaggggattacgagaactcaactgaaactgaatttttgtaacaagaatgttaatagtggcaaagtcctctgtcagtaaactctttaagcttggtgctgcaaagagtctttaaatgggggctgatttcaagtaacctaaaagactgtgttatcagaggaagaggtcccaaatttggagtaaagatgggagaaaataaatatgtgctatttccttggcgagttgagggaatttgccaccttacagagtttgtatcactgaattagctgcttttgtttttttttttttttttttgccagggctatggagtgggggttgtttgtcaaactgattttcaataattggatttaattttttttaacattgaaaagtgcctgaaaaatggtaaattcttaaatgtgtgtgagattgtcagaatcaacaaaactaggttggttaaacatatctctggtacatcaaggggcatgatacaaaccagtctaaagactgtttataaaggagagagctggcgacttatttttatttttattttttggacagagtctccctttgtcacccaggccggagtgcagtggcatgatcatggttcacttcaacccctacctcctgggctcaagtgttcctctcaccttatcctcctgagcagctgggactacaggcacacaccaccacacctggctaagttttgtattttttgtagagatggggtttctctgtgttgcccagtcttgtctcaaactcctgggctcaagcgatccacccaccttgggctcccaaagtgttgggattacaggtgtgtgtcactgtgcctgacagctgacagttttaactgacaactttgataacagaggctgctatttttgttttagataattggccagtgacagagtttacccttgcctcctttcttggtctgccagctttgtcctttctgagtgattctctttctgtattgagaggaagtgtgggtctacatagggatgtttggatgctatggcaagaatctttttgtgtttggagtgtagtccatttgcaatagaaataaaaaaatccgtcaccaaattgtaacctggatgttatagcccagcatctagaaatcctatgaaacgtattagcacaatatcttgccattgtcccatctaggaaattttttcttgttgtgaggtagggaagtgaggaggaaagccatgccgaagcaaatgttagaatcttaggcatcctatttgttcatgccatgggtatttgctttggacttggagtctgtactttgaaagaggcctttgaaaaacaaataattctgtgtgaattttcttgtagcgtgcttcatgaaaatatctacttatccaggtttgcaaatgtacatgttcatttgaatgtaaatcaccatttcttggaaccccacgttttttcttaaaaattattctgaattaaatgtatatttctttagccttccctacacagtactaataaaagacttttctttctgttcatgaatggatgcctttatgtgatatagagtcatgtgtgtatgtgtagctttaagggcaatttcagaaatgcattagatgaatgacattttataaagcgatcacaattgatatctacaggctattatgtctcatgttgattcatgatccaggaagttttatgtatttaaaaaattgctatcgtgttatatttttccaatttttggagaagaaaatagctgtttaggctctctagccacaataaatgtaagcaggaaatcaa

SEQ ID NO: 177257 - DNA, 3364 bp, Homo sapiens
  Payload ID: 14782
  Gene Symbol: RNF145
  Gene Name: ring finger protein 145
  Uniprot ID: Q96MT1
  ENST ID: ENST00000274542
  CDS Start-End: 28-2103
agactccctgtctttgcggtttgggagatgatgagaaaccacagaattgctagtagtttatgtggagatcaggtcttctccaagaaaaaaaaaaagaaaaaaaaaaacaacatggctgcaaaggagaaactggaggcagtgttaaatgtggccctgagggtgccaagcatcatgctgttggatgtcctgtacagatgggatgtcagctcctttttccagcagatccaaagaagtagccttagtaataaccctcttttccagtataagtatttggctcttaatatgcattatgtaggttatatcttaagtgtggtgctgctaacattgcccaggcagcatctggttcagctttatctatattttttgactgctctgctcctctatgctggacatcaaatttccagggactatgttcggagtgaactggagtttgcctatgagggaccaatgtatttagaacctctctctatgaatcggtttaccacagccttaataggtcagttggtggtgtgtactttatgctcctgtgtcatgaaaacaaagcagatttggctgttttcagctcacatgcttcctctgctagcacgactctgccttgttcctttggagacaattgttatcatcaataaatttgctatgatttttactggattggaagttctctattttcttgggtctaatcttttggtaccttataaccttgctaaatctgcatacagagaattggttcaggtagtggaggtatatggccttctcgccttgggaatgtccctgtggaatcaactggtagtccctgttcttttcatggttttctggctcgtcttatttgctcttcagatttactcctatttcagtactcgagatcagcctgcatcacgtgagaggcttcttttcctttttctgacaagtattgcggaatgctgcagcactccttactctcttttgggtttggtcttcacggtttcttttgttgccttgggtgttctcacactctgcaagttttacttgcagggttatcgagctttcatgaatgatcctgccatgaatcggggcatgacagaaggagtaacgctgttaatcctggcagtgcagactgggctgatagaactgcaggttgttcatcgggcattcttgctcagtattatccttttcattgtcgtagcttctatcctacagtctatgttagaaattgcagatcctattgttttggcactgggagcatctagagacaagagcttgtggaaacacttccgtgctgtaagcctttgtttatttttattggtattccctgcttatatggcttatatgatttgccagtttttccacatggatttttggcttcttatcattatttccagcagcattcttacctctcttcaggttctgggaacactttttatttatgtcttatttatggttgaggaattcagaaaagagccagtggaaaacatggatgatgtcatctactatgtgaatggcacttaccgcctgctggagtttcttgtggccctctgtgtggtggcctatggcgtctcagagaccatctttggagaatggacagtgatgggctcaatgatcatcttcattcattcctactataacgtgtggcttcgggcccagctggggtggaagagctttcttctccgcagggatgctgtgaataagattaaatcgttacccattgctacgaaagagcagcttgagaaacacaatgatatttgtgccatctgttatcaggacatgaaatctgctgtgatcacgccttgcagtcattttttccatgcaggctgtcttaagaaatggctgtatgtccaggagacctgccctctgtgccactgccatctgaaaaactcctcccagcttccaggattaggaactgagccagttctacagcctcatgctggagctgagcaaaacgtcatgtttcaggaaggtactgaacccccaggccaggagcatactccagggaccaggatacaggaaggttccagggacaataatgagtacattgccagacgaccagataaccaggaaggggcttttgaccccaaagaatatcctcacagtgcgaaagatgaagcacatcctgttgaatcagcctagaggagaagcagcaggaatgatgctttgatactctggaggagaagttaactcaagatggaattcatgttctgatttgaggaatgaaaatgagatgatcaggcaggaaactgacattccaaggatctaatccaggaagtactctcagtggggaccacctgctttcatcccctgacattgtgggagaaattttgcaatgtatgctaatcaaaatgtatttatatgttctctgctgatgttttatagaggtttgtgaagaaaattcaacctcagcaacttcagaaactgcccctgatacgtgtgagagagaaataaaatcagattttgagtgttgaagggactgaggaagtgaggataaagagcatgaggacagcatggaaagaaggaggcagaagtggaactgaactttcactctccatgggacagatcaatctcattatcaagtctgaatagcaaccagccctctcctccaccccgtttctcctcagttaattggagctcagtcaggtgattattgagtcttgtacagcactgaaatgaaatcaaagatgaagaagcattgattgtattcaaagattgaagcacgctcatactttgtatgtgctttagggaaggggtgggtgggcacttgggccttgcgggtgcattcatgtaatctgagactcttgaactttatgacggagtcttcagtattttgatgtatatgaaacttttgttaaatatgttgtatacttcgctggctgtgtgaagtaaactaaaactctgatgaacactttggagtctgctttagtgaaggagaccaaagtgggaagggctttagggcactgatagaggccctgggtgtacttttcaatcctgtgtaatgtttaattcttgcaactgaatcaaaacagtgttaaattatggcaatatttgcactttgggaatgagtacataactgtatgatcacactctgcaaatgccacttttaaagctgttaatagactttgcaccttttctttgacaaggatgtgtcatatttaaatttttacattcatcatggctacaggtagaactggggaggggggaatgtaattttttatgggaattttgatatgaaaagaaactagtcatttatttatacaataggcttggctcaaaaagtgtttttcagacctcggtattcctaatgtgggatgtgactttattttatttttagtagcaaatttggatgtagactgacagacatagctgaatgtcttaataaatttaaatttgaagataa

SEQ ID NO: 177258 - DNA, 3613 bp, Homo sapiens
  Payload ID: 14782
  Gene Symbol: RNF145
  Gene Name: ring finger protein 145
  Uniprot ID: Q96MT1
  ENST ID: ENST00000424310
  CDS Start-End: 361-2352
agagcgccgggggcgggaggagcaaacgcaggaggccatggccgccgacgccggcgccggctgctaaggggctcggcccgcgagcgcctgctgccgcggacgatggtgaccgtacgggccgggccgctgccgctgccgctgcctccgcctccccagaagcaacatccgaggctcggcgcagaagagccgccgctgtgagccgtgccgtaccggcccccgccgccgcccgaggagaacgggagggcgggcgagagagccggggagttgcggagcccgcccgccggcagcgccgctccccagggagggagtccgcagcctgaggtcttctccaagaaaaaaaaaaagaaaaaaaaaaacaacatggctgcaaaggagaaactggaggcagtgttaaatgtggccctgagggtgccaagcatcatgctgttggatgtcctgtacagatgggatgtcagctcctttttccagcagatccaaagaagtagccttagtaataaccctcttttccagtataagtatttggctcttaatatgcattatgtaggttatatcttaagtgtggtgctgctaacattgcccaggcagcatctggttcagctttatctatattttttgactgctctgctcctctatgctggacatcaaatttccagggactatgttcggagtgaactggagtttgcctatgagggaccaatgtatttagaacctctctctatgaatcggtttaccacagccttaataggtcagttggtggtgtgtactttatgctcctgtgtcatgaaaacaaagcagatttggctgttttcagctcacatgcttcctctgctagcacgactctgccttgttcctttggagacaattgttatcatcaataaatttgctatgatttttactggattggaagttctctattttcttgggtctaatcttttggtaccttataaccttgctaaatctgcatacagagaattggttcaggtagtggaggtatatggccttctcgccttgggaatgtccctgtggaatcaactggtagtccctgttcttttcatggttttctggctcgtcttatttgctcttcagatttactcctatttcagtactcgagatcagcctgcatcacgtgagaggcttcttttcctttttctgacaagtattgcggaatgctgcagcactccttactctcttttgggtttggtcttcacggtttcttttgttgccttgggtgttctcacactctgcaagttttacttgcagggttatcgagctttcatgaatgatcctgccatgaatcggggcatgacagaaggagtaacgctgttaatcctggcagtgcagactgggctgatagaactgcaggttgttcatcgggcattcttgctcagtattatccttttcattgtcgtagcttctatcctacagtctatgttagaaattgcagatcctattgttttggcactgggagcatctagagacaagagcttgtggaaacacttccgtgctgtaagcctttgtttatttttattggtattccctgcttatatggcttatatgatttgccagtttttccacatggatttttggcttcttatcattatttccagcagcattcttacctctcttcaggttctgggaacactttttatttatgtcttatttatggttgaggaattcagaaaagagccagtggaaaacatggatgatgtcatctactatgtgaatggcacttaccgcctgctggagtttcttgtggccctctgtgtggtggcctatggcgtctcagagaccatctttggagaatggacagtgatgggctcaatgatcatcttcattcattcctactataacgtgtggcttcgggcccagctggggtggaagagctttcttctccgcagggatgctgtgaataagattaaatcgttacccattgctacgaaagagcagcttgagaaacacaatgatatttgtgccatctgttatcaggacatgaaatctgctgtgatcacgccttgcagtcattttttccatgcaggctgtcttaagaaatggctgtatgtccaggagacctgccctctgtgccactgccatctgaaaaactcctcccagcttccaggattaggaactgagccagttctacagcctcatgctggagctgagcaaaacgtcatgtttcaggaaggtactgaacccccaggccaggagcatactccagggaccaggatacaggaaggttccagggacaataatgagtacattgccagacgaccagataaccaggaaggggcttttgaccccaaagaatatcctcacagtgcgaaagatgaagcacatcctgttgaatcagcctagaggagaagcagcaggaatgatgctttgatactctggaggagaagttaactcaagatggaattcatgttctgatttgaggaatgaaaatgagatgatcaggcaggaaactgacattccaaggatctaatccaggaagtactctcagtggggaccacctgctttcatcccctgacattgtgggagaaattttgcaatgtatgctaatcaaaatgtatttatatgttctctgctgatgttttatagaggtttgtgaagaaaattcaacctcagcaacttcagaaactgcccctgatacgtgtgagagagaaataaaatcagattttgagtgttgaagggactgaggaagtgaggataaagagcatgaggacagcatggaaagaaggaggcagaagtggaactgaactttcactctccatgggacagatcaatctcattatcaagtctgaatagcaaccagccctctcctccaccccgtttctcctcagttaattggagctcagtcaggtgattattgagtcttgtacagcactgaaatgaaatcaaagatgaagaagcattgattgtattcaaagattgaagcacgctcatactttgtatgtgctttagggaaggggtgggtgggcacttgggccttgcgggtgcattcatgtaatctgagactcttgaactttatgacggagtcttcagtattttgatgtatatgaaacttttgttaaatatgttgtatacttcgctggctgtgtgaagtaaactaaaactctgatgaacactttggagtctgctttagtgaaggagaccaaagtgggaagggctttagggcactgatagaggccctgggtgtacttttcaatcctgtgtaatgtttaattcttgcaactgaatcaaaacagtgttaaattatggcaatatttgcactttgggaatgagtacataactgtatgatcacactctgcaaatgccacttttaaagctgttaatagactttgcaccttttctttgacaaggatgtgtcatatttaaatttttacattcatcatggctacaggtagaactggggaggggggaatgtaattttttatgggaattttgatatgaaaagaaactagtcatttatttatacaataggcttggctcaaaaagtgtttttcagacctcggtattcctaatgtgggatgtgactttattttatttttagtagcaaatttggatgtagactgacagacatagctgaatgtcttaataaatttaaatttgaagataa

SEQ ID NO: 177259 - DNA, 2340 bp, Homo sapiens
  Payload ID: 14782
  Gene Symbol: RNF145
  Gene Name: ring finger protein 145
  Uniprot ID: Q96MT1
  ENST ID: ENST00000520638
  CDS Start-End: 158-2191
acttagaattttaggctctagctttgtgctcttaacattttcagtgaggcctaccatcctaaccgatggacagcccgaaaatttacttttcttaagatcagttttagttgatggtagaatttttttttttaactggttgggagaaagaaaggagataatggtcttctccaagaaaaaaaaaaagaaaaaaaaaaacaacatggctgcaaaggagaaactggaggcagtgttaaatgtggccctgagggtgccaagcatcatgctgttggatgtcctgtacagatgggatgtcagctcctttttccagcagatccaaagaagtagccttagtaataaccctcttttccagtataagtatttggctcttaatatgcattatgtaggttatatcttaagtgtggtgctgctaacattgcccaggcagcatctggttcagctttatctatattttttgactgctctgctcctctatgctggacatcaaatttccagggactatgttcggagtgaactggagtttgcctatgagggaccaatgtatttagaacctctctctatgaatcggtttaccacagccttaataggtcagttggtggtgtgtactttatgctcctgtgtcatgaaaacaaagcagatttggctgttttcagctcacatgcttcctctgctagcacgactctgccttgttcctttggagacaattgttatcatcaataaatttgctatgatttttactggattggaagttctctattttcttgggtctaatcttttggtaccttataaccttgctaaatctgcatacagagaattggttcaggtagtggaggtatatggccttctcgccttgggaatgtccctgtggaatcaactggtagtccctgttcttttcatggttttctggctcgtcttatttgctcttcagatttactcctatttcagtactcgagatcagcctgcatcacgtgagaggcttcttttcctttttctgacaagtattgcggaatgctgcagcactccttactctcttttgggtttggtcttcacggtttcttttgttgccttgggtgttctcacactctgcaagttttacttgcagggttatcgagctttcatgaatgatcctgccatgaatcggggcatgacagaaggagtaacgctgttaatcctggcagtgcagactgggctgatagaactgcaggttgttcatcgggcattcttgctcagtattatccttttcattgtcgtagcttctatcctacagtctatgttagaaattgcagatcctattgttttggcactgggagcatctagagacaagagcttgtggaaacacttccgtgctgtaagcctttgtttatttttattggtattccctgcttatatggcttatatgatttgccagtttttccacatggatttttggcttcttatcattatttccagcagcattcttacctctcttcaggttctgggaacactttttatttatgtcttatttatggttgaggaattcagaaaagagccagtggaaaacatggatgatgtcatctactatgtgaatggcacttaccgcctgctggagtttcttgtggccctctgtgtggtggcctatggcgtctcagagaccatctttggagaatggacagtgatgggctcaatgatcatcttcattcattcctactataacgtgtggcttcgggcccagctggggtggaagagctttcttctccgcagggatgctgtgaataagattaaatcgttacccattgctacgaaagagcagcttgagaaacacaatgatatttgtgccatctgttatcaggacatgaaatctgctgtgatcacgccttgcagtcattttttccatgcaggctgtcttaagaaatggctgtatgtccaggagacctgccctctgtgccactgccatctgaaaaactcctcccagcttccaggattaggaactgagccagttctacagcctcatgctggagctgagcaaaacgtcatgtttcaggaaggtactgaacccccaggccaggagcatactccagggaccaggatacaggaaggttccagggacaataatgagtacattgccagacgaccagataaccaggaaggggcttttgaccccaaagaatatcctcacagtgcgaaagatgaagcacatcctgttgaatcagcctagaggagaagcagcaggaatgatgctttgatactctggaggagaagttaactcaagatggaattcatgttctgatttgaggaatgaaaatgagatgatcaggcaggaaactgacattccaaggatctaatccaggaagtactctcagtggg

SEQ ID NO: 177260 - DNA, 3478 bp, Homo sapiens
  Payload ID: 14782
  Gene Symbol: RNF145
  Gene Name: ring finger protein 145
  Uniprot ID: Q96MT1
  ENST ID: ENST00000519865
  CDS Start-End: 226-2217
agtggatggccttgcgtcgcagtctgcagtaaagaggaaactagtctgaaagggaaggagaggactgtgtgtctttttattttttaaaatacggagtgtgcagttttactgaatcttgaatcatgcccaaaagaatgagctgtcggtgctgcagtcgtgacccaggctgagcggccgatggcagaggtcttctccaagaaaaaaaaaaagaaaaaaaaaaacaacatggctgcaaaggagaaactggaggcagtgttaaatgtggccctgagggtgccaagcatcatgctgttggatgtcctgtacagatgggatgtcagctcctttttccagcagatccaaagaagtagccttagtaataaccctcttttccagtataagtatttggctcttaatatgcattatgtaggttatatcttaagtgtggtgctgctaacattgcccaggcagcatctggttcagctttatctatattttttgactgctctgctcctctatgctggacatcaaatttccagggactatgttcggagtgaactggagtttgcctatgagggaccaatgtatttagaacctctctctatgaatcggtttaccacagccttaataggtcagttggtggtgtgtactttatgctcctgtgtcatgaaaacaaagcagatttggctgttttcagctcacatgcttcctctgctagcacgactctgccttgttcctttggagacaattgttatcatcaataaatttgctatgatttttactggattggaagttctctattttcttgggtctaatcttttggtaccttataaccttgctaaatctgcatacagagaattggttcaggtagtggaggtatatggccttctcgccttgggaatgtccctgtggaatcaactggtagtccctgttcttttcatggttttctggctcgtcttatttgctcttcagatttactcctatttcagtactcgagatcagcctgcatcacgtgagaggcttcttttcctttttctgacaagtattgcggaatgctgcagcactccttactctcttttgggtttggtcttcacggtttcttttgttgccttgggtgttctcacactctgcaagttttacttgcagggttatcgagctttcatgaatgatcctgccatgaatcggggcatgacagaaggagtaacgctgttaatcctggcagtgcagactgggctgatagaactgcaggttgttcatcgggcattcttgctcagtattatccttttcattgtcgtagcttctatcctacagtctatgttagaaattgcagatcctattgttttggcactgggagcatctagagacaagagcttgtggaaacacttccgtgctgtaagcctttgtttatttttattggtattccctgcttatatggcttatatgatttgccagtttttccacatggatttttggcttcttatcattatttccagcagcattcttacctctcttcaggttctgggaacactttttatttatgtcttatttatggttgaggaattcagaaaagagccagtggaaaacatggatgatgtcatctactatgtgaatggcacttaccgcctgctggagtttcttgtggccctctgtgtggtggcctatggcgtctcagagaccatctttggagaatggacagtgatgggctcaatgatcatcttcattcattcctactataacgtgtggcttcgggcccagctggggtggaagagctttcttctccgcagggatgctgtgaataagattaaatcgttacccattgctacgaaagagcagcttgagaaacacaatgatatttgtgccatctgttatcaggacatgaaatctgctgtgatcacgccttgcagtcattttttccatgcaggctgtcttaagaaatggctgtatgtccaggagacctgccctctgtgccactgccatctgaaaaactcctcccagcttccaggattaggaactgagccagttctacagcctcatgctggagctgagcaaaacgtcatgtttcaggaaggtactgaacccccaggccaggagcatactccagggaccaggatacaggaaggttccagggacaataatgagtacattgccagacgaccagataaccaggaaggggcttttgaccccaaagaatatcctcacagtgcgaaagatgaagcacatcctgttgaatcagcctagaggagaagcagcaggaatgatgctttgatactctggaggagaagttaactcaagatggaattcatgttctgatttgaggaatgaaaatgagatgatcaggcaggaaactgacattccaaggatctaatccaggaagtactctcagtggggaccacctgctttcatcccctgacattgtgggagaaattttgcaatgtatgctaatcaaaatgtatttatatgttctctgctgatgttttatagaggtttgtgaagaaaattcaacctcagcaacttcagaaactgcccctgatacgtgtgagagagaaataaaatcagattttgagtgttgaagggactgaggaagtgaggataaagagcatgaggacagcatggaaagaaggaggcagaagtggaactgaactttcactctccatgggacagatcaatctcattatcaagtctgaatagcaaccagccctctcctccaccccgtttctcctcagttaattggagctcagtcaggtgattattgagtcttgtacagcactgaaatgaaatcaaagatgaagaagcattgattgtattcaaagattgaagcacgctcatactttgtatgtgctttagggaaggggtgggtgggcacttgggccttgcgggtgcattcatgtaatctgagactcttgaactttatgacggagtcttcagtattttgatgtatatgaaacttttgttaaatatgttgtatacttcgctggctgtgtgaagtaaactaaaactctgatgaacactttggagtctgctttagtgaaggagaccaaagtgggaagggctttagggcactgatagaggccctgggtgtacttttcaatcctgtgtaatgtttaattcttgcaactgaatcaaaacagtgttaaattatggcaatatttgcactttgggaatgagtacataactgtatgatcacactctgcaaatgccacttttaaagctgttaatagactttgcaccttttctttgacaaggatgtgtcatatttaaatttttacattcatcatggctacaggtagaactggggaggggggaatgtaattttttatgggaattttgatatgaaaagaaactagtcatttatttatacaataggcttggctcaaaaagtgtttttcagacctcggtattcctaatgtgggatgtgactttattttatttttagtagcaaatttggatgtagactgacagacatagctgaatgtcttaataaatttaaatttgaagataa

SEQ ID NO: 177261 - DNA, 2658 bp, Homo sapiens
  Payload ID: 14782
  Gene Symbol: RNF145
  Gene Name: ring finger protein 145
  Uniprot ID: Q96MT1
  ENST ID: ENST00000521606
  CDS Start-End: 237-2279
gtgggaggaggtgcggggagagaggaaggggcctgtgcagtgagcaggcatcaaagattagtggatggccttgcgtcgcagtctgcagtaaagaggaaactagtctgaaagggaaggagaggactgtgtgtctttttattttttaaaatacggagtgtgcagttttactgaatcttgaatcatgcccaaaagaatgagctgtcggtgctgcagtcgtgacccaggctgagcggccgatggcagaggtagtcttctccaagaaaaaaaaaaagaaaaaaaaaaacaacatggctgcaaaggagaaactggaggcagtgttaaatgtggccctgagggtgccaagcatcatgctgttggatgtcctgtacagatgggatgtcagctcctttttccagcagatccaaagaagtagccttagtaataaccctcttttccagtataagtatttggctcttaatatgcattatgtaggttatatcttaagtgtggtgctgctaacattgcccaggcagcatctggttcagctttatctatattttttgactgctctgctcctctatgctggacatcaaatttccagggactatgttcggagtgaactggagtttgcctatgagggaccaatgtatttagaacctctctctatgaatcggtttaccacagccttaataggtcagttggtggtgtgtactttatgctcctgtgtcatgaaaacaaagcagatttggctgttttcagctcacatgcttcctctgctagcacgactctgccttgttcctttggagacaattgttatcatcaataaatttgctatgatttttactggattggaagttctctattttcttgggtctaatcttttggtaccttataaccttgctaaatctgcatacagagaattggttcaggtagtggaggtatatggccttctcgccttgggaatgtccctgtggaatcaactggtagtccctgttcttttcatggttttctggctcgtcttatttgctcttcagatttactcctatttcagtactcgagatcagcctgcatcacgtgagaggcttcttttcctttttctgacaagtattgcggaatgctgcagcactccttactctcttttgggtttggtcttcacggtttcttttgttgccttgggtgttctcacactctgcaagttttacttgcagggttatcgagctttcatgaatgatcctgccatgaatcggggcatgacagaaggagtaacgctgttaatcctggcagtgcagactgggctgatagaactgcaggttgttcatcgggcattcttgctcagtattatccttttcattgtcgtagcttctatcctacagtctatgttagaaattgcagatcctattgttttggcactgggagcatctagagacaagagcttgtggaaacacttccgtgctgtaagcctttgtttatttttattggtattccctgcttatatggcttatatgatttgccagtttttccacatggatttttggcttcttatcattatttccagcagcattcttacctctcttcaggttctgggaacactttttatttatgtcttatttatggttgaggaattcagaaaagagccagtggaaaacatggatgatgtcatctactatgtgaatggcacttaccgcctgctggagtttcttgtggccctctgtgtggtggcctatggcgtctcagagaccatctttggagaatggacagtgatgggctcaatgatcatcttcattcattcctactataacgtgtggcttcgggcccagctggggtggaagagctttcttctccgcagggatgctgtgaataagattaaatcgttacccattgctacgaaagagcagcttgagaaacacaatgatatttgtgccatctgttatcaggacatgaaatctgctgtgatcacgccttgcagtcattttttccatgcaggctgtcttaagaaatggctgtatgtccaggagacctgccctctgtgccactgccatctgaaaaactcctcccagcttccaggattaggaactgagccagttctacagcctcatgctggagctgagcaaaacgtcatgtttcaggaaggtactgaacccccaggccaggagcatactccagggaccaggatacaggaaggttccagggacaataatgagtacattgccagacgaccagataaccaggaaggggcttttgaccccaaagaatatcctcacagtgcgaaagatgaagcacatcctgttgaatcagcctagaggagaagcagcaggaatgatgctttgatactctggaggagaagttaactcaagatggaattcatgttctgatttgaggaatgaaaatgagatgatcaggcaggaaactgacattccaaggatctaatccaggaagtactctcagtggggaccacctgctttcatcccctgacattgtgggagaaattttgcaatgtatgctaatcaaaatgtatttatatgttctctgctgatgttttatagaggtttgtgaagaaaattcaacctcagcaacttcagaaactgcccctgatacgtgtgagagagaaataaaatcagattttgagtgttgaagggactgaggaagtgaggataaagagcatgaggacagcatggaaag

SEQ ID NO: 177262 - DNA, 2603 bp, Homo sapiens
  Payload ID: 14782
  Gene Symbol: RNF145
  Gene Name: ring finger protein 145
  Uniprot ID: Q96MT1
  ENST ID: ENST00000518802
  CDS Start-End: 151-2232
attcattcatccagtcacttactccacaggggtttgagtgcctgcacttggtgctgggcacggctgagccatcccagacgccaaggagtttacagtctagtccagtcagtgacgaggttaaaacgaattctcgcatcattgctactgcgaatgcaccgggacaggatcagcccttcaaattctcccacgtggtccctgcaggtcttctccaagaaaaaaaaaaagaaaaaaaaaaacaacatggctgcaaaggagaaactggaggcagtgttaaatgtggccctgagggtgccaagcatcatgctgttggatgtcctgtacagatgggatgtcagctcctttttccagcagatccaaagaagtagccttagtaataaccctcttttccagtataagtatttggctcttaatatgcattatgtaggttatatcttaagtgtggtgctgctaacattgcccaggcagcatctggttcagctttatctatattttttgactgctctgctcctctatgctggacatcaaatttccagggactatgttcggagtgaactggagtttgcctatgagggaccaatgtatttagaacctctctctatgaatcggtttaccacagccttaataggtcagttggtggtgtgtactttatgctcctgtgtcatgaaaacaaagcagatttggctgttttcagctcacatgcttcctctgctagcacgactctgccttgttcctttggagacaattgttatcatcaataaatttgctatgatttttactggattggaagttctctattttcttgggtctaatcttttggtaccttataaccttgctaaatctgcatacagagaattggttcaggtagtggaggtatatggccttctcgccttgggaatgtccctgtggaatcaactggtagtccctgttcttttcatggttttctggctcgtcttatttgctcttcagatttactcctatttcagtactcgagatcagcctgcatcacgtgagaggcttcttttcctttttctgacaagtattgcggaatgctgcagcactccttactctcttttgggtttggtcttcacggtttcttttgttgccttgggtgttctcacactctgcaagttttacttgcagggttatcgagctttcatgaatgatcctgccatgaatcggggcatgacagaaggagtaacgctgttaatcctggcagtgcagactgggctgatagaactgcaggttgttcatcgggcattcttgctcagtattatccttttcattgtcgtagcttctatcctacagtctatgttagaaattgcagatcctattgttttggcactgggagcatctagagacaagagcttgtggaaacacttccgtgctgtaagcctttgtttatttttattggtattccctgcttatatggcttatatgatttgccagtttttccacatggatttttggcttcttatcattatttccagcagcattcttacctctcttcaggttctgggaacactttttatttatgtcttatttatggttgaggaattcagaaaagagccagtggaaaacatggatgatgtcatctactatgtgaatggcacttaccgcctgctggagtttcttgtggccctctgtgtggtggcctatggcgtctcagagaccatctttggagaatggacagtgatgggctcaatgatcatcttcattcattcctactataacgtgtggcttcgggcccagctggggtggaagagctttcttctccgcagggatgctgtgaataagattaaatcgttacccattgctacgaaagagcagcttgagaaacacaatgatatttgtgccatctgttatcaggacatgaaatctgctgtgatcacgccttgcagtcattttttccatgcaggctgtcttaagaaatggctgtatgtccaggagacctgccctctgtgccactgccatctgaaaaactcctcccagcttccaggattaggaactgagccagttctacagcctcatgctggagctgagcaaaacgtcatgtttcaggaaggtactgaacccccaggccaggagcatactccagggaccaggatacaggaaggttccagggacaataatgagtacattgccagacgaccagataaccaggaaggggcttttgaccccaaagaatatcctcacagtgcgaaagatgaagcacatcctgttgaatcagcctagaggagaagcagcaggaatgatgctttgatactctggaggagaagttaactcaagatggaattcatgttctgatttgaggaatgaaaatgagatgatcaggcaggaaactgacattccaaggatctaatccaggaagtactctcagtggggaccacctgctttcatcccctgacattgtgggagaaattttgcaatgtatgctaatcaaaatgtatttatatgttctctgctgatgttttatagaggtttgtgaagaaaattcaacctcagcaacttcagaaactgcccctgatacgtgtgagagagaaataaaatcagattttgagtgttgaagggactgaggaagtgaggataaagagcatgaggacagc

SEQ ID NO: 177263 - DNA, 3624 bp, Homo sapiens
  Payload ID: 14782
  Gene Symbol: RNF145
  Gene Name: ring finger protein 145
  Uniprot ID: Q96MT1
  ENST ID: ENST00000611185
  CDS Start-End: 376-2367
gggccgcgcgcaggcgcagagtgcggaagtcgggccgcggccgccgcagagcgccgccgccgacgccggcgccggctgctaaggggctcggcccgcgagcgcctgctgccgcggacgatggtgaccgtacgggccgggccgctgccgctgccgctgcctccgcctccccagaagcaacatccgaggctcggcgcagaagagccgccgctgtgagccgtgccgtaccggcccccgccgccgcccgaggagaacgggagggcgggcgagagagccggggagttgcggagcccgcccgccggcagcgccgctccccagggagggagtccgcagcctgaggtcttctccaagaaaaaaaaaaagaaaaaaaaaaacaacatggctgcaaaggagaaactggaggcagtgttaaatgtggccctgagggtgccaagcatcatgctgttggatgtcctgtacagatgggatgtcagctcctttttccagcagatccaaagaagtagccttagtaataaccctcttttccagtataagtatttggctcttaatatgcattatgtaggttatatcttaagtgtggtgctgctaacattgcccaggcagcatctggttcagctttatctatattttttgactgctctgctcctctatgctggacatcaaatttccagggactatgttcggagtgaactggagtttgcctatgagggaccaatgtatttagaacctctctctatgaatcggtttaccacagccttaataggtcagttggtggtgtgtactttatgctcctgtgtcatgaaaacaaagcagatttggctgttttcagctcacatgcttcctctgctagcacgactctgccttgttcctttggagacaattgttatcatcaataaatttgctatgatttttactggattggaagttctctattttcttgggtctaatcttttggtaccttataaccttgctaaatctgcatacagagaattggttcaggtagtggaggtatatggccttctcgccttgggaatgtccctgtggaatcaactggtagtccctgttcttttcatggttttctggctcgtcttatttgctcttcagatttactcctatttcagtactcgagatcagcctgcatcacgtgagaggcttcttttcctttttctgacaagtattgcggaatgctgcagcactccttactctcttttgggtttggtcttcacggtttcttttgttgccttgggtgttctcacactctgcaagttttacttgcagggttatcgagctttcatgaatgatcctgccatgaatcggggcatgacagaaggagtaacgctgttaatcctggcagtgcagactgggctgatagaactgcaggttgttcatcgggcattcttgctcagtattatccttttcattgtcgtagcttctatcctacagtctatgttagaaattgcagatcctattgttttggcactgggagcatctagagacaagagcttgtggaaacacttccgtgctgtaagcctttgtttatttttattggtattccctgcttatatggcttatatgatttgccagtttttccacatggatttttggcttcttatcattatttccagcagcattcttacctctcttcaggttctgggaacactttttatttatgtcttatttatggttgaggaattcagaaaagagccagtggaaaacatggatgatgtcatctactatgtgaatggcacttaccgcctgctggagtttcttgtggccctctgtgtggtggcctatggcgtctcagagaccatctttggagaatggacagtgatgggctcaatgatcatcttcattcattcctactataacgtgtggcttcgggcccagctggggtggaagagctttcttctccgcagggatgctgtgaataagattaaatcgttacccattgctacgaaagagcagcttgagaaacacaatgatatttgtgccatctgttatcaggacatgaaatctgctgtgatcacgccttgcagtcattttttccatgcaggctgtcttaagaaatggctgtatgtccaggagacctgccctctgtgccactgccatctgaaaaactcctcccagcttccaggattaggaactgagccagttctacagcctcatgctggagctgagcaaaacgtcatgtttcaggaaggtactgaacccccaggccaggagcatactccagggaccaggatacaggaaggttccagggacaataatgagtacattgccagacgaccagataaccaggaaggggcttttgaccccaaagaatatcctcacagtgcgaaagatgaagcacatcctgttgaatcagcctagaggagaagcagcaggaatgatgctttgatactctggaggagaagttaactcaagatggaattcatgttctgatttgaggaatgaaaatgagatgatcaggcaggaaactgacattccaaggatctaatccaggaagtactctcagtggggaccacctgctttcatcccctgacattgtgggagaaattttgcaatgtatgctaatcaaaatgtatttatatgttctctgctgatgttttatagaggtttgtgaagaaaattcaacctcagcaacttcagaaactgcccctgatacgtgtgagagagaaataaaatcagattttgagtgttgaagggactgaggaagtgaggataaagagcatgaggacagcatggaaagaaggaggcagaagtggaactgaactttcactctccatgggacagatcaatctcattatcaagtctgaatagcaaccagccctctcctccaccccgtttctcctcagttaattggagctcagtcaggtgattattgagtcttgtacagcactgaaatgaaatcaaagatgaagaagcattgattgtattcaaagattgaagcacgctcatactttgtatgtgctttagggaaggggtgggtgggcacttgggccttgcgggtgcattcatgtaatctgagactcttgaactttatgacggagtcttcagtattttgatgtatatgaaacttttgttaaatatgttgtatacttcgctggctgtgtgaagtaaactaaaactctgatgaacactttggagtctgctttagtgaaggagaccaaagtgggaagggctttagggcactgatagaggccctgggtgtacttttcaatcctgtgtaatgtttaattcttgcaactgaatcaaaacagtgttaaattatggcaatatttgcactttgggaatgagtacataactgtatgatcacactctgcaaatgccacttttaaagctgttaatagactttgcaccttttctttgacaaggatgtgtcatatttaaatttttacattcatcatggctacaggtagaactggggaggggggaatgtaattttttatgggaattttgatatgaaaagaaactagtcatttatttatacaataggcttggctcaaaaagtgtttttcagacctcggtattcctaatgtgggatgtgactttattttatttttagtagcaaatttggatgtagactgacagacatagctgaatgtcttaataaatttaaatttgaag

SEQ ID NO: 177264 - DNA, 2624 bp, Homo sapiens
  Payload ID: 14783
  Gene Symbol: RNF146
  Gene Name: ring finger protein 146
  Uniprot ID: Q9NTX7
  ENST ID: ENST00000309649
  CDS Start-End: 687-1763
gagacaggggcagaacgatgaggcgccggagttagctcgccggtgcgggtgcgggtgcgcggcgcgtcgcggcccctcctccgcgacgcgccgggtggtcacgtgacggccgcgcgcgttcccggcagctgcgggctccgaggccagagagaaaagactgcgaggtggccgcagctgtggccggagaggtgggagtcggagcgaggccctctcgggggagcagggtgaacgccggccactctaggatcctcactcggggagaggaggcatagctcgcggtgtcacctccagccgcaacgtactccgggtcggccttgcgctcggggcctgagaggggcggcggcggggtcaggggccgcacaaagaatgaaccagcagtggaagagaaaatactgtaagctggctgactgctggtgaagaaaatgctttatttttgtggcaggcatctgtgggatctgtaatagaaatatttccaagtctcctcaaaaggaaaagtctctataagaaaaactgaagacacaggagtttgctcaaagaatgctgaaatagatctccaggggatcttcaatattcatgttattttctcctttggtcttatatgattgttacctttatgaagctttagtgattacaaagcactttttttgtccatttttacctgagctttgtaaactctgatttgcaggatggctggctgtggtgaaattgatcattcaataaacatgcttcctacaaacaggaaagcgaacgagtcctgttctaatactgcaccttctttaaccgtccctgaatgtgccatttgtctgcaaacatgtgttcatccagtcagtctgccctgtaagcacgttttctgctatctatgtgtaaaaggagcttcatggcttggaaagcggtgtgctctttgtcgacaagaaattcccgaggatttccttgacaagccaaccttgttgtcaccagaagaactcaaggcagcaagtagaggaaatggtgaatatgcatggtattatgaaggaagaaatgggtggtggcagtacgatgagcgcactagtagagagctggaagatgctttttccaaaggtaaaaagaacactgaaatgttaattgctggctttctgtatgtcgctgatcttgaaaacatggttcaatataggagaaatgaacatggacgtcgcaggaagattaagcgagatataatagatataccaaagaagggagtagctggacttaggctagactgtgatgctaataccgtaaacctagcaagagagagctctgctgacggagcggacagtgtatcagcacagagtggagcttctgttcagcccctagtgtcttctgtaaggcccctaacatcagtagatggtcagttaacaagccctgcaacaccatcccctgatgcaagcacttctctggaagactcttttgctcatttacaactcagtggagacaacacagctgaaaggagtcataggggagaaggagaagaagatcatgaatcaccatcttcaggcagggtaccagcaccagacacctccattgaagaaactgaatcagatgccagtagtgatagtgaggatgtatctgcagttgttgcacagcactccttgacccaacagagacttttggtttctaatgcaaaccagacagtacccgatcgatcagatcgatcgggaactgatcgatcagtagcagggggtggaacagtgagtgtcagtgtcagatctagaaggcctgatggacagtgcacagtaactgaagtttaaataaaaatgtcttcagctccatgctcaaggttgaaagggttacctgtaaatttctgcccacataacattatactcatccctagtagtgcattttgggagttggggtgggaaggggtatgggaaggatagactcataattaaaatgtctaacatgtctctgttgagaaatttatttaatgtaaggaacttgggtgttaatagttgagagctgtttagtaataacccagttttcttgaggtctgtttactttatactttttaaaaacttctgtagttcttttggccagtgtgtttgtattatctgtgcattaatggtcctcatctgactcctgcattgtgtcttatttttctgcatggattggcataagaccattactaaaatttggcacctgtgagatgtttgatattatgaacaggaaacataatttaatgtatgaatagatgtgaatttgggatttcaaaatagatgaataacaactattttatagtaaagttattgaaatggaaatgaaaacagccagtaacttatgtttcagaatgtttgtaacacacttcatggtgttcccataggctttgctgtctagtcttatagtttgaggtttttttggtctgcatttttctttttgattacaaaatttataatttaataaatactagagtttatcaaaaacagtttgtctcttgtttgagggtggaaagggtgtggaaacattttgacatttgtgaccaaaggtcacttaaaaagtggtggttttaattggttgttttcagcttaatcacctgctcagaaaagtttgatttttttcttagagattatttaaacagaatctataggcagtgtgtatataataaacatgtatgg

SEQ ID NO: 177265 - DNA, 2267 bp, Homo sapiens
  Payload ID: 14783
  Gene Symbol: RNF146
  Gene Name: ring finger protein 146
  ENST ID: ENST00000356799
  CDS Start-End: 186-308
gcgcgcgttcccggcagctgcgggctccgaggccagagagaaaagactgcgaggtggccgcagctgtggccggagagcacaaagaatgaaccagcagtggaagagaaaatactgtaagctggctgactgctggtgaagaaaatgctttatttttgtggcaggcatctgtgggatctgtaatagaaatgggatcttcaatattcatgttattttctcctttggtcttatatgattgttacctttatgaagctttagtgattacaaagcactttttttgtccatttttacctgagctttgtaaactctgatttgcaggatggctggctgtggtgaaattgatcattcaataaacatgcttcctacaaacaggaaagcgaacgagtcctgttctaatactgcaccttctttaaccgtccctgaatgtgccatttgtctgcaaacatgtgttcatccagtcagtctgccctgtaagcacgttttctgctatctatgtgtaaaaggagcttcatggcttggaaagcggtgtgctctttgtcgacaagaaattcccgaggatttccttgacaagccaaccttgttgtcaccagaagaactcaaggcagcaagtagaggaaatggtgaatatgcatggtattatgaaggaagaaatgggtggtggcagtacgatgagcgcactagtagagagctggaagatgctttttccaaaggtaaaaagaacactgaaatgttaattgctggctttctgtatgtcgctgatcttgaaaacatggttcaatataggagaaatgaacatggacgtcgcaggaagattaagcgagatataatagatataccaaagaagggagtagctggacttaggctagactgtgatgctaataccgtaaacctagcaagagagagctctgctgacggagcggacagtgtatcagcacagagtggagcttctgttcagcccctagtgtcttctgtaaggcccctaacatcagtagatggtcagttaacaagccctgcaacaccatcccctgatgcaagcacttctctggaagactcttttgctcatttacaactcagtggagacaacacagctgaaaggagtcataggggagaaggagaagaagatcatgaatcaccatcttcaggcagggtaccagcaccagacacctccattgaagaaactgaatcagatgccagtagtgatagtgaggatgtatctgcagttgttgcacagcactccttgacccaacagagacttttggtttctaatgcaaaccagacagtacccgatcgatcagatcgatcgggaactgatcgatcagtagcagggggtggaacagtgagtgtcagtgtcagatctagaaggcctgatggacagtgcacagtaactgaagtttaaataaaaatgtcttcagctccatgctcaaggttgaaagggttacctgtaaatttctgcccacataacattatactcatccctagtagtgcattttgggagttggggtgggaaggggtatgggaaggatagactcataattaaaatgtctaacatgtctctgttgagaaatttatttaatgtaaggaacttgggtgttaatagttgagagctgtttagtaataacccagttttcttgaggtctgtttactttatactttttaaaaacttctgtagttcttttggccagtgtgtttgtattatctgtgcattaatggtcctcatctgactcctgcattgtgtcttatttttctgcatggattggcataagaccattactaaaatttggcacctgtgagatgtttgatattatgaacaggaaacataatttaatgtatgaatagatgtgaatttgggatttcaaaatagatgaataacaactattttatagtaaagttattgaaatggaaatgaaaacagccagtaacttatgtttcagaatgtttgtaacacacttcatggtgttcccataggctttgctgtctagtcttatagtttgaggtttttttggtctgcatttttctttttgattacaaaatttataatttaataaatactagagtttatcaaaaacagtttgtctcttgtttgagggtggaaagggtgtggaaacattttgacatttgtgaccaaaggtcacttaaaaagtggtggttttaattggttgttttcagcttaatcacctgctcagaaaagtttgatttttttcttagagattatttaaacagaatctataggcagtgtgtatataataaacatgtatggaaataaaactaaa

SEQ ID NO: 177266 - DNA, 2369 bp, Homo sapiens
  Payload ID: 14783
  Gene Symbol: RNF146
  Gene Name: ring finger protein 146
  Uniprot ID: Q9NTX7
  ENST ID: ENST00000368314
  CDS Start-End: 425-1504
tggaactgcactctttcagagcctctgggccctaatacaaagcaagcacactctaaagaagccagaagaatgcaagcagcgaagtcgccgctccccacaggcaagagagtaccggcagacagcggcgcgagacaggggcagaacgatgaggcgccggagttagctcgccggtgcgggtgcgggtgcgcggcgcgtcgcggcccctcctccgcgacgcgccgggtggtcacgtgacggccgcgcgcgttcccggcagctgcgggctccgaggccagagagaaaagactgcgaggtggccgcagctgtggccggagagcacaaagaatgaaccagcagtggaagagaaaatactgtaagctggctgactgctggtgaagaaaatgctttatttttgtggcaggcatctgtgggatctgtaatagaaatgatggctggctgtggtgaaattgatcattcaataaacatgcttcctacaaacaggaaagcgaacgagtcctgttctaatactgcaccttctttaaccgtccctgaatgtgccatttgtctgcaaacatgtgttcatccagtcagtctgccctgtaagcacgttttctgctatctatgtgtaaaaggagcttcatggcttggaaagcggtgtgctctttgtcgacaagaaattcccgaggatttccttgacaagccaaccttgttgtcaccagaagaactcaaggcagcaagtagaggaaatggtgaatatgcatggtattatgaaggaagaaatgggtggtggcagtacgatgagcgcactagtagagagctggaagatgctttttccaaaggtaaaaagaacactgaaatgttaattgctggctttctgtatgtcgctgatcttgaaaacatggttcaatataggagaaatgaacatggacgtcgcaggaagattaagcgagatataatagatataccaaagaagggagtagctggacttaggctagactgtgatgctaataccgtaaacctagcaagagagagctctgctgacggagcggacagtgtatcagcacagagtggagcttctgttcagcccctagtgtcttctgtaaggcccctaacatcagtagatggtcagttaacaagccctgcaacaccatcccctgatgcaagcacttctctggaagactcttttgctcatttacaactcagtggagacaacacagctgaaaggagtcataggggagaaggagaagaagatcatgaatcaccatcttcaggcagggtaccagcaccagacacctccattgaagaaactgaatcagatgccagtagtgatagtgaggatgtatctgcagttgttgcacagcactccttgacccaacagagacttttggtttctaatgcaaaccagacagtacccgatcgatcagatcgatcgggaactgatcgatcagtagcagggggtggaacagtgagtgtcagtgtcagatctagaaggcctgatggacagtgcacagtaactgaagtttaaataaaaatgtcttcagctccatgctcaaggttgaaagggttacctgtaaatttctgcccacataacattatactcatccctagtagtgcattttgggagttggggtgggaaggggtatgggaaggatagactcataattaaaatgtctaacatgtctctgttgagaaatttatttaatgtaaggaacttgggtgttaatagttgagagctgtttagtaataacccagttttcttgaggtctgtttactttatactttttaaaaacttctgtagttcttttggccagtgtgtttgtattatctgtgcattaatggtcctcatctgactcctgcattgtgtcttatttttctgcatggattggcataagaccattactaaaatttggcacctgtgagatgtttgatattatgaacaggaaacataatttaatgtatgaatagatgtgaatttgggatttcaaaatagatgaataacaactattttatagtaaagttattgaaatggaaatgaaaacagccagtaacttatgtttcagaatgtttgtaacacacttcatggtgttcccataggctttgctgtctagtcttatagtttgaggtttttttggtctgcatttttctttttgattacaaaatttataatttaataaatactagagtttatcaaaaacagtttgtctcttgtttgagggtggaaagggtgtggaaacattttgacatttgtgaccaaaggtcacttaaaaagtggtggttttaattggttgttttcagcttaatcacctgctcagaaaagtttgatttttttcttagagattatttaaacagaatctataggcagtgtgtatataataaacatgtatggaaat

SEQ ID NO: 177267 - DNA, 843 bp, Homo sapiens
  Payload ID: 14783
  Gene Symbol: RNF146
  Gene Name: ring finger protein 146
  ENST ID: ENST00000480444
  CDS Start-End: 420-548
gaaaagactgcgaggtggccgcagctgtggccggagaggtgggagtcggagcgaggccctctcgggggagcagggtgaacgccggccactctaggatcctcactcggggagaggaggcatagctcgcggtgtcacctccagccgcaacgtactccgggtcggccttgcgctcggggcctgagaggggcggcggcggggtcaggggccgcacaaagaatgaaccagcagtggaagagaaaatactgtaagctggctgactgctggtgaagaaaatgctttatttttgtggcaggcatctgtgggatctgtaatagaaatatattggagtaattcaagattctgtggttggcccttttgactgctctctctacaggtttaatttgggcatttactcattttcatggctccaaggaccatgtatgtgttggggatcttcaatattcatgttattttctcctttggtcttatatgattgttacctttatgaagctttagtgattacaaagcactttttttgtccatttttacctgagctttgtaaactctgatttgcaggatggctggctgtggtgaaattgatcattcaataaacatgcttcctacaaacaggaaagcgaacgagtcctgttctaatactgcaccttctttaaccgtccctgaatgtgccatttgtctgcaaacatgtgttcatccagtcagtctgccctgtaagcacgttttctgctatctatgtgtaaaaggagcttcatggcttggaaagcggtgtgctctttgtcgacaagaaattcccgaggatttccttgacaagccaaccttgttgtcaccagaagaactcaaggcagc

SEQ ID NO: 177268 - DNA, 2070 bp, Homo sapiens
  Payload ID: 14783
  Gene Symbol: RNF146
  Gene Name: ring finger protein 146
  Uniprot ID: Q9NTX7
  ENST ID: ENST00000610153
  CDS Start-End: 322-1401
agagagaaaagactgcgaggtggccgcagctgtggccggagaggtgggagtcggagcgaggccctctcgggggagcagggtgaacgccggccactctaggatcctcactcggggagaggaggcatagctcgcggtgtcacctccagccgcaacgtactccgggtcggccttgcgctcggggcctgagaggggcggcggcggggtcaggggccgcacaaagaatgaaccagcagtggaagagaaaatactgtaagctggctgactgctggtgaagaaaatgctttatttttgtggcaggcatctgtgggatctgtaatagaaatgatggctggctgtggtgaaattgatcattcaataaacatgcttcctacaaacaggaaagcgaacgagtcctgttctaatactgcaccttctttaaccgtccctgaatgtgccatttgtctgcaaacatgtgttcatccagtcagtctgccctgtaagcacgttttctgctatctatgtgtaaaaggagcttcatggcttggaaagcggtgtgctctttgtcgacaagaaattcccgaggatttccttgacaagccaaccttgttgtcaccagaagaactcaaggcagcaagtagaggaaatggtgaatatgcatggtattatgaaggaagaaatgggtggtggcagtacgatgagcgcactagtagagagctggaagatgctttttccaaaggtaaaaagaacactgaaatgttaattgctggctttctgtatgtcgctgatcttgaaaacatggttcaatataggagaaatgaacatggacgtcgcaggaagattaagcgagatataatagatataccaaagaagggagtagctggacttaggctagactgtgatgctaataccgtaaacctagcaagagagagctctgctgacggagcggacagtgtatcagcacagagtggagcttctgttcagcccctagtgtcttctgtaaggcccctaacatcagtagatggtcagttaacaagccctgcaacaccatcccctgatgcaagcacttctctggaagactcttttgctcatttacaactcagtggagacaacacagctgaaaggagtcataggggagaaggagaagaagatcatgaatcaccatcttcaggcagggtaccagcaccagacacctccattgaagaaactgaatcagatgccagtagtgatagtgaggatgtatctgcagttgttgcacagcactccttgacccaacagagacttttggtttctaatgcaaaccagacagtacccgatcgatcagatcgatcgggaactgatcgatcagtagcagggggtggaacagtgagtgtcagtgtcagatctagaaggcctgatggacagtgcacagtaactgaagtttaaataaaaatgtcttcagctccatgctcaaggttgaaagggttacctgtaaatttctgcccacataacattatactcatccctagtagtgcattttgggagttggggtgggaaggggtatgggaaggatagactcataattaaaatgtctaacatgtctctgttgagaaatttatttaatgtaaggaacttgggtgttaatagttgagagctgtttagtaataacccagttttcttgaggtctgtttactttatactttttaaaaacttctgtagttcttttggccagtgtgtttgtattatctgtgcattaatggtcctcatctgactcctgcattgtgtcttatttttctgcatggattggcataagaccattactaaaatttggcacctgtgagatgtttgatattatgaacaggaaacataatttaatgtatgaatagatgtgaatttgggatttcaaaatagatgaataacaactattttatagtaaagttattgaaatggaaatgaaaacagccagtaacttatgtttcagaatgtttgtaacacacttcatggtgttcccataggctttgctgtctagtcttatagtttgaggtttttttggtctgcatttttctttttgattacaaaatttataatttaataaatactagagtttatcaaaaa

SEQ ID NO: 177269 - DNA, 762 bp, Homo sapiens
  Payload ID: 14783
  Gene Symbol: RNF146
  Gene Name: ring finger protein 146
  ENST ID: ENST00000477776
  CDS Start-End: 393-521
agctgcgggctccgaggccagagagaaaagactgcgaggtggccgcagctgtggccggagaggtgggagtcggagcgaggccctctcgggggagcagggtgaacgccggccactctaggatcctcactcggggagaggaggcatagctcgcggtgtcacctccagccgcaacgtactccggcacaaagaatgaaccagcagtggaagagaaaatactgtaagctggctgactgctggtgaagaaaatgctttatttttgtggcaggcatctgtgggatctgtaatagaaatatattggagtaattcaagattctgtggttggcccttttgactgctctctctacaggtttaatttgggcatttactcattttcatggctccaaggaccatgtatgtgttggggatcttcaatattcatgttattttctcctttggtcttatatgattgttacctttatgaagctttagtgattacaaagcactttttttgtccatttttacctgagctttgtaaactctgatttgcaggatggctggctgtggtgaaattgatcattcaataaacatgcttcctacaaacaggaaagcgaacgagtcctgttctaatactgcaccttctttaaccgtccctgaatgtgccatttgtctgcaaacatgtgttcatccagtcagtctgccctgtaagcacgttttctgctatctatgtgtaaaaggagcttcatggcttggaaagcggtgtgctctttgtcgacaagaaattcc

SEQ ID NO: 177270 - DNA, 568 bp, Homo sapiens
  Payload ID: 14783
  Gene Symbol: RNF146
  Gene Name: ring finger protein 146
  ENST ID: ENST00000610162
  CDS Start-End: 542-568
agagagaaaagactgcgaggtggccgcagctgtggccggagaggtgggagtcggagcgaggccctctcgggggagcagggtgaacgccggccactctaggatcctcactcggggagaggaggcatagctcgcggtgtcacctccagccgcaacgtactccgggtcggccttgcgctcggggcctgagaggggcggcggcggggtcaggggccgcacaaagaatgaaccagcagtggaagagaaaatactgtaagctggctgactgctggtgaagaaaatgctttatttttgtggcaggcatctgtgggatctgtaatagaaatatttccaagtctcctcaaaaggaaaagtctctataagaaaaactgaagacacaggagtttgctcaaagaatgctgaaatagatctccaggggatcttcaatattcatgttattttctcctttggtcttatatgattgttacctttatgaagctttagtgattacaaagcactttttttgtccatttttacctgagctttgtaaactctgatttgcaggatggctggctgtggtgaaattgatcat

SEQ ID NO: 177271 - DNA, 607 bp, Homo sapiens
  Payload ID: 14783
  Gene Symbol: RNF146
  Gene Name: ring finger protein 146
  ENST ID: ENST00000609447
  CDS Start-End: 298-426
gtgacggccgcgcgcgttcccggcagctgcgggctccgaggccagagagaaaagactgcgaggtggccgcagctgtggccggagagcacaaagaatgaaccagcagtggaagagaaaatactgtaagctggctgactgctggtgaagaaaatgctttatttttgtggcaggcatctgtgggatctgtaatagaaatatattggagtaattcaagattctgtggttggcccttttgactgctctctctacaggtttaatttgggcatttactcattttcatggctccaaggaccatgtatgtgttggggatcttcaatattcatgttattttctcctttggtcttatatgattgttacctttatgaagctttagtgattacaaagcactttttttgtccatttttacctgagctttgtaaactctgatttgcaggtaaggaaatttagactaatggtttaactgagtgcctaagagcacataattaataaaggactctaaaactcagatttttagatttcttgtctagcattcatttcactgtataatagctgccatgattcaaggtatccttttcccctcactggatgcagcttttcattatatagt

SEQ ID NO: 177272 - DNA, 2169 bp, Homo sapiens
  Payload ID: 14783
  Gene Symbol: RNF146
  Gene Name: ring finger protein 146
  Uniprot ID: Q9NTX7
  ENST ID: ENST00000608991
  CDS Start-End: 424-1500
agagagaaaagactgcgaggtggccgcagctgtggccggagagcacaaagaatgaaccagcagtggaagagaaaatactgtaagctggctgactgctggtgaagaaaatgctttatttttgtggcaggcatctgtgggatctgtaatagaaataaaattgccatctttttgagccttgtctattgaggaaccaagaacacagaaaaggcagtaaaaagaaaaaaaaggattgtttgaagattgaatgtgctgtgatgatagcctaggattattgtttttcaatttttgatgagcgggatcttcaatattcatgttattttctcctttggtcttatatgattgttacctttatgaagctttagtgattacaaagcactttttttgtccatttttacctgagctttgtaaactctgatttgcaggatggctggctgtggtgaaattgatcattcaataaacatgcttcctacaaacaggaaagcgaacgagtcctgttctaatactgcaccttctttaaccgtccctgaatgtgccatttgtctgcaaacatgtgttcatccagtcagtctgccctgtaagcacgttttctgctatctatgtgtaaaaggagcttcatggcttggaaagcggtgtgctctttgtcgacaagaaattcccgaggatttccttgacaagccaaccttgttgtcaccagaagaactcaaggcagcaagtagaggaaatggtgaatatgcatggtattatgaaggaagaaatgggtggtggcagtacgatgagcgcactagtagagagctggaagatgctttttccaaaggtaaaaagaacactgaaatgttaattgctggctttctgtatgtcgctgatcttgaaaacatggttcaatataggagaaatgaacatggacgtcgcaggaagattaagcgagatataatagatataccaaagaagggagtagctggacttaggctagactgtgatgctaataccgtaaacctagcaagagagagctctgctgacggagcggacagtgtatcagcacagagtggagcttctgttcagcccctagtgtcttctgtaaggcccctaacatcagtagatggtcagttaacaagccctgcaacaccatcccctgatgcaagcacttctctggaagactcttttgctcatttacaactcagtggagacaacacagctgaaaggagtcataggggagaaggagaagaagatcatgaatcaccatcttcaggcagggtaccagcaccagacacctccattgaagaaactgaatcagatgccagtagtgatagtgaggatgtatctgcagttgttgcacagcactccttgacccaacagagacttttggtttctaatgcaaaccagacagtacccgatcgatcagatcgatcgggaactgatcgatcagtagcagggggtggaacagtgagtgtcagtgtcagatctagaaggcctgatggacagtgcacagtaactgaagtttaaataaaaatgtcttcagctccatgctcaaggttgaaagggttacctgtaaatttctgcccacataacattatactcatccctagtagtgcattttgggagttggggtgggaaggggtatgggaaggatagactcataattaaaatgtctaacatgtctctgttgagaaatttatttaatgtaaggaacttgggtgttaatagttgagagctgtttagtaataacccagttttcttgaggtctgtttactttatactttttaaaaacttctgtagttcttttggccagtgtgtttgtattatctgtgcattaatggtcctcatctgactcctgcattgtgtcttatttttctgcatggattggcataagaccattactaaaatttggcacctgtgagatgtttgatattatgaacaggaaacataatttaatgtatgaatagatgtgaatttgggatttcaaaatagatgaataacaactattttatagtaaagttattgaaatggaaatgaaaacagccagtaacttatgtttcagaatgtttgtaacacacttcatggtgttcccataggctttgctgtctagtcttatagtttgaggtttttttggtctgcatttttctttttgattacaaaatttataatttaataaatactagagtttatcaaaaa

SEQ ID NO: 177273 - DNA, 884 bp, Homo sapiens
  Payload ID: 14783
  Gene Symbol: RNF146
  Gene Name: ring finger protein 146
  ENST ID: ENST00000476956
  CDS Start-End: 479-601
agacagcggcgcgagacaggggcagaacgatgaggcgccggagttagctcgccggtgcgggtgcgggtgcgcggcgcgtcgcggcccctcctccgcgacgcgccgggtggtcacgtgacggccgcgcgcgttcccggcagctgcgggctccgaggccagagagaaaagactgcgaggtggccgcagctgtggccggagaggtgggagtcggagcgaggccctctcgggggagcagggtgaacgccggccactctaggatcctcactcggggagaggaggcatagctcgcggtgtcacctccagccgcaacgtactccgggtcggccttgcgctcggggcctgagaggggcggcggcggggtcaggggccgcacaaagaatgaaccagcagtggaagagaaaatactgtaagctggctgactgctggtgaagaaaatgctttatttttgtggcaggcatctgtgggatctgtaatagaaatgggatcttcaatattcatgttattttctcctttggtcttatatgattgttacctttatgaagctttagtgattacaaagcactttttttgtccatttttacctgagctttgtaaactctgatttgcaggatggctggctgtggtgaaattgatcattcaataaacatgcttcctacaaacaggaaagcgaacgagtcctgttctaatactgcaccttctttaaccgtccctgaatgtgccatttgtctgcaaacatgtgttcatccagtcagtctgccctgtaagcacgttttctgctatctatgtgtaaaaggagcttcatggcttggaaagcggtgtgctctttgtcgacaagaaattcccgaggatttccttgacaagccaaccttgttgtcaccagaaga

SEQ ID NO: 177274 - DNA, 516 bp, Homo sapiens
  Payload ID: 14783
  Gene Symbol: RNF146
  Gene Name: ring finger protein 146
  ENST ID: ENST00000609944
  CDS Start-End: 474-516
gctccgaggccagagagaaaagactgcgaggtggccgcagctgtggccggagaggtgggagtcggagcgaggccctctcgggggagcagggtgaacgccggccactctaggatcctcactcggggagaggaggcatagctcgcggtgtcacctccagccgcaacgtactccggcacaaagaatgaaccagcagtggaagagaaaatactgtaagctggctgactgctggtgaagaaaatgctttatttttgtggcaggcatctgtgggatctgtaatagaaatatttccaagtctcctcaaaaggaaaagtctctataagaaaaactgaagacacaggagtttgctcaaagaatgctgaaatagatctccagatattggagtaattcaagattctgtggttggcccttttgactgctctctctacaggtttaatttgggcatttactcattttcatggctccaaggaccatgtatgtgttggggatcttcaatattcatgttattttctcctttgg

SEQ ID NO: 177275 - DNA, 2077 bp, Homo sapiens
  Payload ID: 14783
  Gene Symbol: RNF146
  Gene Name: ring finger protein 146
  Uniprot ID: Q9NTX7
  ENST ID: ENST00000616343
  CDS Start-End: 137-1216
caagcagcgaagtcgccgctccccacagcacaaagaatgaaccagcagtggaagagaaaatactgtaagctggctgactgctggtgaagaaaatgctttatttttgtggcaggcatctgtgggatctgtaatagaaatgatggctggctgtggtgaaattgatcattcaataaacatgcttcctacaaacaggaaagcgaacgagtcctgttctaatactgcaccttctttaaccgtccctgaatgtgccatttgtctgcaaacatgtgttcatccagtcagtctgccctgtaagcacgttttctgctatctatgtgtaaaaggagcttcatggcttggaaagcggtgtgctctttgtcgacaagaaattcccgaggatttccttgacaagccaaccttgttgtcaccagaagaactcaaggcagcaagtagaggaaatggtgaatatgcatggtattatgaaggaagaaatgggtggtggcagtacgatgagcgcactagtagagagctggaagatgctttttccaaaggtaaaaagaacactgaaatgttaattgctggctttctgtatgtcgctgatcttgaaaacatggttcaatataggagaaatgaacatggacgtcgcaggaagattaagcgagatataatagatataccaaagaagggagtagctggacttaggctagactgtgatgctaataccgtaaacctagcaagagagagctctgctgacggagcggacagtgtatcagcacagagtggagcttctgttcagcccctagtgtcttctgtaaggcccctaacatcagtagatggtcagttaacaagccctgcaacaccatcccctgatgcaagcacttctctggaagactcttttgctcatttacaactcagtggagacaacacagctgaaaggagtcataggggagaaggagaagaagatcatgaatcaccatcttcaggcagggtaccagcaccagacacctccattgaagaaactgaatcagatgccagtagtgatagtgaggatgtatctgcagttgttgcacagcactccttgacccaacagagacttttggtttctaatgcaaaccagacagtacccgatcgatcagatcgatcgggaactgatcgatcagtagcagggggtggaacagtgagtgtcagtgtcagatctagaaggcctgatggacagtgcacagtaactgaagtttaaataaaaatgtcttcagctccatgctcaaggttgaaagggttacctgtaaatttctgcccacataacattatactcatccctagtagtgcattttgggagttggggtgggaaggggtatgggaaggatagactcataattaaaatgtctaacatgtctctgttgagaaatttatttaatgtaaggaacttgggtgttaatagttgagagctgtttagtaataacccagttttcttgaggtctgtttactttatactttttaaaaacttctgtagttcttttggccagtgtgtttgtattatctgtgcattaatggtcctcatctgactcctgcattgtgtcttatttttctgcatggattggcataagaccattactaaaatttggcacctgtgagatgtttgatattatgaacaggaaacataatttaatgtatgaatagatgtgaatttgggatttcaaaatagatgaataacaactattttatagtaaagttattgaaatggaaatgaaaacagccagtaacttatgtttcagaatgtttgtaacacacttcatggtgttcccataggctttgctgtctagtcttatagtttgaggtttttttggtctgcatttttctttttgattacaaaatttataatttaataaatactagagtttatcaaaaacagtttgtctcttgtttgagggtggaaagggtgtggaaacattttgacatttgtgaccaaaggtcacttaaaaagtggtggttttaattggttgttttcagcttaatcacctgctcagaaaagtttgatttttttcttagagattatttaaacagaatctataggcagtgtgtatataataaacatgtatgg

SEQ ID NO: 177276 - DNA, 1304 bp, Homo sapiens
  Payload ID: 14784
  Gene Symbol: RNF148
  Gene Name: ring finger protein 148
  Uniprot ID: Q8N7C7
  ENST ID: ENST00000434824
  CDS Start-End: 218-1135
gtaccaatcacaagtcttgttattttgtttcattatgagaaagataatctactaaatattaaaatactggaaggagcaagatagctttgatccagggagaccttttccatttatgtgctttagtaatctgccgccaacaagctatcttctttatgttcttctacaactgatgttgttttgttttctcatgtttgtctcttaatagacaaatggaggcatgagcttccttagaattaccccttcgacgcatagttctgtttcatctggacttttgaggcttagtatctttctactacttagctttcctgactcaaacggaaaagccatttggacagctcacctgaatataacatttcaggttggaaatgagatcacatcggaattaggagagagtggagtgttcgggaatcattctcctctggaaagggtgtctggtgtggtggcacttcctgaaggatggaatcagaatgcctgtcatcctttgaccaatttcagcaggcccaaacaggcagactcatggctggccctcatcgaacgtggaggctgtacttttacacataaaatcaacgtggcagcagagaagggagcaaatggggtgatcatctacaactatcaaggtacgggcagtaaagtatttcccatgtctcaccaggggacggaaaatatagtcgcggtgatgataagcaacctgaaaggcatggaaattttgcactcgattcagaaaggagtctatgtgacagtcatcattgaagtggggagaatgcacatgcagtgggtgagccattacatcatgtatctatttaccttcctggctgccacaattgcctacttttacttagattgcgtctggagacttacacctagagtgcccaattctttcaccaggaggcgaagtcaaataaagacagatgtgaagaaagctattgaccagcttcaactgcgagttctcaaagaaggggatgaggaattagacctaaatgaagacaactgtgttgtttgctttgacacatacaaaccccaagatgtagtacgcattttaacttgcaaacattttttccataaggcatgcattgacccctggcttttagcccataggacatgtcccatgtgcaagtgtgacatcctgaaaacttaagaaatctggagaattttctgaagatgtaaccagatctttccaaatacaaagattagataaattgtcttattgtactttatgtagagagaaaatttcagcttctctacccaagtatgaacaagggtgaaatttgtgttttaaaaataaaactccttatcatgcccagcta

SEQ ID NO: 177277 - DNA, 839 bp, Homo sapiens
  Payload ID: 14784
  Gene Symbol: RNF148
  Gene Name: ring finger protein 148
  ENST ID: ENST00000447240
  CDS Start-End: 163-468
atattaaaatactggaaggagcaagatagctttgatccagggagaccttttccatttatgtgctttagtaatctgccgccaacaagctatcttctttatgttcttctacaactgatgttgttttgttttctcatgtttgtctcttaatagacaaatggaggcatgagcttccttagaattaccccttcgacgcatagttctgtttcatctggacttttgaggcttagtatctttctactacttagctttcctgactcaaacggaaaagccatttggacagctcacctgaatataacatttcaggggacggaaaatatagtcgcggtgatgataagcaacctgaaaggcatggaaattttgcactcgattcagaaaggagtctatgtgacagtcatcattgaagtggggagaatgcacatgcagtgggaggcgaagtcaaataaagacagatgtgaagaaagctattgaccagcttcaactgcgagttctcaaagaaggggatgaggaattagacctaaatgaagacaactgtgttgtttgctttgacacatacaaaccccaagatgtagtacgcattttaacttgcaaacattttttccataaggcatgcattgacccctggcttttagcccataggacatgtcccatgtgcaagtgtgacatcctgaaaacttaagaaatctggagaattttctgaagatgtaaccagatctttccaaatacaaagattagataaattgtcttattgtactttatgtagagagaaaatttcagcttctctacccaagtatgaacaagggtgaaatttgtgttttaaaaataaaactccttatcatgcc

SEQ ID NO: 177278 - DNA, 2458 bp, Homo sapiens
  Payload ID: 14785
  Gene Symbol: RNF149
  Gene Name: ring finger protein 149
  Uniprot ID: Q8NC42
  ENST ID: ENST00000295317
  CDS Start-End: 109-1311
cgcctcagtcttccagggcggcggtgggtgtccgcttctctctgctcttcgactgcaccgcactcgcgcgtgaccctgactccccctagtcagctcagcggtgctgccatggcgtggcggcggcgcgaagccagcgtcggggctcgcggcgtgttggctctggcgttgctcgccctggccctgtgcgtgcccggggcccggggccgggctctcgagtggttctcggccgtggtaaacatcgagtacgtggacccgcagaccaacctgacggtgtggagcgtctcggagagtggccgcttcggcgacagctcgcccaaggagggcgcgcatggcctggtgggcgtcccgtgggcgcccggcggagacctcgagggctgcgcgcccgacacgcgcttcttcgtgcccgagcccggcggccgaggggccgcgccctgggtcgccctggtggctcgtgggggctgcaccttcaaggacaaggtgctggtggcggcgcggaggaacgcctcggccgtcgtcctctacaatgaggagcgctacgggaacatcaccttgcccatgtctcacgcgggaacaggaaatatagtggtcattatgattagctatccaaaaggaagagaaattttggagctggtgcaaaaaggaattccagtaacgatgaccataggggttggcacccggcatgtacaggagttcatcagcggtcagtctgtggtgtttgtggccattgccttcatcaccatgatgattatctcgttagcctggctaatattttactatatacagcgtttcctatatactggctctcagattggaagtcagagccatagaaaagaaactaagaaagttattggccagcttctacttcatactgtaaagcatggagaaaagggaattgatgttgatgctgaaaattgtgcagtgtgtattgaaaatttcaaagtaaaggatattattagaattctgccatgcaagcatatttttcatagaatatgcattgacccatggcttttggatcaccgaacatgtccaatgtgtaaacttgatgtcatcaaagccctaggatattggggagagcctggggatgtacaggagatgcctgctccagaatctcctcctggaagggatccagctgcaaatttgagtctagctttaccagatgatgacggaagtgatgacagcagtccaccatcagcctcccctgctgaatctgagccacagtgtgatcccagctttaaaggagatgcaggagaaaatacggcattgctagaagccggcaggagtgactctcggcatggaggacccatctcctagcacacgtgcccactgaagtggcaccaacagaagtttggcttgaactaaaggacattttattttttttactttagcacataatttgtatatttgaaaataatgtatattattttacctattagattctgatttgatatacaaaggactaagatattttcttcttgaagagacttttcgattagtcctcatatatttatctactaaaatagagtgtttaccatgaacagtgtgttgcttcagactattacaaagacaactggggcaggtactctaatataaaggacaggtggtgtttctaaataattggctgctatggttctgtaaaaaccagttaattctatttttcaaggtttttggcaaagcacatcaatgttagactagttgaagtggaattgtataattcaattcgataattgatctcatgggctttccctggaggaaaggttttttttgttgttttttttttaagaacttgaaacttgtaaactgagatgtctgtagcttttttgcccatctgtagtgtatgtgaagatttcaaaacctgagagcactttttctttgtttagaattatgagaaaggcactagatgactttaggatttgcatttttccctttattgcctcatttcttgtgacgccttgttggggagggaaatctgtttattttttcctacaaataaaaagctaagattctatatcgcacatgagcattaagttcttcattgccttgttaaggaaaatgagtaggcagactcagaatctgttatattgatttcagttacaatttaatctttacaattaaaagggcgaaagatgtagaattttagtttttgttgttgactcgaaataaccagttttcttgattagagtttaagcagatttaataccatgaccttgcttaaccgtttcttcttttttacttgcttgctgttcttttgggtcaaaggagcaggctaatgcaaagcttttggagactgctaagtgttaaaaagtgattaaacacacactctgctattttttcacttcttggaggtagaagtcgagtatgaggcagttattttttagagtgtggaattatagtctttccttgctcctagttattctgtatatctttactttgtaggtaaaaataaatgtttatttaaaac

SEQ ID NO: 177279 - DNA, 2010 bp, Homo sapiens
  Payload ID: 14785
  Gene Symbol: RNF149
  Gene Name: ring finger protein 149
  ENST ID: ENST00000424632
  CDS Start-End: 114-1310
gaccccgcctcagtcttccagggcggcggtgggtgtccgcttctctctgctcttcgactgcaccgcactcgcgcgtgaccctgactccccctagtcagctcagcggtgctgccatggcgtggcggcggcgcgaagccagcgtcggggctcgcggcgtgttggctctggcgttgctcgccctggccctgtgcgtgcccggggcccggggccgggctctcgagtggttctcggccgtggtaaacatcgagtacgtggacccgcagaccaacctgacggtgtggagcgtctcggagagtggccgcttcggcgacagctcgcccaaggagggcgcgcatggcctggtgggcgtcccgtgggcgcccggcggagacctcgagggctgcgcgcccgacacgcgcttcttcgtgcccgagcccggcggccgaggggccgcgccctgggtcgccctggtggctcgtgggggctgcaccttcaaggacaaggtgctggtggcggcgcggaggaacgcctcggccgtcgtcctctacaatgaggagcgctacgggaacatcaccttgcccatgtctcacgcgggaacaggaaatatagtggtcattatgattagctatccaaaaggaagagaaattttggagctggtgcaaaaaggaattccagtaacgatgaccataggggttggcacccggcatgtacaggagttcatcagcggtcagtctgtggtgtttgtggccattgccttcatcaccatgatgattatctcgttagcctggctaatattttactatatacagcgtttcctatatactggctctcagattggaagtcagagccatagaaaagaaactaagaaagttattggccagcttctacttcatactgtaaagcatggagaaaagggaattgatgttgatgctgaaaattgtgcagtgtgtattgaaaatttcaaagtaaaggatattattagaattctgccatgcaagcatatttttcatagaatatgcattgacccatggcttttggatcaccgaacatgtccaatgtgtaaacttgatgtcatcaaagccctaggatattggggagagcctggggatgtacaggagatgcctgctccagaatctcctcctggaagggatccagctgcaaatttgagtctagctttaccagatgatgacggaagtgatgacagcagtccaccatcagcctcccctgctgaatctgagccacagtgtgatcccagctttaaaggagatgcaggagaaaatacggcattgctaggagccatgtgttcacatgtcatgtggaccagtatttaactgtggaaaccgcgggtggcatggagaaggaggcagtgtccgtgactgtgctgctctccgcagccccctgcctgctgtcctgtttcctcggctcctcggtgtctggactggcgttctgggtttcccagcagaaaactaaagggccagagaggtgtaaaaacacacaccacttggcaggtgatttgaagatattaaagctagaaattggaactagaaaatcaaaagaattcaaggcatcttaacgtgacagttgaactcatttgattatacttaaaaaagtttattgcagttattgactctcaattttttttttttttttttgagtgcagtggtgccattgttgctcactgcagcctcaatcttccaggctcaagaaatcctcccacctcagcttccagagtagctgggactacaggtgcatgccacaccctgataatttttttttccccaatataaacgaggtcttgctatgtcctccagtctggtcttgaactcaagtgatccacccaccttggcctcccaaagtgctgggattacaggcgtgagccaccaaacccagccaccaattttactttaggtaaacttttattttcaagcttttgttggtgttgcaagtgtaaatctgttttataaaatgttctataaatataaccactattccttgtaagctatttaaaataaattttaaagtctttcaagt

SEQ ID NO: 177280 - DNA, 4535 bp, Homo sapiens
  Payload ID: 14786
  Gene Symbol: RNF150
  Gene Name: ring finger protein 150
  Uniprot ID: Q9ULK6
  ENST ID: ENST00000306799
  CDS Start-End: 655-1845
cacacacacacggaccgcttactccgctctgcctgctcgctcccactgtccccaagcccgccccgcccgcggcaagtgcgtgcccaggcgcagccaccggcgagatcaggagcgcagcgcccgcagcctgagggaaccggcgcagggcagcagcggctgcagctggattcgcgcgccccagcgctcagtggcggcggccgggacaccctgggcagcaccccgcaccgcagcaccccagactacgagcaatcgtgcccgtccccgccggggctggagggcgcagggccgccaccctgcaagttcgtgggcccccggccacccttatgagagaaggcgaagccgggcgaaggagcaggacgctcggcagcaggactcctccgcaagccccgcgggccctctgttcccgcgccccccgggcgcccaagaagcaaaatgcaaccaccgcgctacagctgagaggggaaggggccagcgccatccgctcgcccggaatccggtccccgcggcggctgcgcgtcccggccgcggcccctccggcccgggagtgagcagcagcaggaggagaggcagcggcccggggttggccggggctggggaggagggacgggacggagggagggcgcgggggcggggagggggccccggcggataaagatggcaatgtctctcatccaagcgtgctgcagtctggctctctcaacatggctgctttccttttgtttcgtgcatctgctctgcctggactttaccgtggccgagaaggaggaatggtacaccgccttcgtgaacatcacctacgccgagcccgcgccggaccccggggccggggcggcgggcggcggcggcgcggagctgcacacggagaagacggagtgcgggcgctacggagagcactcgcccaagcaggacgcccgcggggaggtggtcatggccagctcggcccacgaccgcctggcctgcgaccccaacaccaagttcgccgccccgacccgcggcaagaactggatagccctcatccccaagggcaactgcacgtacagggataagatccggaacgcgttcctgcagaacgcctcagccgtggtcatcttcaacgtgggctccaacaccaacgagaccatcaccatgccccacgcgggtgtagaagacatcgtggccataatgattcctgagccaaaagggaaggagatagtaagcctgctggaaagaaacatcaccgtgacaatgtacatcaccatcggaacccggaacttgcagaaatatcgccgactgggggatgcagcaaagaaagccatcagcaaactccagatcaggaccatcaagaagggtgacaaggaaacagagtctgattttgacaactgtgcagtttgtattgaagggtacaagcccaatgacgttgtccggatcctgccctgccggcatcttttccacaagtcctgtgttgacccctggcttctagaccatcgtacctgtcccatgtgcaagatgaacattcttaaagccctagggatcccgcccaatgccgactgcatggacgacttgcccactgacttcgagggctctctgggaggtccacccaccaaccagatcacaggtgccagcgacacaacagtgaatgaaagttcagtcactttggaccctgctgtccggactgtgggagccttgcaggtggtccaggatacagaccccatcccccaggagggagacgtcatctttactactaacagtgagcaggagccagctgtaagcagtgattctgacatttccttgatcatggcaatggaggttggactgtctgatgtagaactttccactgaccaggactgtgaagaagtgaaatcttgaaacgacaaatccagaagcaaagagatagtaggacccaagggaaaggaagggaagagtgctccaagacttggaccaggcacacacacacctccagatcaccttggcaactccagggcgctccgttcaagaatgctgacgaaaagcaatatccaaagtcttgtcaatcaggatgcagtttctccatcggtatggcagtctgtggccttggcagctgggaagttgaaagctgatttccactcctatgtccatgtagacatacacttcagaagctcctaaaacagagactgaaaggccacctttaggatttcttagtttcatttcaattctttccatgtctcatcattcttgtttttggcatgttgtttgatttctttggcaatttttttaaagattatttgtagtttactttccatctattcctttgtttttcctttgatgcactccagcttttgtataggtttctgtttagaagcaccagttcctgctatgatcagtttgtattccatctctgagatatgtggtcttgacctcccagcatgaagtgtgcatggctttgagaagtgcctcagcaccctgaaatggactaaggccagctttcattaagaatctaagttcttctaagtgggcctttaaaaaccccagctgccagagaccccaacactaagccctaaatctgctgaggccactgctggttattttaagccacatcacacttgcttccacttgccgggcttgattaagggcccacgtgacatgagaagggagctctagggaagccgtttcattcttctgggtcttacagtctttggctgaaattctgaactcagaagtcccctccaaggcatccagtctttggtggttgtagggctggttttaaaaccagataccacattttcttcctattgaaaacaaaatgccagttgcattggtttcccctgggctagaacagtttttttcttacctctgtaagtgggttctgtaaaaaatggaggctttagagaaaagccaatcatttttaagtccaatggcaaacatagtgggggctgcagtagcacctagcttttaccttaatttcgacacacttctgttgaatctcaccagaccatgtgggaggatttaggtgaatccctagcagattgcttcccagggctccctgagtgtgtccagataccaagtgaggaatgaggtgtgatttgctgtatcatttgaaccaaaaagtatgcagcatgagaatttgctagatcgtttatcctgactgaaatagacaaagtaagagggaaaggaaaagaggtatcaagtaaatactgaaacccaatggtgtttttaaactgtttctgtttttattcatcttttgtaactatgacagaaatgtgctattttttcagtgggcaattttgtaatatattcagactatccagatacagagatgactaaggtcattgatagcgtctctgaacaatcagacggatcaccttatctctacacagctggcaaacaccaggctgcggcttggattaaccaggaaagaaagcttttctcactgagttgtttttatgtattgatggggacttttccacctcattagactaatactcattcaaaaagagtttggttctgctgtaaatccttgccgcctgctgaaacatggtgtgcaggtcaacggagaatactagctgctcctttttcaccacctttaccaatttcctatttgatggtttgtaagtagacagtaaggcaaggcagatgattattaccctcagaaaggttgcatctccctaggagtccaatgcttcctgtaatgaaatccactctctatgtgtgggaaaagaggcagggaggaatgaagagagctctgaatcgagaatcctagatgaaccacacgctttactaagcctcggcttcttcatctataatgtgaagggtttaataacatgagtccccaagctcctctggctgtgggaccacagatgagtctttcagaggcaggatccatttttgcagatagctatgacttgtggcaatcaggcttcgtagcttggggaggtagagttacttgacatgtatcatgtaataacagcctttgagacttggcacaactatggtgctgagaatgaaaatctaaatgattgaagttttaagtccaagtaggagttggtttgttttgccttgtttaaaaattgctgttagtcacagagtttgcaatctctggataccttcaaatcctagctctcactgtgggattcttgatctcagaggtgtttatttttcacagtcagcataggcttgcgccactgactcctccttcagtcggctttgcccaaaacaaattttagtattactggtattaagtttagtccagtggaattagaaggataattcaatagcaacagaaatataaattatattccattcccagagagagaatgcgctttggattgtttagtcctctgattaacgagtattttctcttcctgccaagaactaggtgaatcaggaattgattgcatatgcaagccctggccacagctgcacttacaggatgcctcatagacgatgaggggtctgaaaggccaacccgaggctggcagatctgaccccaaggaggtcctgctgcaaaccccctgagcctttgccattcactacttaccaaagtttgtttctggaggattttcctgtagctttgatagttt

SEQ ID NO: 177281 - DNA, 3673 bp, Homo sapiens
  Payload ID: 14786
  Gene Symbol: RNF150
  Gene Name: ring finger protein 150
  Uniprot ID: Q9ULK6
  ENST ID: ENST00000420921
  CDS Start-End: 90-983
catgtgaagattgtgcttgctttccttccatcccttagccataattgcctgtttcctgagacctcctgtacagcctatggaactgtttaatgtcttctcatgcccagcccctgaagctgatttcaccatgcccatattccctttcctcaggtgtagaagacatcgtggccataatgattcctgagccaaaagggaaggagatagtaagcctgctggaaagaaacatcaccgtgacaatgtacatcaccatcggaacccggaacttgcagaaatatgtgagccgcacttcggttgtgtttgtctccatctccttcattgtcctgatgatcatttccctcgcatggctcgtcttttattacatccagaggtttcgatatgcaaatgccagggataggaaccagcgccgactgggggatgcagcaaagaaagccatcagcaaactccagatcaggaccatcaagaagggtgacaaggaaacagagtctgattttgacaactgtgcagtttgtattgaagggtacaagcccaatgacgttgtccggatcctgccctgccggcatcttttccacaagtcctgtgttgacccctggcttctagaccatcgtacctgtcccatgtgcaagatgaacattcttaaagccctagggatcccgcccaatgccgactgcatggacgacttgcccactgacttcgagggctctctgggaggtccacccaccaaccagatcacaggtgccagcgacacaacagtgaatgaaagttcagtcactttggaccctgctgtccggactgtgggagccttgcaggtggtccaggatacagaccccatcccccaggagggagacgtcatctttactactaacagtgagcaggagccagctgtaagcagtgattctgacatttccttgatcatggcaatggaggttggactgtctgatgtagaactttccactgaccaggactgtgaagaagtgaaatcttgaaacgacaaatccagaagcaaagagatagtaggacccaagggaaaggaagggaagagtgctccaagacttggaccaggcacacacacacctccagatcaccttggcaactccagggcgctccgttcaagaatgctgacgaaaagcaatatccaaagtcttgtcaatcaggatgcagtttctccatcggtatggcagtctgtggccttggcagctgggaagttgaaagctgatttccactcctatgtccatgtagacatacacttcagaagctcctaaaacagagactgaaaggccacctttaggatttcttagtttcatttcaattctttccatgtctcatcattcttgtttttggcatgttgtttgatttctttggcaatttttttaaagattatttgtagtttactttccatctattcctttgtttttcctttgatgcactccagcttttgtataggtttctgtttagaagcaccagttcctgctatgatcagtttgtattccatctctgagatatgtggtcttgacctcccagcatgaagtgtgcatggctttgagaagtgcctcagcaccctgaaatggactaaggccagctttcattaagaatctaagttcttctaagtgggcctttaaaaaccccagctgccagagaccccaacactaagccctaaatctgctgaggccactgctggttattttaagccacatcacacttgcttccacttgccgggcttgattaagggcccacgtgacatgagaagggagctctagggaagccgtttcattcttctgggtcttacagtctttggctgaaattctgaactcagaagtcccctccaaggcatccagtctttggtggttgtagggctggttttaaaaccagataccacattttcttcctattgaaaacaaaatgccagttgcattggtttcccctgggctagaacagtttttttcttacctctgtaagtgggttctgtaaaaaatggaggctttagagaaaagccaatcatttttaagtccaatggcaaacatagtgggggctgcagtagcacctagcttttaccttaatttcgacacacttctgttgaatctcaccagaccatgtgggaggatttaggtgaatccctagcagattgcttcccagggctccctgagtgtgtccagataccaagtgaggaatgaggtgtgatttgctgtatcatttgaaccaaaaagtatgcagcatgagaatttgctagatcgtttatcctgactgaaatagacaaagtaagagggaaaggaaaagaggtatcaagtaaatactgaaacccaatggtgtttttaaactgtttctgtttttattcatcttttgtaactatgacagaaatgtgctattttttcagtgggcaattttgtaatatattcagactatccagatacagagatgactaaggtcattgatagcgtctctgaacaatcagacggatcaccttatctctacacagctggcaaacaccaggctgcggcttggattaaccaggaaagaaagcttttctcactgagttgtttttatgtattgatggggacttttccacctcattagactaatactcattcaaaaagagtttggttctgctgtaaatccttgccgcctgctgaaacatggtgtgcaggtcaacggagaatactagctgctcctttttcaccacctttaccaatttcctatttgatggtttgtaagtagacagtaaggcaaggcagatgattattaccctcagaaaggttgcatctccctaggagtccaatgcttcctgtaatgaaatccactctctatgtgtgggaaaagaggcagggaggaatgaagagagctctgaatcgagaatcctagatgaaccacacgctttactaagcctcggcttcttcatctataatgtgaagggtttaataacatgagtccccaagctcctctggctgtgggaccacagatgagtctttcagaggcaggatccatttttgcagatagctatgacttgtggcaatcaggcttcgtagcttggggaggtagagttacttgacatgtatcatgtaataacagcctttgagacttggcacaactatggtgctgagaatgaaaatctaaatgattgaagttttaagtccaagtaggagttggtttgttttgccttgtttaaaaattgctgttagtcacagagtttgcaatctctggataccttcaaatcctagctctcactgtgggattcttgatctcagaggtgtttatttttcacagtcagcataggcttgcgccactgactcctccttcagtcggctttgcccaaaacaaattttagtattactggtattaagtttagtccagtggaattagaaggataattcaatagcaacagaaatataaattatattccattcccagagagagaatgcgctttggattgtttagtcctctgattaacgagtattttctcttcctgccaagaactaggtgaatcaggaattgattgcatatgcaagccctggccacagctgcacttacaggatgcctcatagacgatgaggggtctgaaaggccaacccgaggctggcagatctgaccccaaggaggtcctgctgcaaaccccctgagcctttgccattcactacttaccaaagtttgtttctggaggattttcctgtagctttgatagttt

SEQ ID NO: 177282 - DNA, 1530 bp, Homo sapiens
  Payload ID: 14786
  Gene Symbol: RNF150
  Gene Name: ring finger protein 150
  Uniprot ID: Q9ULK6
  ENST ID: ENST00000507500
  CDS Start-End: 242-1459
cgggcgcccaagaagcaaaatgcaaccaccgcgctacagctgagaggggaaggggccagcgccatccgctcgcccggaatccggtccccgcggcggctgcgcgtcccggccgcggcccctccggcccgggagtgagcagcagcaggaggagaggcagcggcccggggttggccggggctggggaggagggacgggacggagggagggcgcgggggcggggagggggccccggcggataaagatggcaatgtctctcatccaagcgtgctgcagtctggctctctcaacatggctgctttccttttgtttcgtgcatctgctctgcctggactttaccgtggccgagaaggaggaatggtacaccgccttcgtgaacatcacctacgccgagcccgcgccggaccccggggccggggcggcgggcggcggcggcgcggagctgcacacggagaagacggagtgcgggcgctacggagagcactcgcccaagcaggacgcccgcggggaggtggtcatggccagctcggcccacgaccgcctggcctgcgaccccaacaccaagttcgccgccccgacccgcggcaagaactggatagccctcatccccaagggcaactgcacgtacagggataagatccggaacgcgttcctgcagaacgcctcagccgtggtcatcttcaacgtgggctccaacaccaacgagaccatcaccatgccccacgcgggtgtagaagacatcgtggccataatgattcctgagccaaaagggaaggagatagtaagcctgctggaaagaaacatcaccgtgacaatgtacatcaccatcggaacccggaacttgcagaaatatgtgagccgcacttcggttgtgtttgtctccatctccttcattgtcctgatgatcatttccctcgcatggctcgtcttttattacatccagaggtttcgatatgcaaatgccagggataggaaccagcgccgactgggggatgcagcaaagaaagccatcagcaaactccagatcaggaccatcaagaagggtgacaaggaaacagagtctgattttgacaactgtgcagtttgtattgaagggtacaagcccaatgacgttgtccggatcctgccctgccggcatcttttccacaagtcctgtgttgacccctggcttctagaccatcgtacctgtcccatgtgcaagatgaacattcttaaagccctagggatcccgcccaatgccgactgcatggacgacttgcccactgacttcgagggctctctgggaggtccacccaccaaccagatcacaggtgccagcgacacaacagtgaatgaaagttcagtcactttggaccctgctgtccggactgtgggagccttgcaggtggtccaggatacagaccccatcccccaggagggagacgtcatctttactactaacagtgagttctgccatacttaaagtgacatagccagaaggactgttgccttgtaggaattggaaaaaaatacctttcctcaaaaagaaaaaaa

SEQ ID NO: 177283 - DNA, 9805 bp, Homo sapiens
  Payload ID: 14786
  Gene Symbol: RNF150
  Gene Name: ring finger protein 150
  Uniprot ID: Q9ULK6
  ENST ID: ENST00000515673
  CDS Start-End: 35-1351
cgcgggggcggggagggggccccggcggataaagatggcaatgtctctcatccaagcgtgctgcagtctggctctctcaacatggctgctttccttttgtttcgtgcatctgctctgcctggactttaccgtggccgagaaggaggaatggtacaccgccttcgtgaacatcacctacgccgagcccgcgccggaccccggggccggggcggcgggcggcggcggcgcggagctgcacacggagaagacggagtgcgggcgctacggagagcactcgcccaagcaggacgcccgcggggaggtggtcatggccagctcggcccacgaccgcctggcctgcgaccccaacaccaagttcgccgccccgacccgcggcaagaactggatagccctcatccccaagggcaactgcacgtacagggataagatccggaacgcgttcctgcagaacgcctcagccgtggtcatcttcaacgtgggctccaacaccaacgagaccatcaccatgccccacgcgggtgtagaagacatcgtggccataatgattcctgagccaaaagggaaggagatagtaagcctgctggaaagaaacatcaccgtgacaatgtacatcaccatcggaacccggaacttgcagaaatatgtgagccgcacttcggttgtgtttgtctccatctccttcattgtcctgatgatcatttccctcgcatggctcgtcttttattacatccagaggtttcgatatgcaaatgccagggataggaaccagcgccgactgggggatgcagcaaagaaagccatcagcaaactccagatcaggaccatcaagaagggtgacaaggaaacagagtctgattttgacaactgtgcagtttgtattgaagggtacaagcccaatgacgttgtccggatcctgccctgccggcatcttttccacaagtcctgtgttgacccctggcttctagaccatcgtacctgtcccatgtgcaagatgaacattcttaaagccctagggatcccgcccaatgccgactgcatggacgacttgcccactgacttcgagggctctctgggaggtccacccaccaaccagatcacaggtgccagcgacacaacagtgaatgaaagttcagtcactttggaccctgctgtccggactgtgggagccttgcaggtggtccaggatacagaccccatcccccaggagggagacgtcatctttactactaacagtgagcaggagccagctgtaagcagtgattctgacatttccttgatcatggcaatggaggttggactgtctgatgtagaactttccactgaccaggactgtgaagaagtgaaatcttgaaacgacaaatccagaagcaaagagatagtaggacccaagggaaaggaagggaagagtgctccaagacttggaccaggcacacacacacctccagatcaccttggcaactccagggcgctccgttcaagaatgctgacgaaaagcaatatccaaagtcttgtcaatcaggatgcagtttctccatcggtatggcagtctgtggccttggcagctgggaagttgaaagctgatttccactcctatgtccatgtagacatacacttcagaagctcctaaaacagagactgaaaggccacctttaggatttcttagtttcatttcaattctttccatgtctcatcattcttgtttttggcatgttgtttgatttctttggcaatttttttaaagattatttgtagtttactttccatctattcctttgtttttcctttgatgcactccagcttttgtataggtttctgtttagaagcaccagttcctgctatgatcagtttgtattccatctctgagatatgtggtcttgacctcccagcatgaagtgtgcatggctttgagaagtgcctcagcaccctgaaatggactaaggccagctttcattaagaatctaagttcttctaagtgggcctttaaaaaccccagctgccagagaccccaacactaagccctaaatctgctgaggccactgctggttattttaagccacatcacacttgcttccacttgccgggcttgattaagggcccacgtgacatgagaagggagctctagggaagccgtttcattcttctgggtcttacagtctttggctgaaattctgaactcagaagtcccctccaaggcatccagtctttggtggttgtagggctggttttaaaaccagataccacattttcttcctattgaaaacaaaatgccagttgcattggtttcccctgggctagaacagtttttttcttacctctgtaagtgggttctgtaaaaaatggaggctttagagaaaagccaatcatttttaagtccaatggcaaacatagtgggggctgcagtagcacctagcttttaccttaatttcgacacacttctgttgaatctcaccagaccatgtgggaggatttaggtgaatccctagcagattgcttcccagggctccctgagtgtgtccagataccaagtgaggaatgaggtgtgatttgctgtatcatttgaaccaaaaagtatgcagcatgagaatttgctagatcgtttatcctgactgaaatagacaaagtaagagggaaaggaaaagaggtatcaagtaaatactgaaacccaatggtgtttttaaactgtttctgtttttattcatcttttgtaactatgacagaaatgtgctattttttcagtgggcaattttgtaatatattcagactatccagatacagagatgactaaggtcattgatagcgtctctgaacaatcagacggatcaccttatctctacacagctggcaaacaccaggctgcggcttggattaaccaggaaagaaagcttttctcactgagttgtttttatgtattgatggggacttttccacctcattagactaatactcattcaaaaagagtttggttctgctgtaaatccttgccgcctgctgaaacatggtgtgcaggtcaacggagaatactagctgctcctttttcaccacctttaccaatttcctatttgatggtttgtaagtagacagtaaggcaaggcagatgattattaccctcagaaaggttgcatctccctaggagtccaatgcttcctgtaatgaaatccactctctatgtgtgggaaaagaggcagggaggaatgaagagagctctgaatcgagaatcctagatgaaccacacgctttactaagcctcggcttcttcatctataatgtgaagggtttaataacatgagtccccaagctcctctggctgtgggaccacagatgagtctttcagaggcaggatccatttttgcagatagctatgacttgtggcaatcaggcttcgtagcttggggaggtagagttacttgacatgtatcatgtaataacagcctttgagacttggcacaactatggtgctgagaatgaaaatctaaatgattgaagttttaagtccaagtaggagttggtttgttttgccttgtttaaaaattgctgttagtcacagagtttgcaatctctggataccttcaaatcctagctctcactgtgggattcttgatctcagaggtgtttatttttcacagtcagcataggcttgcgccactgactcctccttcagtcggctttgcccaaaacaaattttagtattactggtattaagtttagtccagtggaattagaaggataattcaatagcaacagaaatataaattatattccattcccagagagagaatgcgctttggattgtttagtcctctgattaacgagtattttctcttcctgccaagaactaggtgaatcaggaattgattgcatatgcaagccctggccacagctgcacttacaggatgcctcatagacgatgaggggtctgaaaggccaacccgaggctggcagatctgaccccaaggaggtcctgctgcaaaccccctgagcctttgccattcactacttaccaaagtttgtttctggaggattttcctgtagctttgatagtttaaaaaaaaaaaaaaaaagaaaaaaaaaaagcttaaccagaaagtttctctttcagaagaaaggggaacagcccttccttatagccttctttacctcccccaaagaagagactgacctggagacctggtagtctacagatgagtgtcagagggtgtgtgtaccctctagaagcaaatgcagactgtatgtgtatttgcagatgtgcatttttctatagcaagagtctagactagcactgtccaacagaaacgtaatgcaagtcacagacataattttaaattttctactagccacattttaaagtgtaaaaagaaacaggtaaagataattttaatcatgtactttaacctaatattgtttcaacatgtcactaatgtaaattaatgacatgttttacatgcttttgtgtactaagtcttctaaatccattgtgtcttttacactcacagcacctctcaatttggatagtcacatgtggctagtggctgccaattggacaatgcaggtctagagttcctccagtattctcacaagatcccccgacccttacaaaagaaaagaaggttaaaagcttaattacctccagggagaactggacaccacccaagtcgcctaatgagaggcccagaggtccatttattttgtagtgaataaagattcaggcaccctttttaaaatttctgcttgaactttctaaccatatcattgatgtccatgaccatttgttgttactcctctgaccagttgttacttaaaactcacacaaaccatgctgatttggtgctgaaacaaaattatacccctcacttctatggcaaaccctcggactgatatgtggcacttaggagccaaagagaactccagactgaaatcacccaactttacctcaaccccttcttcttgttcatggttggtgaaagtcctttcccagtgtcccccagtcccacagctgtagtgaaaactcacgaacttgggaggaaagaatgagaaatgcaagactttatgtggccttcttgaaaaagaatctttgggggcctgtgatcatccggtctctacttggtgaattatgaccacctccaacagccagcattttactccaagtcagcatccacctgccaccccaatgctatggggaagaaaaggagcatttgcattcactcaaaataatttagggtcacctttaggaactgctacctcctatgtggctagtccctttggaagagctgagccctgactatgaatacagcttttgaacattgacttaatctctagggttagatatcccctgcagtgtcaactctggtcatctacacagggagaggtagagtctggagaaggcagaaaattaaaagcggcaaaggtacctacccatttttgacatcacatggtaatgatcagaatcatggaggcaaagctctgtccaaaaatgttcattttgttttgttttgttttgttttcttgtttttaacatttccttcatcctggtgaaatatcctggaaattcatagatctgggtttggtcatttcaaagctcaccatgcccagtggccatttcagttactgccctgacatccctgaggctaccatactctcaaaaccaaatcaatgccagtgatctaacataggattctttcttatttatgagttttgtttagatggatatttttgcagagcataaaaaattaaatgacatttagttatccattgaatgtatcaccctgacttaaaaaaaaatccttaaatcaaaacttttcaaaaaatctgggctatggagtcactccctctgtggagcgagagcccagtcttttctggtactaaggccacagaggcaatttccagtagcatttttatatcttctctaagtttcttttccttttctgtctgtatctgtttttctctgactgcctatatcttactttgtatacccatacataaattattttcccatcttctctcttcccctttttttctgatttgttttctctcttgcaagaaactctgaaataaccttcagaacacaaaaaactggaggttctatacctacagagtcattatcattattgtgattaccattgttactgttgttggtgtttttcctctttttattgtgtagcaatatccatattcacttctgatgaggcaaacctgtttactataaaccaatgtcctccctaaaggagtcagtttcattttcacttctcacatcaccagttgtatcgcaacccatcttacaaccattgccatgttttcaggcttccttgccataaatgttttctgggcaaataatggcaaagcaacaattccagaatgctgtctagatctgctttctcccaccctcagcatttgaccctcctcattcgcctgagcccccagggttaggatttcttggaaaaacttgtatactgtacctgatggaatgcccattcttcctaactacttagcacaagtgcttgctcatcgtaagtgatctgagggccactaattcctgaagactgacaaagagacacgaagagactaccctcttaagatggggatgcatggttcttcatgcagtgctcttggccaccgaggtccttcatccatgccattgcatggatgaatacgtttgatgttggcagttaaaatgggatgggagtgtcaccctgcaggaagtaagaaaagaggatggcaggatctctgatcagggagctggtcaaagcagggctggaaagcttctgtgcttaacaaaatgtgcgtgctgtccccaagtaaatgctcatccctaggtttagagctgacctgggttttggggagtttgtatttttaaggaattaaatactcatgagttaaaatactcatgattgcaaagaaggtctggattgcctgaaaaataaattaattctaagaagctaatatgagtttctcatcatcccttagctcttccttttccctccttttgtcctcactcaaccccagaccctgtgtaataggaacattaatttttaaagacccacagatcaatagccacactcttccactctacaccttttattgacaccaagttatcatcccagaactaatgaagcaagtccagatgctagacgtggccccttaatatcgagcaatttgattgcaatcctgcttgttctacaagaacctgctaaggtcagtcacatctctcttcacctgccttgagtgcttcataatcacgtggctttttcaggaatttcagtgatcaaagatcttctaattctgtgctaccactgacgtttgcacttaatacagagccatttgctctgtggccacctgataaatatttgctgatgataagacaaaaatatacacgtctattaagaggtctgcaatgtctgaacacagtgagggagaaaaatccttagagaaggtcgcttaatctcaattacccaaagtcattgcttggcagaatatctgtggtctgttatccttagtgaagtgacaggcttggagaagcagggtaatgtggggaccatgtgtgctatataaaccaaagactgatcaccatccaaatgaacacatgtttcttccattgactagttgaattttctcccaatgttctcataaataaaagcgaaggtgggttgcatggttgaatgaaaccattaaaccttatggggttttctgttgcagactgttgattgaccttactaaatcccgaaatctaaaaaatgaattgtggccttagtaccacaccatctttaaagtctagtgtttagtccccttttccttcaaaactttccaacaaatctagcgctttactgaactcagaacattgttctctttgagaatgtgaagattttaaatagccaaagaattttcatgtataagagctagctaaatatagtatatcctgctctttcgaagaagatacaaaactgttgcctgtactaatgggtatagtagagcagttgaagaactaacacatacatggacttttcggtctgaatttgtgttggcatccatggtacttactgttcagtaggatgttattgcaaggagcagagtgccctctgctggagtaatcgcaattattcttgcagcagattaatttgacttgggtcatgaattcaacaaccagttacttgcctttcatcatacaatttcttcggtagttgagaatttggtctacatttatcaaatgaggaaagagtgtcacaaactctaaaaagctgaaggagaccccacagatcttctcactgtcagcagcccttacttctgcaaaatgttgaaggataatgttgctctgtttgcaaagaagatgcctctggctagaatgtttgtgcagttataagcaagggactgcttgtttttgtaagttatctcaactttattcttgtgaaattgcaaaggaagatcaataaaaagacttcatatgaatgtaaatggtgtgaaatactgatgtgttttgtacatgtacataatatatttacttcctgctttcacattagtaatctgagatggttctaccattttataattagaaggagatgtaggggtgggagtggggagggactgttatttttatagaggggtgtcccttacatttagaaaatgaaataattttgtatttgtgaaaagttacattccatccattttctggaaaaaaaaatgggtattgttctttaaaatgttcatgagctgggaggatgattattctggtttccaggggaaactctcaagcagtacatatgtgatactcagttttgtagactgcagacaataaccagcaattgccagttgcaaaaatgtgaaaaagaaataacttattttaaccactttgtacagcatattatttcccactagaaaaaaatctgcaaataatgaatttacaattataaataatcagacatgacatcataaatcaatcttcctccctactagcaagaggaaattccaatggctttttttccatcctaacacaaattacttttattgtaaacaaatgcttgcaacaaaatgcttttgttgtaaaatgattgatgttggggtaaagtctacttagcttccccacaaggtctttctggctagtctgcaggtagtagatgatggttccatctcggcattgtctatcctctccatattcagactgtgtgactgagcttccttgatttatatagcatctgacccaaaatcacaaaaaagtcactcctgatgacatttgcatggggagtctttcatttggacttcagttcttaattgccgaaataagtactagtgaattatgtagcgtttttacccaaaactaatcttctgtacaaagttgtgtgcatattgagatgattagttaaggcagtgtagttttttaaattttttctgtataaatttctttccttcttccccacctcaggcacctaccctactcctttcagagcactttatatccctcttgaaatacaaagaaattgaaaaaaaaaaaaaagtaactgtctttaaaggaatttgtcttctattaggagacacagacttttattttgctttattctattctctttgtacttggagagcgtaatcaacttgtctcataatgggctagtgatgaaacaagggtgatagttggaaacagtcattacaacatggttatttttgttatatagaagactatcatgtaaataagtgcaatcgtgttcttacgtactggctaaaaaaaaaatattgcaactataaggatttttaaatgagggttgtgaattccaggaaatttcactgcaaaatttcttttggttttgttttttaataaaatggaaccaga

SEQ ID NO: 177284 - DNA, 793 bp, Homo sapiens
  Payload ID: 14786
  Gene Symbol: RNF150
  Gene Name: ring finger protein 150
  ENST ID: ENST00000506101
  CDS Start-End: 103-793
aggacagaattcttcaatgggtctgaaatatgagagagtttcctggaagcagagaaaccacacaaatttacttcacactgtgtagaagacatcgtggccataatgattcctgagccaaaagggaaggagatagtaagcctgctggaaagaaacatcaccgtgacaatgtacatcaccatcggaacccggaacttgcagaaatatgtgagccgcacttcggttgtgtttgtctccatctccttcattgtcctgatgatcatttccctcgcatggctcgtcttttattacatccagaggtttcgatatgcaaatgccagggataggaaccagcgccgactgggggatgcagcaaagaaagccatcagcaaactccagatcaggaccatcaagaagggtgacaaggaaacagagtctgattttgacaactgtgcagtttgtattgaagggtacaagcccaatgacgttgtccggatcctgccctgccggcatcttttccacaagtcctgtgttgacccctggcttctagaccatcgtacctgtcccatgtgcaagatgaacattcttaaagccctagggatcccgcccaatgccgactgcatggacgacttgcccactgacttcgagggctctctgggaggtccacccaccaaccagatcacaggtgccagcgacacaacagtgaatgaaagttcagtcactttggaccctgctgtccggactgtgggagccttgcaggtggtccaggatacagaccccatcccccaggagggagacgtcatctttactactaaca

SEQ ID NO: 177285 - DNA, 786 bp, Homo sapiens
  Payload ID: 14787
  Gene Symbol: RNF151
  Gene Name: ring finger protein 151
  ENST ID: ENST00000321392
  CDS Start-End: 2-736
gggtggcgggtatgatctcaacctcttcgccagccctcctgacagcaacttcgtgtgctccgtctgccatggggttctcaagaggccagcaaggttgccatgcagccacatcttctgcaaaaagtgcatcctccggtggctagccagacaaaagacctgtccgtgctgtaggaaagaggtgaaaaggaaaaaggttgtccacatgaataaactccggaaaaccattggccgcctggaagtcaagtgcaagaacgccgacgctggctgcatagtgacatgccccctggcccatcgcaaggggcaccaggactcatgcccctttgagctaacggcctgccccaacgagggctgcacctcgcaggtgccgcgtgggaccctggcagagcaccggcagcattgccagcaagggtcccagcagcgctgccccctgggctgcggggccaccctggacccggccgagcgtgctcgccacaactgctaccgggagctgcacaacgcctggagcgtgcgccaggagcgccgtcggcccctgctgctgtccctcctgcggcgtgtgcgctggctggaccaagccaccagtgtcgttcgtagagagctggcggagctcagcaacttcctggaggaagacaccgctctgctggagggtgccccacaggaggaggccgaggctgccccagaaggcaacgttggggctgaggtggtgggggagcccagggccaacataccttgtaaataggtaaataaaagcagacccccggcctgcctgcctctgtgcctgcggccctc

SEQ ID NO: 177286 - DNA, 853 bp, Homo sapiens
  Payload ID: 14787
  Gene Symbol: RNF151
  Gene Name: ring finger protein 151
  ENST ID: ENST00000569210
  CDS Start-End: 60-332
tgtgaaatgcaggctcctgagctctgggggcctgtggagctgctgtctagacgcagatcatgggtggcgggtatgatctcaacctcttcgccagccctcctgacagcaacttcgtgtgctccgtctgccatggggttctcaagaggccagcaaggttgccatgcagccacatcttctgcaaaaagtgcatcctccggtggctagccaggggtggggcagggctaggagagaaggcaggagaatcccatcttcagagagaaacaagtgcagccttgggacgaccagacatagctgagtttggatcgtggctctactgcttagttgctgtgtgactttagtgcaagaacgccgacgctggctgcatagtgacatgccccctggcccatcgcaaggggcaccaggactcatgcccctttgagctaacggcctgccccaacgagggctgcacctcgcaggtgccgcgtgggaccctggcagagcaccggcagcattgccagcaagggtcccagcagcgctgccccctgggctgcggggccaccctggacccggccgagcgtgctcgccacaactgctaccgggagctgcacaacgcctggagcgtgcgccaggagcgccgtcggcccctgctgctgtccctcctgcggcgtgtgcgctggctggaccaagccaccagtgtcgttcgtagagagctggcggagctcagcaacttcctggaggaagacaccgctctgctggagggtgccccacaggaggaggccgaggctgccccagaaggcaacgttggggctgaggtggtgggggagcccagggccaacataccttgtaaataggtaaataaaagcagacccccggc

SEQ ID NO: 177287 - DNA, 796 bp, Homo sapiens
  Payload ID: 14787
  Gene Symbol: RNF151
  Gene Name: ring finger protein 151
  Uniprot ID: Q2KHN1
  ENST ID: ENST00000569714
  CDS Start-End: 9-746
cgcagatcatgggtggcgggtatgatctcaacctcttcgccagccctcctgacagcaacttcgtgtgctccgtctgccatggggttctcaagaggccagcaaggttgccatgcagccacatcttctgcaaaaagtgcatcctccggtggctagccagacaaaagacctgtccgtgctgtaggaaagaggtgaaaaggaaaaaggttgtccacatgaataaactccggaaaaccattggccgcctggaagtcaagtgcaagaacgccgacgctggctgcatagtgacatgccccctggcccatcgcaaggggcaccaggactcatgcccctttgagctaacggcctgccccaacgagggctgcacctcgcaggtgccgcgtgggaccctggcagagcaccggcagcattgccagcaagggtcccagcagcgctgccccctgggctgcggggccaccctggacccggccgagcgtgctcgccacaactgctaccgggagctgcacaacgcctggagcgtgcgccaggagcgccgtcggcccctgctgctgtccctcctgcggcgtgtgcgctggctggaccaagccaccagtgtcgttcgtagagagctggcggagctcagcaacttcctggaggaagacaccgctctgctggagggtgccccacaggaggaggccgaggctgccccagaaggcaacgttggggctgaggtggtgggggagcccagggccaacataccttgtaaataggtaaataaaagcagacccccggcctgcctgcctctgtgcctgcggccctc

SEQ ID NO: 177288 - DNA, 9501 bp, Homo sapiens
  Payload ID: 14788
  Gene Symbol: RNF152
  Gene Name: ring finger protein 152
  Uniprot ID: Q8N8N0
  ENST ID: ENST00000312828
  CDS Start-End: 1101-1712
gtgcacgtgcgcgcgcgcccgccccagttgcgcccccggcccgcacacaccccggctcatcttctcccggtccccttgtctcgcgccttctccagccctagaagttgccccagggcccctcccgggattagagagcgctgtgaagggccagatgttgggggtcttttgtgcagacacacgcgcctggggcgcttgctcctggaaggacagcggcaggacaaagccagctggactcgtggggcgctgctcgggaagcggcggtccccaatcccgcctggggtcggggcatggcttggggagcgctgcctgggtctggagagagtagagaaatcgccaaagcagagtgacggtgacttgatgaggtgacggtgacttgatgaggtggcggtgacttgatgaggtggcggacaggggcaaacgaaagaaagatgctcgggattgccgcgctgtgtgcctgtctgcgcggctgactaggcgccccgcattcccatatgaccgggttacctggtagattttgccagtgtgtctttgccccaagatgttattccccacctgctccgatttctttctttcctagggcttactgttgctagtaggcgctctgccaccagaggggaactcgtgggcgggggagactgcggaggaggggggaggtggttatttatcctgtagagacaattaggagccgtgacgcccccttctcggccgccagccctccacacctcatctgccttgctccacctccctagtgcacccgctccagccccgtctgcccaggagggcgcttggatttccttctccgcggcgcgtatctaacccttcctgcatgtatttcactgcaggctgaagaaagctcagtctcaattgtgtttcctgcctgtcagcctcttgcctcctaaacgtgtaccatttccacttgatgtcatcacgcagaaggggtgaaagagactcggtgacagatacagaaatgaacacacctgtgagtactggatgcctgtgagcttgccattacctgcactgcaaagacacagggcggtggcctctgagaagcagctccttccccttcaccttggccttgcccttcctgctcacggtccaccatggagacgctgtcccaggactctctgctggaatgtcagatctgtttcaattactacagcccccggcgcaggcccaagttgctggactgcaagcacacctgctgttcagtgtgcctgcagcagatgaggaccagccagaaggatgtgcggtgcccctggtgccgcggtgtcaccaagctgcctcccggcttctccgtgtcgcagctcccggacgacccggaggtcctggctgtcatcgccattccacacacttccgaacacaccccggtcttcatcaaacttcccagcaatgggtgctacatgctgcccctgcccatctccaaggagcgtgcgctgctgcccggagacatgggctgccgcctgctgcccgggagccagcagaagtccgtcaccgtggtgaccatccctgctgaacagcagcctctgcaaggtggggctccccaggaggcggtggaggaggagcaggacaggcggggcgtggtgaaaagctccacctggtcgggggtgtgcactgtcatcttggtggcttgcgtcttggtcttcctcctcggcatcgtgcttcacaacatgtcttgcatttctaagcgcttcactgtgatatcctgtggctgaagagggctgcagggaagtctcttgtgggtgccaacttaggggttgagcaggttgatgatgagatcccagtgagaagatggggggcaacactgaccatttggtgctgagcgctggcctctgggttgcctcttgattaccccaagacagacacaaagggcagaaggtgcggtctcaacaagataccaggtgaattgttctgagtgttgatggcaacagcttggaagatgattgcatgcatcctcataatcatgtattcaatggactgtaatttatgatttttcaaaatcatgttacaagatagacatattctacttagacgttaaactgtacaagtgcgtacaatgtgaccttctctaaatgcggtagattcaaacaaagatgctctgtagacaagtagaattaaacctgcgaatccgtgtaaaaattcagtgaagacatgcactgctggcttctttattttttttttctttttattgaaacccagtcttcatttagttgctaaggcttttaatacattttgaatggcaccaaaacaaaataagtcaaaatggacagtcattttatttggaggaaatatttgaacaagtgtctccaatgtgttgtgttttgtcatgaaccttcattttcttcacttgtaattagagcttgctacgtgtttatggaactgaaagctcaacaggggagcaataaaccgagaaatcatgagaaatgtctaatcccatgggaaaacctgtatgccgattttcctcaagccatctcacaaaataagaatttcaaatgtaaatattgtgtatttgtgtgtgtatgtgtgtgtgtctaatttgatttacctcaggtgtttgagtctttgctgaagaatcctgggatgaagacttcattgggcatgaatgagtcaagtctctgaagcggtggccacttcttggacatcttgacccagcgagtggtctcctacacgtcacctgcaacactcgctcctcttctgtgtatttaagtcctgcattttgtaagaggcaaatggagagtaacagaagagtgtcttttctcctggttttggagtcttgcactggccatgagtgttgtgactgatggtcaacccaggcgggcattttaataaatggcctgtgattcttttttgaaagatgctcttccacaagagttaagccagttagaattcctgtttcctcttgttgatatgagagaagatctcctgtattttaacacgtttttaccaagaaaggtggcaaggtaaactaacagctcaaattcccaatataagtggaccagttcctcataaactgtcaaatgttcttaaatgtgtaatgatctatagatgctcatgaagaaagatctgctacaagtacgtgataaattcctatccctgggtgcatgtgcattcagaaatagctgtgagctttacagctctcatctaacttcttttatggaattcatgaagcaagtggtatgtgacaaggactccacttataaatataactgtttttatgttccactgaatccctgaaaatggtgaggagggtggggggaagtgaaggaaagacaagcagggctaattccaaaaagcaaggctagaaaatagccctgtgaggtcaagacaatttaatttatttacatgctgtctgttatcttcaagcagcacaaaatatgcatataaaagtgatggaattaatgtgaaataaaacaaaaatataatggctagaatacaaagctaatactgctaattggcatgagaattcaacataaaattgtgagctctgatttttcaaattgatcataaaacctttaggaaatgtatttgaaagctcaaaatagaaattaggttaaaatgccattttattgtgtaagctcttgggcattatacaacaaataatctaggatttatttggtattaataatttaggtgtcatattagctgaatactatcctctattacataacataatatactgttgggttagtgtcaatttctcaaactctcccaggctgccataatgcatgtctgacctaatttctatttctcttggaggaaaatacacacacacacacaccacagaagtgttgcattaagaatgctacatttcgaatagactttgcccttgcaattttaagctatgccatattcagattaattttgtgagtgatatctgcatatgtttctgtacagtgtgaaatgactgaccctgtagtatagtacgtgatagagttctacttgttaaagtaggttagatatagacactaatgtgtgtgatgatagtgtcctgtgtttcttagtgcaaatctgtagagtaaaaatgtccatagaacttttacttaaaaacaatcccatgctagagttgccattaagcagtgcaaaattaatcggctgtatggtagattcttgaccttaaatttaacaacaacaaccaaaatcagattttttttgtgagtcttactgacctaagaaacattgtttaaattgtttaaatggatctgcttgcagttatttgtgtacctgtttgttggggtgtgcattcttgtgtatgtgtgtgtgtgtgtgtgtgtgtgtgtgtgtgtgtgtgagagagagagagagagagagaatctcagtctcccagatagaattttataggcttaatgatgttttaatgttgcttggcatcccattgctctggcctcttctggcatttaccaatgacccttaacaaacacatctacccatgtgaccaaagtccactgacacaagaggccaggattcatacttgcacattaatgaaaagtcacaactggaaagcacagaaagagctgaaagcagcctccggtggcttcattttgtagatgagtccgttttgtaattctgcagaaagggggggatatgaacttcgcactgcagtgtcttcttgctccatcctaggtctgtctatatctctatctggctatgatcctttctagggttgatgaataccctttactgagtcaactattgctttaaagaattttttttgtaggtttatgtactcattttagttagcatctacctctctgggaaaatgaaaggagggttgacttagggatgagtatagatgttgaaagacaactatcaaaccatgtggtttgaatttttaaaattgtaaaacattggtgtccaaacctcccaccccacttgtatgtaaaggacagtgagtgttgtataaatagtaaactataagaagcatgaattttcatctttattaatgatcttgaaataaggaagagaatgcttaatatgttaagtagagccaagaatgctactaagaagcattgtctttggaaaaattttgtataatgacttggggcataagttgtgatgaaaaggcaacttggtttttggttccagtcatacttaatgatcagaaagctctaagatgttttctttaaaaatagaattaagtttaattttttgcatggcttacagattgggtcccttgaaggttaaaccatgtgatggtataacctgtgagatcttctagattggcactgttcaatagggctttctgtgatgatggaaatgctcgaaaacctgtgccgtctggtacggtagccaccaggcacattgacttttaggcagttaaaatggggttactacaagggaagaactggatttcaaattttatttaattttaattagcttaaatttaaatagccctatgtgtctagtggctgccatattgaacgatgcagttctgggtgatagcgcttggggatccagcatcaaggtattaatggagtaacagtgaggctaaggtgagagtttgtgggctagtgacatgcagttggcaaaaggcaaaacattcctttctgggcttaaaaagtatgtgatctcaagtatgacagtaaaaattcattgttgccctttggaactgttgcttatagattttaggccaaggaatgatcagtgaagcttaaagaatgctttattaagccccttttctgggatcattagctgcatgttaacctattgtccaaaaatagtagttagacagtacctgtaaaacgtttgacttgcaagctatgcatgatctgtactgtgaaattgtgtctagggtcttgtggccaaaaagtaaatgttacaggaaaaaaaaagcctaatgaaatccctgttcacttccagtatcctatccaaacttcattgctgtattagtaaggtgcaaatataagagcaagcatgttttgcagtgttcagactggttttgtttgcccttgaagttggccagcttgtcgttgtatttggtgtgggcatatgtgggcatcatttttcagatgccaaactaaaatgtaggtagtatttttagaatgagatttgacattgttttagtgtctttcttttttaagcaaaaatttcagttatccctgaaagagttgaagatttgaagctttgcacaaaagcactttttttaacagtaaaaaatactgcccatgaaatttaaagacttgaagtttactaaagctacaataattactttttagctaaataaaaggaagcagaaaattcagtttgagatatatttcctataaagaccagattcttactgataatctggtatttattccagtctagattttgattttaagagttcccatccctttatttgaaaacttatgttgtttcaaaattggttagtctgcttttcattgttttccaaatggaatatatacaaaatacatttacttcattttagcagaaatgggttgattttttttttctagaactcatcaatgtgcaagactttccttcttagcttgcctttaaaaatcatttaatttttttttttttgccaagatactaatctttctttagccttaataggaagatagaagttcaaaagttatcggtgcaaaaggagtgatacacaaaagacttcaatttctatcttttctcagaaaagtgatgctgcccaccagtcagcattttgtttccacataagaagtgtcaggtagtcagtctgtcatccctgacttagatagagaagctgttccttgacatttccatcattctcagtaaattgtcacctacaaggtaattcttaccaaaacagaaactattgagaataataagatagtcgagataattcagtagctgttttgaaagtagtagtctatttaaaaagcaacgatgttcagttgctggattttgttcaacatgagacacttatttatttatttatttatttatgagatggagttttgctcttggtgcccaggccagagtgcaatggcatgatctcagctcactgcaacctccgcctcccaggttcaagctattctcctgcctcagcctcctgagtagctgggattataggcatgcgcctccatgcccagctaattttgtattttttaaagtagagacggggtttctccatgttggtcaggctggtctccaacttctgacttcaggcgatccacccgcctcggcctcccaaagtgctgggattacaggcatgggccactgcacccagccaacatgaaacacttctaaaagataagtggaaattcaagccattgatttttctgacacaactgacttactacacacacacacacacacacaccacgatttagctgtaattggagttaaaattcagtaaaaaactgttattagtcatgttttccaatttgtgagttatacaatattggattagatgctaatttcttaactgttgctatgggctgcatacattatgtcaaactaactacctttgggagtgtctatataaacacttgaaacttttcaaatatatgaagaggtaggttctactgtatacattttattggaaagccattaatcattgaagaacttaagcaggtggggcatttaatttcttccaaataccttattttttggatctgctcaagtggttagggcgagtgcaccattattcccgaatccctgcaatttggttcccatttttctgcacaaattttcttgctcagtcgagccaatgactttttttttttttttttttttcaggattcactgcctggggtatcccactatatatatctcacctatgatgtagtggtgcttgaaatactcatctcattagctcgattttattattctaatctaaggttttttatattattcatactatgatatttttagggacaatcagtaatatttggggcagagtactgagggacctcttgaagtctgcaacagcatgcattttctttgtttttgtgggagtgcttccctgtagctgtctttgttctagaacactgctccaaatttatttccatgggatgtagggctagtagcccatgtgaaagtcttctgtaatctccttggggtgtgagttattgggttattctaacaggagttttccaaagggatggcccatttttaattcaacatttgctttttgaaaatccagaagtagacagttggatataatagtggtggaagagcatgggctgtaagcagaaggaaatagagatgacaaatgcctcttaaaggggatctagttgatacctctgttaaatagtgggagaacacagtagctggtaccttacactgtgctttaggaaaatcctatgaggatttcatttacaaatcctcataggattttctgggttgagggacaatgcaactattaagtagagggagagggagagggaaagggagacatgaagcactgggtctatgtgaagggacaggcagatatacccaaagagggagaaaatacttaataaaggaagagtatagctgcaaaacaagacatataggagctgaaggccagatatggcagaaaccagctggagaaagaagcacaggacaactaggacaacttagtcaagcacaatctgtcattccagtacggactaccaagttcaattcaggatgcttcagttgaagacatgtggggtaatgtgctcagctcatgagggtccaaggagtccccattttccctatcaccctatcctatgctcgtggtttggattgttagcacactaggcaatttcagagtccgctctagagttggttgccacgtcagtgcagacagactctagaatcctcttaaccatggaatgcaaggcctgttcctgtggatctatcctgacttgagtatgtcagtactgttgggaaaatgagttcaagaatatttcagtttatatatcctggttgccgtcatatattttttcatttcaccacttgtttgtgtttgcctcactcaacagtcatgggtgtagaagctggtttcagcttggggctgttacaaactccctacataagccatgtagctgcaatccagggttcctcccaccctacggctttagcggtgggttctctggccctcttgataacaaatactccagtctaatggctatattaatgctgctcagaggctattaactcaaatccttgatgtgtttcatttacaattatgtggattatttattttaggagctttttttttttttttttttttttttaagggccaaatagccctacagataaatgagctgctgggctgtgtagaaaatattgtccaaatgttgccaaatattgacttcgtaaaggggatatcaagctgctgtttataaatctgaatgtcttaaaagcattcttgcttgctctctctgttatagatggtgtcttagccagtcctgagttttccaatgaacccaattttaatatatggtatttttgtatgccaaactggtgtcttgtcctttgtatatgtggtaatgttgattttatgactaccgtaaaaacacatttgctatgattaaagttcataaaatgatttcaaataga

SEQ ID NO: 177289 - DNA, 682 bp, Homo sapiens
  Payload ID: 14788
  Gene Symbol: RNF152
  Gene Name: ring finger protein 152
  ENST ID: ENST00000591306
  CDS Start-End: 341-682
cgggcgcgccgggaccacccggcgatgctgtcgccgccgccgccgcctctgtagcgagcacccgagcccgccgcggagaaaggctgaagaaagctcagtctcaattgtgtttcctgcctgtcagcctcttgcctcctaaacgtgtaccatttccacttgatgtcatcacgcagaaggggtgaaagagactcggtgacagatacagaaatgaacacacctgtgagtactggatgcctgtgagcttgccattacctgcactgcaaagacacagggcggtggcctctgagaagcagctccttccccttcaccttggccttgcccttcctgctcacggtccaccatggagacgctgtcccaggactctctgctggaatgtcagatctgtttcaattactacagcccccggcgcaggcccaagttgctggactgcaagcacacctgctgttcagtgtgcctgcagcagatgaggaccagccagaaggatgtgcggtgcccctggtgccgcggtgtcaccaagctgcctcccggcttctccgtgtcgcagctcccggacgacccggaggtcctggctgtcatcgccattccacacacttccgaacacaccccggtcttcatcaaacttcccagcaatgggtgctacatgctgcccctgcccatctccaaggagcgtgcgctgctgccc

SEQ ID NO: 177290 - DNA, 4955 bp, Homo sapiens
  Payload ID: 14789
  Gene Symbol: RNF157
  Gene Name: ring finger protein 157
  Uniprot ID: Q96PX1
  ENST ID: ENST00000269391
  CDS Start-End: 134-2173
gccgcagcgccgcagcggagccggccgcggcgggcagtcggcccccgcaccgggcgcggggcgggcggccgcggtgaagcgcggagggcggcgcgggcaccggggccgggccggggctgcagccgcagcggccatgggggccctgacgagccggcagcacgcgggcgtggaggaggtggacatcccgtctaattccgtgtaccgctacccgcccaagtccggaagctattttgccagccacttcattatgggaggagagaagtttgactcaactcatcctgaaggttacctgtttggagagaacagcgatctgaactttctggggaacagaccagttgtgtttccttacgccgccccacctccccaagaacccgtgaagactctgagaagcctggtcaatatccgaaaggacacactgaggctcgtcaaatgtgctgaggaagtgaagagccctggagaagaggccagtaaagctaaagtccactacaatgttgagttcacctttgacacagatgctcgggtagccatcaccatctattaccaggccacggaagagttccagaatggtattgccagctacattcccaaagacaacagcctccagtcggagactgtgcagtacaagcgaggagtgtgtcagcagttctgcctgccctcccacaccgtggatccctccgagtgggccgaagaggagcttggctttgatttagaccgagaagtttaccctctagtggtacatgccgtggtggatgaaggagacgagtattttggccattgccatgtactgctgggtacttttgagaagcacacagatggaactttctgtgtcaagcccctcaaacagaaacaagtagtagacggggtcagctacctccttcaggagatctatggaattgaaaacaagtacaacacacaagattctaaggtggctgaagacgaagtgagtgataacagtgccgagtgtgtggtgtgtctctcggatgtccgggacaccttgattctgccctgtcgccacctctgcctctgtaacacctgtgcagacacgctgcgctaccaggccaacaactgccccatctgccgactgcccttccgggcactgcttcagatccgagccatgaggaaaaaattgggccccttgtccccaaccagctttaaccccatcatctcatcccagacatctgactctgaagagcatccatcctcagagaatattccaccaggctatgaagtagtatctcttctggaggccctcaacgggcccctcaccccgtccccagcagttcctccacttcacgtgcttggagatggccacctctcaggaatgctcccttcatatggcagtgatggccacctgccccccgtcaggacgatctcgcctcttgaccgcctgtctgacagcagcagtcagggactcaaactcaaaaagagtctctccaaatccacttcccaaaactcttccgtgctgcatgaagaggaagatgagcattcctgcagcgagtcggagacacagctctctcagagaccgtcggttcagcatctcggagaggaatgtggtgtgactccagaaagtgagaatctcaccttgtcgtcatctggagctattgaccagtcgtcttgcacagggacgcctctgtcatccactatttcctccccagaaggccctgccagcagcagcttggcccagtctgtcatgtccatggcatcctcccagatcagcactgacaccgtctcctccatgtctggctcctacatcgcccctggcactgaagaggagggagaggctctctcttccccccagcctgccagcagggccccctcagaagaaggagaggggctgccagcggagtctccagacagcaactttgctggcctcccagctggagagcaggatgcagagggaaatgatgttatagaggaagaggatggatcacccacgcaggaaggccagaggacgtgcgcatttctaggtatggagtgtgacaataacaatgactttgacatcgcaagcgtgaaagcactggacaataagctgtgctctgaggtctgcttacctggtgcctggcaggctgatgacaatgccgtcagtcggaatgcccagcgccggcgcttgtcatccagcagcctggaggactctgagacgaggccctgtgtgtggggccctttggctgtctgagccccagcctctgcacttgggctcccctcctgccctgcattccatccatcctcactcagctgctgcctactgggcatcctcagcaagatgctggagactttttaccctcctgtgacagctgttacaacctgtaaccacaatccctcacctctcagagggaactggaaccctcctttctccgtgtgacctaaagccactcaatgaactgcagctcacgagaccttttgcagggactctggaatgtcctcacggtatattgatgttcaggtggagctggggtccatgggctaatttcttacacatcttttttctccttagggggtagaacaagaaggcttagagtttggcagctttgttacaaacatccctctggcatttcctggtctctggcacatcataaccaattggaaacctgcagtttggggtagggctggaggatcgctcctgtggaaagggagagccatactgcacggacgtagcgtttccctctacaagcactaggagcacctttctcaaggacaagaaatggtagcaaccaaaaggttggttgaaggaaacaatccttccttctggtggcagagccagtcttctgggcctcacatgcctgtgcggttaagaaggagctcttggccgggcgcggtggctcacgcctgtaatcccagcactttgggaggccgaggcgggtggatcatgagatcaggagatcgagaccatcctggctaacacggcgaaaccccgtctctactaaaaatacaaaaaattagctgggcatggttgcaggcgcctgtagtcccagctacttgggaggctgaggcaggagaatggcctgaacccgggaggcggagcttgcagtgagccgagatcgcgccaatgcactccagcctgggcgacagagaaaaaaaaaaaaaaagaaggagcccttgaatctgagaatcccccagttaagatgatttcccttaaggagcatttctcctgatcaggtgcattcagggaggcctgcaactccatcctaaggtgacatttcaagaaacacatgtgttgaccacctctgtgtgccaagcactgggtgaggagtggtcgtatattaccataattcatcctcactcaattgggaggtggcattcttgtccctgttgcccccatctctacccccttttgttaatggttgagagaaatgtggaccagtgattctcagtttggtgcccaggtccccaaaggaagtgatggagagccttgagctaagttcaggcagcagcatgtggccagcagcagtgtgctgggagcagaggttggaatcagggctcagggccttcacttcaagggccctccccagctactcgggaggctgaggcaggagaatcgcttgaactcaggaggtggaggttgcggtgagccaagatcgtgccactgcactccagcctgggctacaagattgaaaagatcgaaactctgtctcaaacaaaaaaaaaaaaattcaaggctgtttccaaggcagcctcaaaaagagcctggtgcccagggggtccttcgtttctgtgtggctgcagaggccaggagtgcagtgactgtctcactgcctagtggttgtggctcacatcctgccctgatggagaggggggcctgtcgtccaaccctctctgaaaaactgcagtagactttaccatttcaggccccacctaatgttctttccttccttccccctacattcttcccgcccctttcatagttaagatgcataagctgagcaataaccccacttcctgatttccctgaaatatgagcccagaagcagcaggtgacagggagcttcccttaccctggggtggtggcacacagaccacctcctgtcctgtcccctgcaggtagtattcacagtgtggtgttacctgggaggagggaggaaggagctgagatgaaggagattcaggtaaacagtagccacagtggccaggacccccttcctgaggatccctgtccttcctcgcagcaggtgcttagtcctctcctagggagaagcacggaaagattcctcaaggcctcagtcccatgtccaaggcatacctaggttagaaatgtcctttacttgtttctcagttactatttctcctcttcctccctccccctgccttctcttggctgtcatttagctctctggcccacagaaatactccatccaaggagctggtcctcagtcagcctgatgaggacaggtcagtggccaacccttttgccccagtccttcatctggagacagtcacatagtcacgtcaacagttcacccaaagagaagaggtggggcctggcttctcccacagggcacagcctaactatggagacccagggctccttcctgctgcactaggcctgtgctctccctattgccttcaggtggtgtgatcccggcttcctcacagagcccttttttccttctgcccagctccatcccaccagagtttctacccccgctgaggcatctcctgggcacagaccaccacactctaagccggctggcctgggagttagggtcctgcccacctcacctgggagttggggtcctgcccacctggagtttagcacgctggtcgctcactttgctttggtctgcacacctggtgtgtgcatgtgtatactgcttgtgccatctgtgtacccctctccctggagtacacttgtggtcacactacagtggggacatcaagaatgcaatatttatggattgctgcatgattcttaaaaatgaataaaactgtttacaagggaaggagagctaactgcaaagtga

SEQ ID NO: 177291 - DNA, 2937 bp, Homo sapiens
  Payload ID: 14789
  Gene Symbol: RNF157
  Gene Name: ring finger protein 157
  Uniprot ID: Q96PX1
  ENST ID: ENST00000319945
  CDS Start-End: 69-2042
cggccgcggtgaagcgcggagggcggcgcgggcaccggggccgggccggggctgcagccgcagcggccatgggggccctgacgagccggcagcacgcgggcgtggaggaggtggacatcccgtctaattccgtgtaccgctacccgcccaagtccggaagctattttgccagccacttcattatgggaggagagaagtttgactcaactcatcctgaaggttacctgtttggagagaacagcgatctgaactttctggggaacagaccagttgtgtttccttacgccgccccacctccccaagaacccgtgaagactctgagaagcctggtcaatatccgaaaggacacactgaggctcgtcaaatgtgctgaggaagtgaagagccctggagaagaggccagtaaagctaaagtccactacaatgttgagttcacctttgacacagatgctcgggtagccatcaccatctattaccaggccacggaagagttccagaatggtattgccagctacattcccaaagacaacagcctccagtcggagactgtgcagtacaagcgaggagtgtgtcagcagttctgcctgccctcccacaccgtggatccctccgagtgggccgaagaggagcttggctttgatttagaccgagaagtttaccctctagtggtacatgccgtggtggatgaaggagacgagtattttggccattgccatgtactgctgggtacttttgagaagcacacagatggaactttctgtgtcaagcccctcaaacagaaacaagtagtagacggggtcagctacctccttcaggagatctatggaattgaaaacaagtacaacacacaagattctaaggtggctgaagacgaagtgagtgataacagtgccgagtgtgtggtgtgtctctcggatgtccgggacaccttgattctgccctgtcgccacctctgcctctgtaacacctgtgcagacacgctgcgctaccaggccaacaactgccccatctgccgactgcccttccgggcactgcttcagatccgagccatgaggaaaaaattgggccccttgtccccaaccagctttaaccccatcatctcatcccagacatctgactctgaagagcatccatcctcagagaatattccaccaggctatgaagtagtatctcttctggaggccctcaacgggcccctcaccccgtccccagcagttcctccacttcacgtgcttggagatggccacctctcaggaatgctcccttcatatggcagtgatggccacctgccccccgtcaggacgatctcgcctcttgaccgcctgtctgacagcagcagtcagggactcaaactcaaaaagagtctctccaaatccacttcccaaaactcttccgtgctgcatgaagaggaagatgagcattcctgcagcgagtcggagacacagctctctcagagaccgtcggttcagcatctcggagaggaatgtggtgtgactccagaaagtgagaatctcaccttgtcgtcatctggagctattgaccagtcgtcttgcacagggacgcctctgtcatccactatttcctccccagaaggccctgccagcagcagcttggcccagtctgtcatgtccatggcatcctcccagatcagcactgacaccgtctcctccatgtctggctcctacatcgcccctggcactgaagaggagggagaggctctctcttccccccagcctgccagcagggccccctcagaagaaggagagggaaatgatgttatagaggaagaggatggatcacccacgcaggaaggccagaggacgtgcgcatttctaggtatggagtgtgacaataacaatgactttgacatcgcaagcgtgaaagcactggacaataagctgtgctctgaggtctgcttacctggtgcctggcaggctgatgacaatgccgtcagtcggaatgcccagcgccggcgcttgtcatccagcagcctggaggactctgagacgaggccctgtgtgtggggccctttggctgtctgagccccagcctctgcacttgggctcccctcctgccctgcattccatccatcctcactcagctgctgcctactgggcatcctcagcaagatgctggagactttttaccctcctgtgacagctgttacaacctgtaaccacaatccctcacctctcagagggaactggaaccctcctttctccgtgtgacctaaagccactcaatgaactgcagctcacgagaccttttgcagggactctggaatgtcctcacggtatattgatgttcaggtggagctggggtccatgggctaatttcttacacatcttttttctccttagggggtagaacaagaaggcttagagtttggcagctttgttacaaacatccctctggcatttcctggtctctggcacatcataaccaattggaaacctgcagtttggggtagggctggaggatcgctcctgtggaaagggagagccatactgcacggacgtagcgtttccctctacaagcactaggagcacctttctcaaggacaagaaatggtagcaaccaaaaggttggttgaaggaaacaatccttccttctggtggcagagccagtcttctgggcctcacatgcctgtgcggttaagaaggagctcttggccgggcgcggtggctcacgcctgtaatcccagcactttgggaggccgaggcgggtggatcatgagatcaggagatcgagaccatcctggctaacacggcgaaaccccgtctctactaaaaatacaaaaaattagctgggcatggttgcaggcgcctgtagtcccagctacttgggaggctgaggcaggagaatggcctgaacccgggaggcggagcttgcagtgagccgagatcgcgccaatgcactccagcctgggcgacagag

SEQ ID NO: 177292 - DNA, 755 bp, Homo sapiens
  Payload ID: 14789
  Gene Symbol: RNF157
  Gene Name: ring finger protein 157
  ENST ID: ENST00000592271
  CDS Start-End: 62-280
ggtgaagcgcggagggcggcgcgggcaccggggccgggccggggctgcagccgcagcggccatgggggccctgacgagccggcagcacgcgggcgtggaggaggtggacatcccgtctaattccgtgtaccgctacccgcccaagtccggaagctattttgccagccacttcattatgggaggagagaagtttgactcaactcatcctgaaggttacctgtttggagagaacagcgatctgaactttctggggaacagaccagttgtggtatggctgtaatcagtttactcctacttggagcttaagtggccaattcaaaaaatgtaacaaaaataagtttgcagttgcttgttcagcagtttgtagcttggtctgagttgagagagatgcactagaagacaaactgcagcctccttggttgtatgggatctcttgttgctagaggactggaagagctcctggagtcttgtgagggagaggatgagtctcacaaattaagctaggacagatctctccctgtcacctctttaggcaacccttttccaagggcttaccttttttttttttcttcatggcacttaacaccaaccttttattgatttgtctctttctctgcttattgtctgcctcctcctctagaacgtaagtttcataaggcaaggactgtttttactgtagtatcccaaacctagaacaaagcctggcacgtaatgttaagcccttaataaatgattgttgaatgaatgactgaaaa

SEQ ID NO: 177293 - DNA, 2220 bp, Homo sapiens
  Payload ID: 14789
  Gene Symbol: RNF157
  Gene Name: ring finger protein 157
  ENST ID: ENST00000591615
  CDS Start-End: 1-245
acaagcgaggagtgtgtcagcagttctgcctgccctcccacaccgtggatccctccgagtgggccgaagaggagcttggctttgatttagaccgagaagtttaccctctagtggtacatgccgtggtggatgaaggagacgagtattttggccattgccatgtactgctgggtacttttgagaagcacacagatggaactttctgtgtcaagcccctcaaacagaaacaagtagtaagtatttgaagaccacagactgttagtattagggtccttccttccttttattctttcctttcttcttctctctccctctttttttatttttgttttactttttgctctctccttttcctctttttttttttttaatcaaagaagaaaagaaaaaaagggagtgcttttgaatgttacaagctattacaaacgacttgggtggcctgaaaggaatgctgatttttgaggtcttcattgttccagaagtgttggtgttgagggagcctttatctgagcaaaggacttgagaaatgaaagaacaagatttatttcccaacattgggtttagggagaactctttttatttaaaatgccagagtgagaaacatttcaagcgaaaggataaagcattagggtccaatttagtgtaattagagtcattggcttaatttatccattccttttctaaaattcaaagttagccatccattctccctcttccagaatgatcagcaccttgtgcatatgtctgctagaaagtcccagcccctaccatgtgccagcacttttctttccactcttgtagaggtaggaggagacatcactgggaggagagagagtggtgccagtggcattggcaagggagggtgggtgaggggcaggtcatctcacggagggtgtagagcagctgggtaggaggcagggttgggcttcctcgagatgcaaagaaaagccttcctgtagatgggtgatagatacctgaaattctacactgttcgttcttttaggttaattactcgcctctcttttaatgaggtcaataataagaatatcttaggataaattagttttccaatataatcactgcatgaaaacaagttttaagagcagcagaggaggaaacagatcctgggctcaggcccagggcactacctgggcaggccaggccttggtgagttgcctcatgggggaaggcctggttctccaggaggcctggatgggatggaaaggctcgtgtagctagaggaagatggtttgtccattttcctcttgttagattggcattagcaacagactgttaaaacggagagtgggatataaaatcagcgacaggctatgtcttaggggaagggatggctaagaaacagaggtgaggcagaagagtgtgctcctaaaagtaaatggggcagggccaacttagacactgacatggcccaggttaatgggagtgggattgggccttggtagttggggttttaagaaacagggctggccgggcttgatggctcatctctgttatcctagcagttcgggagcctgaggcaggtggatcacttgaggtcaggagtttgagaccagcctggtcaacatggtgaaaccccgtctctaccacaaaatacaaaaattagccaggcatggtggtgcacaccctgtaatcgcagctactcaggaggctgagacaggagaatcgcttgaacccaggaggtggaggttgcagcgagccaagatggtgccactgcactccagcctggatgacagagcaagaccctatctcaaaaaaaaaaaaaaaaaaaaggaaacagggccaagaggtgtaattttgctgcatgttggggatggggtggcttcatggtgtggggtacacaccattagcctctccctcaaggtcttgctatcgccctttgcatccatattttcccttcccatctttttccttgccaacttcttcttctttttctttctcttttccattcctttatttgtataatgtctgaactcaaattggattatatagcaaatgcctagattttaatgcatgcccttccatcctttttctagtctgtgccttcttaattgtccataatagtatgctgcagtgcaagtattattattgtatttgtgaaattttatgttccctgttgtatataatgatgggtgaattaaatatttgattttctttcttctctcaaagagaaaacataagtaaataaaagcatcttttact

SEQ ID NO: 177294 - DNA, 559 bp, Homo sapiens
  Payload ID: 14789
  Gene Symbol: RNF157
  Gene Name: ring finger protein 157
  ENST ID: ENST00000591355
  CDS Start-End: 1-484
gtcttgcacagggacgcctctgtcatccactatttcctccccagaaggccctgccagcagcagcttggcccagtctgtcatgtccatggcatcctcccagatcagcactgacaccgtctcctccatgtctggctcctacatcgcccctggcactgaagaggagggagaggctctctcttccccccagcctgccagcagggccccctcagaagaaggagaggggctgccagcggagtctccagacagcaactttgctggcctcccagctggagagcaggatgcagagggaaatgatgttatagaggaagaggatggatcacccacgcaggaaggccagaggacgtgcgcatttctaggtatggagtgtgacaataacaatgactttgacatcgcaagcgtgaaagcactggacaataagctgtgctctgaggtctgcttacctgccgcagctccggagtcctgccccataaacattgaggaataggtgcctggcaggctgatgacaatgccgtcagtcggaatgcccagcgccggcgcttgtcatccagcagcctggagg

SEQ ID NO: 177295 - DNA, 7596 bp, Homo sapiens
  Payload ID: 14790
  Gene Symbol: RNF165
  Gene Name: ring finger protein 165
  Uniprot ID: Q6ZSG1
  ENST ID: ENST00000269439
  CDS Start-End: 52-1092
acaaagggcccgcgcgcagccgccgccgccgccgccgcgcgaggagccaggatggtcctggtccacgtcggctatctcgtgcttccagtgtttggctctgtgcgaaacagaggtgccccctttcaaaggtctcagcatcctcacgctacctcctgccgccacttccacctgggccccccgcagccgcagcagctcgctcccgacttcccgctggcccaccccgtgcagtcgcagccaggcctcagcgcccacatggccccggcccaccagcacagcggcgccctgcaccagtcgctgaccccgctgcccaccctgcagttccaggacgtcacaggtccctccttcctacctcaggccctgcaccagcaatacctcctgcagcagcagctcctggaagcccagcaccgcaggctggtctcgcaccccaggcggagtcaggagcgtgtatctgtccacccccaccgcctccatcccagcttcgacttcggccaactgcagacacctcagcccaggtatttggctgagggcactgactgggatctcagtgtggatgctggcttgagtcctgctcagttccaggtgcggcccatccctcagcactatcagcattacctagccactcctcgaatgcaccactttcccagaaactcctcctccacacagatggtcgtccatgaaatccgaaactacccttaccctcagcttcacttccttgctctccagggactaaatcccagcagacacacctccgccgtacgggagagctatgaggagctgctgcagctcgaggacaggttgggtaatgtgactcggggagctgtacagaacaccattgagaggttcaccttcccccacaagtataagaagcgaagaccccaggatggcaagggcaagaaggatgagggggaggagtcagacacagatgagaaatgcacaatttgtctgtctatgctggaagatggagaagatgtgagacgcctaccctgtatgcatctctttcaccaactgtgcgtggaccagtggctcgccatgagcaagaaatgccccatctgccgagtggacattgagacacaactgggagccgacagctgagggaggaattagccagtggacaccccatttccttcaccaggtccccccacggccatagcccttgcagccaaactttgccttctgagccatttgacgtagaggaaaagcctgcaagcacattttgtggaaagaggagttggtggtatcggtgtcgagggagaggagggggttggggaggacccacctctccagaatggcgactgtccccatccgcctggctgagcaggagagagggagctggcggtgcccagcgcaagggcgggaaggaggggcccaggctgcggagaacccaggtgggatcctgaaggcactagctgacagacgggcccctcaatcctgtcctctgaaggattgtatatatacctctcgaccacgtaggaaccatgtaggggtctctagctatttctgtggatggcagccggagcatgttagcttaagaaaaatgttgtgtgtggtgctctagtcatcttgtggtggacatgtcgctattaccgaattcgcaccaaatatttctcattgagtttcttgttttggtgcctgaccgaaccaacgacagccccaatcttcccgtctttatgagagaaaaggaaaaaggaatcaaaggtggaagaaaaaaaaagccaaattctgtttacggtgaaaaaggattttgtttttcacccaatttgggaggcgggaggggggggttctcgttttatttttgtttttgtttttaccttggcttttgtttttctcatgtttacagtgcacggagtgtggaagggggtctaggagagggagagctggaaaaggagctgatggggtcttatcctggcctctgagggttcagcggaggtgaggaaggcagcagagctccagcaggtgaagggagagttcatctaggcggggctccccaggcccagggctcaacttcatggccccagctatatccccccagttccacactaaaccagggagggctcggccctcagctactggtacccaatgtgttcctgggagccgagagacccatggtcactccaactccttcctttaggctgtgctcttgcctgtcacaaagaggcaacgtagccactgcctccctatgcaaaaaattaaccagatgatgcagataagacagcataggtgatggctgcttggtcttggccacagtgctctcagccagcactaagggctgaggtcaataccgcagaccttggggaggaagctgagcatcccccgggatgtctccagtcctgacacagtccctcagagatggccctggctctgaggtcacatcagctaggtttgggaggcccctcagcttggtttgggagtgcccgtgttcctggtctctggctgcttctctgactctttgataaccttgggcaagtccctttctttctctgtgcctcagtttccttctcctttgaggggggagagagaacagtgcagccccatttccggtcctgctacctcacctagatgttgtgaggattcatattctctgtccagcgtgttctatgctctcttctgagaaccttgtggggtgtcgggatgggggtgctgggagacacagacctgatacagtatgtctttctgcaccacctcacaattttcctgaaccccaaagggagcagagagataagaggacagaagaatggagatgggaaaatccaccaaattccaacccaaacccaactttctttctccctatgtggaagacaccagattagctggaattctgccaccttcctttgtgccccaccccccactgttccctcatttgcactgctctgtaagcctccccctcacctccattcataacccagtctcaatgccctcgtatcaataagaccggggtaagggggacaggatacttgtcacatatttgaagaaattccatacagtgaaggaaatttgagtctgtattgctgctacaagggtaaaaccaggaccaatgggtaaaagtaacaggcgggcagattttggcttgaggaagagcttctagcacgactggttcatgcgggaatagctgctctggccacctgcaggcagaaagtgggggaagtggctcctggcaggagatttctcccagcactaatatcctggtgttctataaaatctttattgagtgcctaccggtgcaggcgctgggagagacaatagctttgaggagctcacaatctagctgaggagacaagacacatccaatgctgcaaaaatggtgaataacctgattcagggttagcagcaatgagtatcacagcgtccaactcagtagctccagtgtatgaaaatgtctccagggctaaaggctggagatctcaccagtggggaaagtacatctgagtcaggattttgggggaaagctagttactgatagccacaggaagttgagacttctgccccattctctccaatggctgggtgaaaaccaagaattcatcggaagatggctttggcctggaggtagctagggtggtctaggaagctcactcctctcttagtctcagtctttcattctttctgctgagactggcctgaaaggctggcaagtgggagggagtcagtggggaggccaggatagaactagagctggtgtcccaggttccagtctgggctcttcactgacaaagtgggcaacactagaaacttccctttgtctctctgggccttagtttcctcagttacaacctaaggaggttggattggatgcttgctaatttccttctgacactcacactccctaacatcaacacatcttcaaggcggcagagctgtgcgcccacccagctattgaaaaggactttctgtgggcacacactctgtttcagactgggctgggggcacacgtgctgggtgagacagtgggccctcgtcccctcccccctcccaattctctgccccaggctaatattagggactggggaggggaccaccagaggggagagggaagctgcttactttgggggtagaccctgaagcccctcctccttcccccacagatggggacaggaggtgatggggtgctcagaaccctgcagctcccacttctttagccgggcagctgtttgggggacaagagagggccagggtctgtgcttctgctcccggcactggtcagggagtctgggaagagtggagaagaggcagggtcaggcctcagcatctcacatccaccacctccaggaggggagaccactggtaagtcctcctcctgctcaactcaagggactcagaccctttcttgactgagacgcatgagtgccttctggggtgagagcagccccagggtttaagttgggcgtcctagcagctgcagcagctgtgccgccgcgggtccaccgaggacgccaatcaatcaacccaacaccacaagcttggttgggtgcaagcagagggtgagcaggggctgcccctccacctggccaggacccccttcggcacccagttgcccttggccaccacctgtggcaggactcaagctcctcttctgcaaatgttcccagcctccgtgcaagtattcttaactctttacgcctaatgaacaagcacagtttttcaatggtgaagaaaaaagcaccagactttttttctttttttcctaaagaaatcccctaagccccccgcctgtaggcgggacaaacactccctgcgtggggctgtagcaacgtctgtcaggcccccttgtgtttcatctcctgcgcgcgtagagcaaatgctagagcgatttcagctgatagaaaaacaaaaatgaaaaaaaaaacacaaaaaacaaaaaacatggcacgttgctagtttacagggttttgtgagtttaaatgccttatatttaacaatcataatttatgactaacttgtagatatcgtgggttcttatttaattatttttatagttgttttgcatttttaattataatttatttatttagaaaggatactaattttttttattactcctattacctcattttggcgttgtttctgggagtggaatgctttgcatgcattggtacgatgacaaacaactacgaatacaaaaaaaaaatttaaataaaattctgcaaactttatttcgtccgaactatcagggtgtgtgattgcaagctgtcctaccgtggtgctggcctctttggatacattccatacgaaatgcaaacctttgattctgtatgctgtgatctagtgaaaaactccaatatagtgactgtatttagcacatatataaatataatttgcacttgtcagcagactggggtaatcctttcacttgctacacttggcacccccccgcccccaccacaaccctgcctctccatcatgaacctgcctttcctcctccctcgctcctcccacaacctcagcccacccagccggtatcctctgaggaaagtcttggggcactagaggccactgtctccacctggcctccaactccagaattggagccctccagacattacaagaggaacatcagagagccaaaaagcctgacttcttagaaggagccctggactggggagccgggaggctcaggttttcaaatctgctccatgacagacgtcccaatgaccttgagcaagtcccttggcccctgagtctcagttttctgggtggggtgagtgaggagaactgggagatctttagggtcccttagattcaagtagaatgtgacacagatcccgtgggaaaccactgtgctgtgctgtctcaccttctgaggagagaagaaagagggagaaaaggcagggcatggtggctcacgcctgtaatcccagcactttgtgaggccaaggtgggcagatcacttgagatcaggagtttgagaccagcctggccaacatggtgaaaccctgtctctactaaaaatacaaaaattagctgggcgtggtggtaggcgtctgtaatcccagctactcgggaggctgaggcaggagaatggcttgaacccaggagacggaggttgcagtgagctgggagcgtgcaccactgcactctagcctgggtgataagaacaaaactcagtccaaaaaaaaaaaaaaaaaaaaagagggaaagagggagaaaggattgggaggagaaaaggagagcaaagaagaagagaagaatagagagagtgagctgagaatttgagcttgctcagagttgactttcgggagggtttttgtcctataatatgtggcatcctgtgggtgacagggaggtgagttaggtggacacgtataggacgtgccctttcataaggcttgggcagtcatttggcgagtgagctgaaatccatgtcttgttagagatagggatggggtaggcagaaaggagctccaaactatgggtttgggattggcacccctatcctatcatcacccagagtcttcattgttgagatgctgcccatggaaaacagattgggacatagattttggaatcaaggtctctgctcctggcatctcctctgtgcgtctccctctgcctttgctccctggggactgtgggcaggaggagcttcttcggaggaccgggagtgggcctccagtccccctgcccctgtagaggaataatgagggaggacatggggaagtcactgtcaaaggctggcacagctgtgagcccaatgcctctgagcgaaaaggagagagagggagttcacgcccctgagagtagccccctgagccggctgggacctggactgcctgctttcctcctgcctcttcccctttccctccttcacagcttatcctccttcttccctctttacatcactgcctttacctggtggggatgaggccccatggggaaggtgctgatgtggagggaggaagtggagaccgagattcgccatactgcccagggaggctgtgtgagaactgggctgtgtatggtccctaaagcctcaactctgccccagctgggcgatgggtgcccctctctgggcttcctgcctagcttccccttctgcctccagcctggagccttgctttccctggagacaagcccgtggagtcccccaccacactggagggagcacgaccaccacactgctgggcctggcagacaccacatctttggcagggctcctggacgggcatgccttatgctgctctgcagggtcagagtggaaaggggccctttgccctggctggcctgtgccctcacccttgagcccctccccccactccacccctggcctcggatgcggctaatttctcagccatggagccagctgcaccagccctcgagggggtaattttgttgcccctggcaagtgaaaggattatcctcagtgttgattgtccttttttgtaatcctcctgctgttctgttctgttgtgctgtgcaacattttgctacatagactattttatagcagaaagctagaagaatatttattatgaatattaaagcaatagtgcatcaatgaaaaggcggagacattaggaattgtgtaaatgcttagattcacttttggtggattttttgtactttatttataactaataaaaatgaactgcattgctaactaca

SEQ ID NO: 177296 - DNA, 4852 bp, Homo sapiens
  Payload ID: 14790
  Gene Symbol: RNF165
  Gene Name: ring finger protein 165
  Uniprot ID: Q6ZSG1
  ENST ID: ENST00000543885
  CDS Start-End: 204-668
acaaagggcccgcgcgcagccgccgccgccgccgccgcgcgaggagccaggatggtcctggtccacgtcggctatctcgtgcttccagtgtttggctctgtgcgaaacagagggatctcagtgtggatgctggcttgagtcctgctcagttccaggtgcggcccatccctcagcactatcagcattacctagccactcctcgaatgcaccactttcccagaaactcctcctccacacagatggtcgtccatgaaatccgaaactacccttaccctcagcttcacttccttgctctccagggactaaatcccagcagacacacctccgccgtacgggagagctatgaggagctgctgcagctcgaggacaggttgggtaatgtgactcggggagctgtacagaacaccattgagaggttcaccttcccccacaagtataagaagcgaagaccccaggatggcaagggcaagaaggatgagggggaggagtcagacacagatgagaaatgcacaatttgtctgtctatgctggaagatggagaagatgtgagacgcctaccctgtatgcatctctttcaccaactgtgcgtggaccagtggctcgccatgagcaagaaatgccccatctgccgagtggacattgagacacaactgggagccgacagctgagggaggaattagccagtggacaccccatttccttcaccaggtccccccacggccatagcccttgcagccaaactttgccttctgagccatttgacgtagaggaaaagcctgcaagcacattttgtggaaagaggagttggtggtatcggtgtcgagggagaggagggggttggggaggacccacctctccagaatggcgactgtccccatccgcctggctgagcaggagagagggagctggcggtgcccagcgcaagggcgggaaggaggggcccaggctgcggagaacccaggtgggatcctgaaggcactagctgacagacgggcccctcaatcctgtcctctgaaggattgtatatatacctctcgaccacgtaggaaccatgtaggggtctctagctatttctgtggatggcagccggagcatgttagcttaagaaaaatgttgtgtgtggtgctctagtcatcttgtggtggacatgtcgctattaccgaattcgcaccaaatatttctcattgagtttcttgttttggtgcctgaccgaaccaacgacagccccaatcttcccgtctttatgagagaaaaggaaaaaggaatcaaaggtggaagaaaaaaaaagccaaattctgtttacggtgaaaaaggattttgtttttcacccaatttgggaggcgggaggggggggttctcgttttatttttgtttttgtttttaccttggcttttgtttttctcatgtttacagtgcacggagtgtggaagggggtctaggagagggagagctggaaaaggagctgatggggtcttatcctggcctctgagggttcagcggaggtgaggaaggcagcagagctccagcaggtgaagggagagttcatctaggcggggctccccaggcccagggctcaacttcatggccccagctatatccccccagttccacactaaaccagggagggctcggccctcagctactggtacccaatgtgttcctgggagccgagagacccatggtcactccaactccttcctttaggctgtgctcttgcctgtcacaaagaggcaacgtagccactgcctccctatgcaaaaaattaaccagatgatgcagataagacagcataggtgatggctgcttggtcttggccacagtgctctcagccagcactaagggctgaggtcaataccgcagaccttggggaggaagctgagcatcccccgggatgtctccagtcctgacacagtccctcagagatggccctggctctgaggtcacatcagctaggtttgggaggcccctcagcttggtttgggagtgcccgtgttcctggtctctggctgcttctctgactctttgataaccttgggcaagtccctttctttctctgtgcctcagtttccttctcctttgaggggggagagagaacagtgcagccccatttccggtcctgctacctcacctagatgttgtgaggattcatattctctgtccagcgtgttctatgctctcttctgagaaccttgtggggtgtcgggatgggggtgctgggagacacagacctgatacagtatgtctttctgcaccacctcacaattttcctgaaccccaaagggagcagagagataagaggacagaagaatggagatgggaaaatccaccaaattccaacccaaacccaactttctttctccctatgtggaagacaccagattagctggaattctgccaccttcctttgtgccccaccccccactgttccctcatttgcactgctctgtaagcctccccctcacctccattcataacccagtctcaatgccctcgtatcaataagaccggggtaagggggacaggatacttgtcacatatttgaagaaattccatacagtgaaggaaatttgagtctgtattgctgctacaagggtaaaaccaggaccaatgggtaaaagtaacaggcgggcagattttggcttgaggaagagcttctagcacgactggttcatgcgggaatagctgctctggccacctgcaggcagaaagtgggggaagtggctcctggcaggagatttctcccagcactaatatcctggtgttctataaaatctttattgagtgcctaccggtgcaggcgctgggagagacaatagctttgaggagctcacaatctagctgaggagacaagacacatccaatgctgcaaaaatggtgaataacctgattcagggttagcagcaatgagtatcacagcgtccaactcagtagctccagtgtatgaaaatgtctccagggctaaaggctggagatctcaccagtggggaaagtacatctgagtcaggattttgggggaaagctagttactgatagccacaggaagttgagacttctgccccattctctccaatggctgggtgaaaaccaagaattcatcggaagatggctttggcctggaggtagctagggtggtctaggaagctcactcctctcttagtctcagtctttcattctttctgctgagactggcctgaaaggctggcaagtgggagggagtcagtggggaggccaggatagaactagagctggtgtcccaggttccagtctgggctcttcactgacaaagtgggcaacactagaaacttccctttgtctctctgggccttagtttcctcagttacaacctaaggaggttggattggatgcttgctaatttccttctgacactcacactccctaacatcaacacatcttcaaggcggcagagctgtgcgcccacccagctattgaaaaggactttctgtgggcacacactctgtttcagactgggctgggggcacacgtgctgggtgagacagtgggccctcgtcccctcccccctcccaattctctgccccaggctaatattagggactggggaggggaccaccagaggggagagggaagctgcttactttgggggtagaccctgaagcccctcctccttcccccacagatggggacaggaggtgatggggtgctcagaaccctgcagctcccacttctttagccgggcagctgtttgggggacaagagagggccagggtctgtgcttctgctcccggcactggtcagggagtctgggaagagtggagaagaggcagggtcaggcctcagcatctcacatccaccacctccaggaggggagaccactggtaagtcctcctcctgctcaactcaagggactcagaccctttcttgactgagacgcatgagtgccttctggggtgagagcagccccagggtttaagttgggcgtcctagcagctgcagcagctgtgccgccgcgggtccaccgaggacgccaatcaatcaacccaacaccacaagcttggttgggtgcaagcagagggtgagcaggggctgcccctccacctggccaggacccccttcggcacccagttgcccttggccaccacctgtggcaggactcaagctcctcttctgcaaatgttcccagcctccgtgcaagtattcttaactctttacgcctaatgaacaagcacagtttttcaatggtgaagaaaaaagcaccagactttttttctttttttcctaaagaaatcccctaagccccccgcctgtaggcgggacaaacactccctgcgtggggctgtagcaacgtctgtcaggcccccttgtgtttcatctcctgcgcgcgtagagcaaatgctagagcgatttcagctgatagaaaaacaaaaatgaaaaaaaaaacacaaaaaacaaaaaacatggcacgttgctagtttacagggttttgtgagtttaaatgccttatatttaacaatcataatttatgactaacttgtagatatcgtgggttcttatttaattatttttatagttgttttgcatttttaattataatttatttatttagaaaggatactaattttttttattactcctattacctcattttggcgttgtttctgggagtggaatgctttgcatgcattggtacgatgacaaacaactacgaatacaaaaaaaaaatttaaataaaattctgcaaactttatttcgtccgaactatcagggtgtgtgattgcaagctgtcctaccgtggtgctggcctctttggatacattccatacgaaatgcaaacctttgattctgtatgctgtgatctagtgaaaaactccaatat

SEQ ID NO: 177297 - DNA, 2011 bp, Homo sapiens
  Payload ID: 14790
  Gene Symbol: RNF165
  Gene Name: ring finger protein 165
  ENST ID: ENST00000587853
  CDS Start-End: 191-259
gctgtcccccgcggttccggcgaggccgcgccgcgctgcgctccgctcccattggctgcgcgcgcctttgtgtggcggcagctgcggccccagcgcctttgaatgtcgagaggggccgggaagggagcctttccatgggccatctggcccgcgcgcagccgccgccgccgccgccgcgcgaggagccaggatggtcctggtccacgtcggctatctcgtgcttccagtgtttggctctgtgcgaaacagagctcagtgaatggtcaactcgctgctgtgtgcgctgtgacccttctgcctccgcatttagctgtattgtgacaccctcttaaccatttcctgtctccatctgaggaaggcattgctatttaagcggcagtatcccctatctcaggccagcctagccatgggggtgagggggagtgggtgtgtgaggaagaaagaggggggctggatgcgatctccttgaaatgccaccccctctctcaatacacaattatctcttattacttggcatttcctcttaaaacgggtgtggaacattacactaggcagaaattcaaaaatgattaagaaggatgttgagcctgaaagtataattatcctgattaaatcattaccatcctcattaataccaccaatctctaaataccattgcaggatgctgattccatgttttgaaattcaaattgctcagctgcctttaaattttatttttaatactaccttctccctcaccccccccaacaaaaaaaaatccaacaacacaaattctgcccatcagttaaagtttactttcacggcaaacatgcccacaggaaattcaagggctgaggggtgagttggtctgtgggtaaaatttcgcagaatgtgataagagttcatgaccttccgatagaggatactaatgcttaactcaacaaggtcctaaaccacaatcttcttgtaaaactattagagagtttgccagcttaaatctgttctttttagtttccattgtagtagtgtaggatgtaggccatttcagaatagatgtagagaaataaccatttttgtatcttcatcttgtttagccgagtacattgcactgtaaatccctgttaagtggattccttttgccttggcttagaggctgcagcacttcatttttcagttatctgggtgactatcagttagcttcttggcagcacccaggcataactgaagattgcacttagttggaggcaaaaaatgttaaacatatgtattaaaaaaatctttgatgaaatgacagttgctgctatcccatagcctctgaaaacttggtgcaccaaggtccctggcttaagtgggagccatggccatagcgtcttaattgtttaattgtacaatgtcaagagcatctttggacatccgccctggccctcagagctgcccctttaacagccggctcccttctgctgctcgccagccagacctgcttgaaaactgaaacaaaacagcagcaataataaaagaataaggcccctactttgagggcccttccaaaataaagtcccaaatagcctccccagactgccatttggcaatctgaaaagaaagagaaaaaagaaaagaaaagaaaaaagaatcccagcaaaatggttttccattaaacaggggtagcgtgttctgctgtgctgaattacttcctgttcttattttgtgggtaattttttctgtatcaaatatccttttggttgtgtatctttttcaccttttcttgtactaaaactaaagcatgatctgtatttttttacatcccccagttgacaatgtacagcgctcggttagagatgttaccctgctgaaacgtactgtggtcgtgtagcccgggccatctgctcattgtacgctgcttttgttctgttgcccttccgaagcatggtgggcccagcctttttttttgtatcgtgtgcatgacgacattgttacacacagaatccactaatactaatatacaatctctcaataaagaactagttttcctata

SEQ ID NO: 177298 - DNA, 1049 bp, Homo sapiens
  Payload ID: 14790
  Gene Symbol: RNF165
  Gene Name: ring finger protein 165
  ENST ID: ENST00000590330
  CDS Start-End: 248-316
cgcgcctttgtgtggcggcagctgcggccccagcgcctttgaatgtcgagaggggccgggaagggagcctttccatgggccatctgtctccccgccagccgccgccccaccgccgcccgcgccccgcgctccgcctcccgccccggcggctcccgcagccccgccgccgcccgcgcccgcgccccggagccgcgccacaaagggcccgcgcgcagccgccgccgccgccgccgcgcgaggagccaggatggtcctggtccacgtcggctatctcgtgcttccagtgtttggctctgtgcgaaacagagctcagtgaatggtcaactcgctgctgtgtgcgctgtgacccttctgcctccgcatttagctgtattgtgacaccctcttaaccatttcctgtctccatctgaggaaggcattgctatttaagcggcagtatcccctatctcaggccagcctagccatgggggtgagggggagtgggtgtgtgaggaagaaagaggggggctggatgcgatctccttgaaatgccaccccctctctcaatacacaattatctcttattacttggcatttcctcttaaaacgggtgtggaacattacactaggcagaaattcaaaaatgattaagaaggatgttgagcctgaaagtataattatcctgattaaatcattaccatcctcattaataccaccaatctctaaataccattgcaggatgctgattccatgttttgaaattcaaattgctcagctgcctttaaattttatttttaatactaccttctccctcaccccccccaacaaaaaaaaatccaacaacacaaattctgcccatcagttaaagtttactttcacggcaaacatgcccacaggaaattcaagggctgaggggtgagttggtctgtgggtaaaatttcgcagaatgtgataagagttcatgaccttccgatagaggatactaatgcttaactcaacaaggtcctaaaccacaatcttcttgtaaaactattagagagtttgccagcttaaatctgttctttttagtt

SEQ ID NO: 177299 - DNA, 2904 bp, Homo sapiens
  Payload ID: 14790
  Gene Symbol: RNF165
  Gene Name: ring finger protein 165
  ENST ID: ENST00000588679
  CDS Start-End: 52-258
acaaagggcccgcgcgcagccgccgccgccgccgccgcgcgaggagccaggatggtcctggtccacgtcggctatctcgtgcttccagtgtttggctctgtgcgaaacagaggtatcgctttttcctttcggggtctgcttcggagcgtggatcgccgcaggcaccggggcgggggcgggcgccgcgggcggccgggggctcagggcacacccgcgaggacgcagggcgagcggtggcttccccccaccccattttagggggacccccgagggtgggggcggccgccctcgtgggagcttttgtagtgaagttagggtttggcgaatttgggtcccttcctccccagccccattttttattttttgcggcggacgtggttcccccaaatcacagccccttcccctaatacctagccctgtatgatcgaaaggagaaagatacatgaccgtgtgtgtgtgtgtgtgtgtgtgtgtgtgtgtgtgtgtgtgtgtgagagagagagagagcgcgcgcgcgagagcatgcttggttttctgtggtttgctttttttgaggtatatgtgtgttttgtgttatgtgtgttttgtattcattttttgttcattagtaccgatggctggctagctgggacctgggtctctgccctatcccatgccccagcccccaccctctcgtgggcacttgcacgattttccatcccatccttttttcgtctttaaccctttttgtgcatcgcccttgtgctattgccctgctcaccccgccccccgcaactgtctttgtatgacagttgcatacacgggttcaagatgcttgggcgcgtgtgtgtgtgtgtgtgtgtgtctgtatgtgtgtgtgcatgtgtgcgagtgtgcgcgcgcgcctcggagagtcagacctgcgctgctgtgccctccttgggtccggctggagcggggcgtccggcccttgggtgttgtgctgtgtgtgaggatgaggtgggaagctgcccccacgccaggcctttgccccgggcagcggttgacaaagcagcgggccggcgcgggctttgtttttaactgtgataaatggggtgtgtttgcacggtcccctttccccacatcccctctccctcacattctgctacaacaatagcttgattttcccctcttctccccacctccactccacatttctttcattttcttttaataaaaaattcccacctcccaagcaaatccgagatgcatttagattcattttttttcttttttgtattctgcctctggactcacatttctcgtcttggaaatgtttcttctatcctctcccactccacgtctgcttaaatccctgctggctcaggccctcctccccctctccccactccctcatacacagaatgatgtcttcccttggccgaccagggctcctctaccaagtcggggtggggggtggggtcgcagggccagcgctttagtgcgccccaggggcccgattgggcaagaaaaggaaagcccagccctattttatccagcccagctgtccccagccccgcgcctctccccagaacctaaaaggcaagcttggcccccttaggcctgtttgaaccgcagttttttgtgtgatgatagaatgatgacattctgcatttatcaaatctttttttttcttcattgtgtagctcagtgaatggtcaactcgctgctgtgtgcgctgtgacccttctgcctccgcatttagctgtattgtgacaccctcttaaccatttcctgtctccatctgaggaaggcattgctatttaagcggcagtatcccctatctcaggccagcctagccatgggggtgagggggagtgggtgtgtgaggaagaaagaggggggctggatgcgatctccttgaaatgccaccccctctctcaatacacaattatctcttattacttggcatttcctcttaaaacgggtgtggaacattacactaggcagaaattcaaaaatgattaagaaggatgttgagcctgaaagtataattatcctgattaaatcattaccatcctcattaataccaccaatctctaaataccattgcaggatgctgattccatgttttgaaattcaaattgctcagctgcctttaaattttatttttaatactaccttctccctcaccccccccaacaaaaaaaaatccaacaacacaaattctgcccatcagttaaagtttactttcacggcaaacatgcccacaggaaattcaagggctgaggggtgagttggtctgtgggtaaaatttcgcagaatgtgataagagttcatgaccttccgatagaggatactaatgcttaactcaacaaggtcctaaaccacaatcttcttgtaaaactattagagagtttgccagcttaaatctgttctttttagtttccattgtagtagtgtaggatgtaggccatttcagaatagatgtagagaaataaccatttttgtatcttcatcttgtttagccgagtacattgcactgtaaatccctgttaagtggattccttttgccttggcttagaggctgcagcacttcatttttcagttatctgggtgactatcagttagcttcttggcagcacccaggcataactgaagattgcacttagttggaggcaaaaaatgttaaacatatgtattaaaaaaatctttgatgaaatgacagttgctgctatcccatagcctctgaaaacttggtgcaccaaggtccctggcttaagtgggagccatggccatagcgtcttaattgtttaattgtacaatgtcaagagcatctttggacatccgccctggccctcagagctgcccctttaacagccggctcccttctgctgctcgccagccagacctgcttgaaaactgaaacaaaacagcagcaataat

SEQ ID NO: 177300 - DNA, 747 bp, Homo sapiens
  Payload ID: 14790
  Gene Symbol: RNF165
  Gene Name: ring finger protein 165
  ENST ID: ENST00000593230
  CDS Start-End: 280-747
gggagaccgtccaaggagggcttcagcggcagaggggagaccgtccaaggagggcttcagcggcagaggggagaccatccaagggagtgagtggggactaaaattcagcctgaagttctggcctacgtctgtgtcaaaggtgccccctttcaaaggtctcagcatcctcacgctacctcctgccgccacttccacctgggccccccgcagccgcagcagctcgctcccgacttcccgctggcccaccccgtgcagtcgcagccaggcctcagcgcccacatggccccggcccaccagcacagcggcgccctgcaccagtcgctgaccccgctgcccaccctgcagttccaggacgtcacaggtccctccttcctacctcaggccctgcaccagcaatacctcctgcagcagcagctcctggaagcccagcaccgcaggctggtctcgcaccccaggcggagtcaggagcgtgtatctgtccacccccaccgcctccatcccagcttcgacttcggccaactgcagacacctcagcccaggtatttggctgagggcactgactgggatctcagtgtggatgctggcttgagtcctgctcagttccaggtgcggcccatccctcagcactatcagcattacctagccactcctcgaatgcaccactttcccagaaactcctcctccacacagatggtcgtccatgaaatccgaaactacccttaccctcagcttcacttccttgctctc

SEQ ID NO: 177301 - DNA, 7172 bp, Homo sapiens
  Payload ID: 14790
  Gene Symbol: RNF165
  Gene Name: ring finger protein 165
  ENST ID: ENST00000586604
  CDS Start-End: 52-138
acaaagggcccgcgcgcagccgccgccgccgccgccgcgcgaggagccaggatggtcctggtccacgtcggctatctcgtgcttccagtgtttggctctgtgcgaaacagagggatctcagtgtggatgctggcttgagtcctgctcagttccaggtgcggcccatccctcagcactatcagcattacctagccactcctcgaatgcaccactttcccagaaactcctcctccacacagatggtcgtccatgaaatccgaaactacccttaccctcagcttcacttccttgctctccagggactaaatcccagcagacacacctccgccgtacgggagagctatgaggagctgctgcagctcgaggacaggttgggtaatgtgactcggggagctgtacagaacaccattgagaggttcaccttcccccacaagtataagaagcgaagaccccaggatggcaagggcaagaaggatgagggggaggagtcagacacagatgagaaatgcacaatttgtctgtctatgctggaagatggagaagatgtgagacgcctaccctgtatgcatctctttcaccaactgtgcgtggaccagtggctcgccatgagcaagaaatgccccatctgccgagtggacattgagacacaactgggagccgacagctgagggaggaattagccagtggacaccccatttccttcaccaggtccccccacggccatagcccttgcagccaaactttgccttctgagccatttgacgtagaggaaaagcctgcaagcacattttgtggaaagaggagttggtggtatcggtgtcgagggagaggagggggttggggaggacccacctctccagaatggcgactgtccccatccgcctggctgagcaggagagagggagctggcggtgcccagcgcaagggcgggaaggaggggcccaggctgcggagaacccaggtgggatcctgaaggcactagctgacagacgggcccctcaatcctgtcctctgaaggattgtatatatacctctcgaccacgtaggaaccatgtaggggtctctagctatttctgtggatggcagccggagcatgttagcttaagaaaaatgttgtgtgtggtgctctagtcatcttgtggtggacatgtcgctattaccgaattcgcaccaaatatttctcattgagtttcttgttttggtgcctgaccgaaccaacgacagccccaatcttcccgtctttatgagagaaaaggaaaaaggaatcaaaggtggaagaaaaaaaaagccaaattctgtttacggtgaaaaaggattttgtttttcacccaatttgggaggcgggaggggggggttctcgttttatttttgtttttgtttttaccttggcttttgtttttctcatgtttacagtgcacggagtgtggaagggggtctaggagagggagagctggaaaaggagctgatggggtcttatcctggcctctgagggttcagcggaggtgaggaaggcagcagagctccagcaggtgaagggagagttcatctaggcggggctccccaggcccagggctcaacttcatggccccagctatatccccccagttccacactaaaccagggagggctcggccctcagctactggtacccaatgtgttcctgggagccgagagacccatggtcactccaactccttcctttaggctgtgctcttgcctgtcacaaagaggcaacgtagccactgcctccctatgcaaaaaattaaccagatgatgcagataagacagcataggtgatggctgcttggtcttggccacagtgctctcagccagcactaagggctgaggtcaataccgcagaccttggggaggaagctgagcatcccccgggatgtctccagtcctgacacagtccctcagagatggccctggctctgaggtcacatcagctaggtttgggaggcccctcagcttggtttgggagtgcccgtgttcctggtctctggctgcttctctgactctttgataaccttgggcaagtccctttctttctctgtgcctcagtttccttctcctttgaggggggagagagaacagtgcagccccatttccggtcctgctacctcacctagatgttgtgaggattcatattctctgtccagcgtgttctatgctctcttctgagaaccttgtggggtgtcgggatgggggtgctgggagacacagacctgatacagtatgtctttctgcaccacctcacaattttcctgaaccccaaagggagcagagagataagaggacagaagaatggagatgggaaaatccaccaaattccaacccaaacccaactttctttctccctatgtggaagacaccagattagctggaattctgccaccttcctttgtgccccaccccccactgttccctcatttgcactgctctgtaagcctccccctcacctccattcataacccagtctcaatgccctcgtatcaataagaccggggtaagggggacaggatacttgtcacatatttgaagaaattccatacagtgaaggaaatttgagtctgtattgctgctacaagggtaaaaccaggaccaatgggtaaaagtaacaggcgggcagattttggcttgaggaagagcttctagcacgactggttcatgcgggaatagctgctctggccacctgcaggcagaaagtgggggaagtggctcctggcaggagatttctcccagcactaatatcctggtgttctataaaatctttattgagtgcctaccggtgcaggcgctgggagagacaatagctttgaggagctcacaatctagctgaggagacaagacacatccaatgctgcaaaaatggtgaataacctgattcagggttagcagcaatgagtatcacagcgtccaactcagtagctccagtgtatgaaaatgtctccagggctaaaggctggagatctcaccagtggggaaagtacatctgagtcaggattttgggggaaagctagttactgatagccacaggaagttgagacttctgccccattctctccaatggctgggtgaaaaccaagaattcatcggaagatggctttggcctggaggtagctagggtggtctaggaagctcactcctctcttagtctcagtctttcattctttctgctgagactggcctgaaaggctggcaagtgggagggagtcagtggggaggccaggatagaactagagctggtgtcccaggttccagtctgggctcttcactgacaaagtgggcaacactagaaacttccctttgtctctctgggccttagtttcctcagttacaacctaaggaggttggattggatgcttgctaatttccttctgacactcacactccctaacatcaacacatcttcaaggcggcagagctgtgcgcccacccagctattgaaaaggactttctgtgggcacacactctgtttcagactgggctgggggcacacgtgctgggtgagacagtgggccctcgtcccctcccccctcccaattctctgccccaggctaatattagggactggggaggggaccaccagaggggagagggaagctgcttactttgggggtagaccctgaagcccctcctccttcccccacagatggggacaggaggtgatggggtgctcagaaccctgcagctcccacttctttagccgggcagctgtttgggggacaagagagggccagggtctgtgcttctgctcccggcactggtcagggagtctgggaagagtggagaagaggcagggtcaggcctcagcatctcacatccaccacctccaggaggggagaccactggtaagtcctcctcctgctcaactcaagggactcagaccctttcttgactgagacgcatgagtgccttctggggtgagagcagccccagggtttaagttgggcgtcctagcagctgcagcagctgtgccgccgcgggtccaccgaggacgccaatcaatcaacccaacaccacaagcttggttgggtgcaagcagagggtgagcaggggctgcccctccacctggccaggacccccttcggcacccagttgcccttggccaccacctgtggcaggactcaagctcctcttctgcaaatgttcccagcctccgtgcaagtattcttaactctttacgcctaatgaacaagcacagtttttcaatggtgaagaaaaaagcaccagactttttttctttttttcctaaagaaatcccctaagccccccgcctgtaggcgggacaaacactccctgcgtggggctgtagcaacgtctgtcaggcccccttgtgtttcatctcctgcgcgcgtagagcaaatgctagagcgatttcagctgatagaaaaacaaaaatgaaaaaaaaaacacaaaaaacaaaaaacatggcacgttgctagtttacagggttttgtgagtttaaatgccttatatttaacaatcataatttatgactaacttgtagatatcgtgggttcttatttaattatttttatagttgttttgcatttttaattataatttatttatttagaaaggatactaattttttttattactcctattacctcattttggcgttgtttctgggagtggaatgctttgcatgcattggtacgatgacaaacaactacgaatacaaaaaaaaaatttaaataaaattctgcaaactttatttcgtccgaactatcagggtgtgtgattgcaagctgtcctaccgtggtgctggcctctttggatacattccatacgaaatgcaaacctttgattctgtatgctgtgatctagtgaaaaactccaatatagtgactgtatttagcacatatataaatataatttgcacttgtcagcagactggggtaatcctttcacttgctacacttggcacccccccgcccccaccacaaccctgcctctccatcatgaacctgcctttcctcctccctcgctcctcccacaacctcagcccacccagccggtatcctctgaggaaagtcttggggcactagaggccactgtctccacctggcctccaactccagaattggagccctccagacattacaagaggaacatcagagagccaaaaagcctgacttcttagaaggagccctggactggggagccgggaggctcaggttttcaaatctgctccatgacagacgtcccaatgaccttgagcaagtcccttggcccctgagtctcagttttctgggtggggtgagtgaggagaactgggagatctttagggtcccttagattcaagtagaatgtgacacagatcccgtgggaaaccactgtgctgtgctgtctcaccttctgaggagagaagaaagagggagaaaaggcagggcatggtggctcacgcctgtaatcccagcactttgtgaggccaaggtgggcagatcacttgagatcaggagtttgagaccagcctggccaacatggtgaaaccctgtctctactaaaaatacaaaaattagctgggcgtggtggtaggcgtctgtaatcccagctactcgggaggctgaggcaggagaatggcttgaacccaggagacggaggttgcagtgagctgggagcgtgcaccactgcactctagcctgggtgataagaacaaaactcagtccaaaaaaaaaaaaaaaaaaaaagagggaaagagggagaaaggattgggaggagaaaaggagagcaaagaagaagagaagaatagagagagtgagctgagaatttgagcttgctcagagttgactttcgggagggtttttgtcctataatatgtggcatcctgtgggtgacagggaggtgagttaggtggacacgtataggacgtgccctttcataaggcttgggcagtcatttggcgagtgagctgaaatccatgtcttgttagagatagggatggggtaggcagaaaggagctccaaactatgggtttgggattggcacccctatcctatcatcacccagagtcttcattgttgagatgctgcccatggaaaacagattgggacatagattttggaatcaaggtctctgctcctggcatctcctctgtgcgtctccctctgcctttgctccctggggactgtgggcaggaggagcttcttcggaggaccgggagtgggcctccagtccccctgcccctgtagaggaataatgagggaggacatggggaagtcactgtcaaaggctggcacagctgtgagcccaatgcctctgagcgaaaaggagagagagggagttcacgcccctgagagtagccccctgagccggctgggacctggactgcctgctttcctcctgcctcttcccctttccctccttcacagcttatcctccttcttccctctttacatcactgcctttacctggtggggatgaggccccatggggaaggtgctgatgtggagggaggaagtggagaccgagattcgccatactgcccagggaggctgtgtgagaactgggctgtgtatggtccctaaagcctcaactctgccccagctgggcgatgggtgcccctctctgggcttcctgcctagcttccccttctgcctccagcctggagccttgctttccctggagacaagcccgtggagtcccccaccacactggagggagcacgaccaccacactgctgggcctggcagacaccacatctttggcagggctcctggacgggcatgccttatgctgctctgcagggtcagagtggaaaggggccctttgccctggctggcctgtgccctcacccttgagcccctccccccactccacccctggcctcggatgcggctaatttctcagccatggagccagctgcaccagccctcgagggggtaattttgttgcccctggcaagtgaaaggattatcctcagtgttgattgtccttttttgtaatcctcctgctgttctgttctgttgtgctgtgcaacattttgctacatagactattttatagcagaaagctagaagaatatttattatgaatattaaagcaatagtgcatcaatgaaaaggcggagacattaggaattgtgtaaatgcttagattcacttttggtggattttttgtactttatttataactaataaaaatgaactgcattgctaactaca

SEQ ID NO: 177302 - DNA, 1883 bp, Homo sapiens
  Payload ID: 14791
  Gene Symbol: RNF166
  Gene Name: ring finger protein 166
  Uniprot ID: Q96A37
  ENST ID: ENST00000312838
  CDS Start-End: 97-810
ctacgatgacgtcagcgcggcgcagtagcggctgtgactagcgggccggcccgggccaggacagcgggcggcgggcggcgcgggcctggccccgggatggctatgttccgcagcctggtggcctcggctcagcagcggcagccgccggccgggccggcgggcggcgacagcggcctggaggcgcagtacacctgccccatctgcctggaggtctatcaccggcccgtggccatcggcagctgcggccacacgttctgcggggagtgtctccagccctgcctgcaggtgccatccccgctgtgcccactctgccgcctgcccttcgaccccaagaaggtggacaaggccacccacgtggagaagcagctctcatcctacaaagcgccctgtcgaggctgcaacaaaaaggtgaccctggcaaagatgagagtgcacatttcgtcctgcctgaaggtccaggagcagatggccaactgccccaagttcgtccccgtggtgcccacatcacagcctatccccagcaacatccccaacaggtccaccttcgcctgcccgtactgtggtgcccgcaacctggaccagcaggagctggtgaagcactgtgtggaaagccaccgcagcgaccccaaccgcgtggtgtgccccatctgctcggcaatgccctggggggaccccagctacaagagcgccaacttcctgcagcacctgcttcaccgacacaagttctcctacgacacctttgtggactacagtattgacgaggaggccgccttccaggctgctctggccctgtctctctctgagaactgaagggaagcgcagccacccgcctgcgtctggggtcagggatgtccccgctcctgtgtcgcacctggcacctgctcgggagcgcacctcaccggactgagctcacaggaggagcctgcacccgcgcagaaggggagccggggccgagcctccgggcctgaatacgggccagccgccgaggccgccagagcagggccgcctggtcccaccggcgtcgctgggttcttcggtgcttctggccgagcaggcggcctacttgggcagggctggacgctgggacctggagctgccgccgtctcttcaaagccatgataccccctcgtgggaagaagggaccgacgcgcgagtcgcgctccgcagtcgagccgggaggaacccaggctgctgccctgcccagcccgaccctgccccggccccacttccaccttgcgcatttggtactggcttttgtgatacttaggaaccctggcatcttttctatattatccagtgtgataatcttttcacgttttatagagcaaagacagagcagttactcttcatattgcaatatctgtgtttgactaggaataatagtatttttatggaacatttacaaaattatattttttaagaaaacaatcaaaacaagcattgggggattggggcaaggatggaaggagcagtggggcagctgccagagctcaggcgagccatggggtctgctgtggggtctgccctggccacccactgtgtgtctgggtccttgaggtttgtacgtttctctttgatgaccaggaagaaatcccagcaccccagccacaggctgtggctgctcccagcagaggcggggccggcagagaaggggcctcctccacccagagtcctggccttggcccgctgtcaccttcaaagctgactgtgccccgctgcgggaggggacggcaccccagtggtggcagagcttgggggcctgggcaggggcccgcttggcgggccgggcaacacgtcaacattcttttctgttcttggcattaattattgctgtcttttttttaaaaaaaaaagtttaaataaaatgtctcagagcatctcta

SEQ ID NO: 177303 - DNA, 2419 bp, Homo sapiens
  Payload ID: 14791
  Gene Symbol: RNF166
  Gene Name: ring finger protein 166
  Uniprot ID: Q96A37
  ENST ID: ENST00000541206
  CDS Start-End: 1001-1387
actcccggctgctggctctctgaacaccaggctggcagtcactggaaactaggccgatagagcacccaccctgtgggtgcctcgttctgcctcctgctcctcgggcccagccgccctgccagtcgggctgggttccctcttgtgtctttcctgagtccttccggggaggacgaggctgtcttcctcccagccaaccttctgggcacctttcctctcttcccaagctctgcctgggacccttttccttcccctcagcccgtggccgtgctgtgcagccgagccccggcctggtctctggcagctcagggttcactcaggaggtgcaccatccagtcgtttccagtgtgtttgcaattatgcaacaatcgatgcaattctagaagattcttcccactccagaaagaaacccaggactctccccctcgcctggcacccacccgtctgctttctggtcactgggtttctctctgctggacgttgagcgtgagtggacccccacgacacgggtgggacgtgcttgctgtctgccctgcactgttttccaggccttccggtgcgtggtggggctgcacgcctcttcccggccgaacgccctttccatgggtgtgcacgccacgccgtctcttcatccgtttaccgacgggcacctgagctgcttccgcttctcctgccatgagtgcctgagtatgggggtcccctgaggcctccccaggtggaccatcttgccagcaccttcctcccgtgaacgggtgaagtaggcggcccccccggctcaaatccaggggtcagtgccagggatgaccctggaaatatctgctggggcgcctggttctgcggggagtgtctccagccctgcctgcaggtgccatccccgctgtgcccactctgccgcctgcccttcgaccccaagaaggtggacaaggccacccacgtggagaagcagctctcatcctacaaagcgccctgtcgaggctgcaacaaaaaggtgaccctggcaaagatgagagtgcacatttcgtcctgcctgaaggtccaggagcagatggccaactgccccaagttcgtccccgtggtgcccacatcacagcctatccccagcaacatccccaacaggtccaccttcgcctgcccgtactgtggtgcccgcaacctggaccagcaggagctggtgaagcactgtgtggaaagccaccgcagcgaccccaaccgcgtggtgtgccccatctgctcggcaatgccctggggggaccccagctacaagagcgccaacttcctgcagcacctgcttcaccgacacaagttctcctacgacacctttgtggactacagtattgacgaggaggccgccttccaggctgctctggccctgtctctctctgagaactgaagggaagcgcagccacccgcctgcgtctggggtcagggatgtccccgctcctgtgtcgcacctggcacctgctcgggagcgcacctcaccggactgagctcacaggaggagcctgcacccgcgcagaaggggagccggggccgagcctccgggcctgaatacgggccagccgccgaggccgccagagcagggccgcctggtcccaccggcgtcgctgggttcttcggtgcttctggccgagcaggcggcctacttgggcagggctggacgctgggacctggagctgccgccgtctcttcaaagccatgataccccctcgtgggaagaagggaccgacgcgcgagtcgcgctccgcagtcgagccgggaggaacccaggctgctgccctgcccagcccgaccctgccccggccccacttccaccttgcgcatttggtactggcttttgtgatacttaggaaccctggcatcttttctatattatccagtgtgataatcttttcacgttttatagagcaaagacagagcagttactcttcatattgcaatatctgtgtttgactaggaataatagtatttttatggaacatttacaaaattatattttttaagaaaacaatcaaaacaagcattgggggattggggcaaggatggaaggagcagtggggcagctgccagagctcaggcgagccatggggtctgctgtggggtctgccctggccacccactgtgtgtctgggtccttgaggtttgtacgtttctctttgatgaccaggaagaaatcccagcaccccagccacaggctgtggctgctcccagcagaggcggggccggcagagaaggggcctcctccacccagagtcctggccttggcccgctgtcaccttcaaagctgactgtgccccgctgcgggaggggacggcaccccagtggtggcagagcttgggggcctgggcaggggcccgcttggcgggccgggcaacacgtcaacattcttttctgttcttggcattaattattgctgtcttttttt

SEQ ID NO: 177304 - DNA, 1525 bp, Homo sapiens
  Payload ID: 14791
  Gene Symbol: RNF166
  Gene Name: ring finger protein 166
  Uniprot ID: Q96A37
  ENST ID: ENST00000537718
  CDS Start-End: 73-459
gcgtttcccgacgttgccacatctcaggtgaataagttctatgaagcgctcacactagtgaccctggcaaagatgagagtgcacatttcgtcctgcctgaaggtccaggagcagatggccaactgccccaagttcgtccccgtggtgcccacatcacagcctatccccagcaacatccccaacaggtccaccttcgcctgcccgtactgtggtgcccgcaacctggaccagcaggagctggtgaagcactgtgtggaaagccaccgcagcgaccccaaccgcgtggtgtgccccatctgctcggcaatgccctggggggaccccagctacaagagcgccaacttcctgcagcacctgcttcaccgacacaagttctcctacgacacctttgtggactacagtattgacgaggaggccgccttccaggctgctctggccctgtctctctctgagaactgaagggaagcgcagccacccgcctgcgtctggggtcagggatgtccccgctcctgtgtcgcacctggcacctgctcgggagcgcacctcaccggactgagctcacaggaggagcctgcacccgcgcagaaggggagccggggccgagcctccgggcctgaatacgggccagccgccgaggccgccagagcagggccgcctggtcccaccggcgtcgctgggttcttcggtgcttctggccgagcaggcggcctacttgggcagggctggacgctgggacctggagctgccgccgtctcttcaaagccatgataccccctcgtgggaagaagggaccgacgcgcgagtcgcgctccgcagtcgagccgggaggaacccaggctgctgccctgcccagcccgaccctgccccggccccacttccaccttgcgcatttggtactggcttttgtgatacttaggaaccctggcatcttttctatattatccagtgtgataatcttttcacgttttatagagcaaagacagagcagttactcttcatattgcaatatctgtgtttgactaggaataatagtatttttatggaacatttacaaaattatattttttaagaaaacaatcaaaacaagcattgggggattggggcaaggatggaaggagcagtggggcagctgccagagctcaggcgagccatggggtctgctgtggggtctgccctggccacccactgtgtgtctgggtccttgaggtttgtacgtttctctttgatgaccaggaagaaatcccagcaccccagccacaggctgtggctgctcccagcagaggcggggccggcagagaaggggcctcctccacccagagtcctggccttggcccgctgtcaccttcaaagctgactgtgccccgctgcgggaggggacggcaccccagtggtggcagagcttgggggcctgggcaggggcccgcttggcgggccgggcaacacgtcaacattcttttctgttcttggcattaattattgctgtcttttttttaaaaaaaaaagtttaaataaaatgtctcagagc

SEQ ID NO: 177305 - DNA, 502 bp, Homo sapiens
  Payload ID: 14791
  Gene Symbol: RNF166
  Gene Name: ring finger protein 166
  ENST ID: ENST00000562544
  CDS Start-End: 1-447
ggcggcgacagcggcctggaggcgcagtacacctgccccatctgcctggaggtctatcaccggcccgtggccatcggcagctgcggccacacgttctgcggggagtgtctccagccctgcctgcaggtgccatccccgctgtgcccactctgccgcctgcccttcgaccccaagaaggtggacaaggccacccacgtggagaagcagctctcatcctacaaagcgccctgtcgaggctgcaacaaaaaggtgaccctggcaaagatgagagtgcacatttcgtcctgcctgaaggtccaggagcagatggccaactgccccaagttcgtccccgtggtgcccacatcacagcctatccccagtggtggcagagcttgggggcctgggcaggggcccgcttggcgggccgggcaacacgtcaacattcttttctgttcttggcattaattattgctgtcttttttttaaaaaaaaaagtttaaataaaatgtctcagagcatc

SEQ ID NO: 177306 - DNA, 313 bp, Homo sapiens
  Payload ID: 14791
  Gene Symbol: RNF166
  Gene Name: ring finger protein 166
  ENST ID: ENST00000567408
  CDS Start-End: 1-139
catttcgtcctgcctgaaggtccaggagcagatggccaactgccccaagttcgtccccgtggtgcccacatcacagcctatccccagcaacatccccaacagagtcctggccttggcccgctgtcaccttcaaagctgactgtgccccgctgcgggaggggacggcaccccagtggtggcagagcttgggggcctgggcaggggcccgcttggcgggccgggcaacacgtcaacattcttttctgttcttggcattaattattgctgtcttttttttaaaaaaaaaagtttaaataaaatgtctcagagcatc

SEQ ID NO: 177307 - DNA, 633 bp, Homo sapiens
  Payload ID: 14791
  Gene Symbol: RNF166
  Gene Name: ring finger protein 166
  Uniprot ID: Q96A37
  ENST ID: ENST00000567844
  CDS Start-End: 74-544
agtagcggctgtgactagcgggccggcccgggccaggacagcgggcggcgggcggcgcgggcctggccccgggatggctatgttccgcagcctggtggcctcggctcagcagcggcagccgccggccgggccggcgggcggcgacagcggcctggaggcgcagtacacctgccccatctgcctggaggtccaggagcagatggccaactgccccaagttcgtccccgtggtgcccacatcacagcctatccccagcaacatccccaacaggtccaccttcgcctgcccgtactgtggtgcccgcaacctggaccagcaggagctggtgaagcactgtgtggaaagccaccgcagcgaccccaaccgcgtggtgtgccccatctgctcggcaatgccctggggggaccccagctacaagagcgccaacttcctgcagcacctgcttcaccgacacaagttctcctacgacacctttgtggactacagtattgacgaggaggccgccttccaggctgctctggccctgtctctctctgagaactgaagggaagcgcagccacccgcctgcgtctggggtcagggatgtccccgctcctgtgtcgcacctggcacctgctcgggagcgcacctcac

SEQ ID NO: 177308 - DNA, 1768 bp, Homo sapiens
  Payload ID: 14791
  Gene Symbol: RNF166
  Gene Name: ring finger protein 166
  ENST ID: ENST00000568683
  CDS Start-End: 340-837
acttggcctcttcctttttctggagcaagtatttgaactcctgcaggcgccagagatctccttacctgtttcccgctacccttctccagccaggtttctgccctcggccagattgtcctgcagtgacttgcttttggccatggagtagtggctgctcagtgcctgagattgttttagcagcagaagggaccgggtccccctgctgctggcaacacagacgcttgcttacagttctctggtcctggacacctgaggtctcggcctccccaggacggcccttccagattctcaggaccgccttgccctccctgccctgtctcctaggtgaccctggcaaagatgagagtgcacatttcgtcctgcctgaaggtccaggagcagatggccaactgccccaagttcgtccccgtggtgcccacatcacagcctatccccagcaacatccccaacaggtccaccttcgcctgcccgtactgtggtgcccgcaacctggaccagcaggagctggtgaagcactgtgtggaaagccaccgcagcgaccccaaccgcgtggtgtgccccatctgctcggcaatgccctggggggaccccagctacaagagcgccaacttcctgcagcacctgcttcaccgacacaagttctcctacgacacctttgtggtaggcatcccgccagcaccgtcctcccccacgccctcctcatccaccctcctcctgctcgggcccctcgccagcctcagggtccgcagggttcagaggaagccagaaacagaagcctcgtttcaggtggccacattcccccaggttctgtgggggctgcctgcaggtggggagtgatggcagctgagtttgagtggccactagagggtgcccaggcctctcggggacatggaccgcacagggcaggtccctgcctgcccaccccacagaacccctcgagggtgagccaggcttccttctggaagctttctagagagcgcgggaaggactttcatcaacatcgaacactccagccctgtctccttttcccacccgccgcgggtcaggcacacacctggcccccgggcctgcagaccctcgcacaaactcctcactcctggtgcggcccctccctgcgccgccctgttcattcctggccctggctaacagtcctggcgatggctgtcactccctctgccagtcgtccgggacccacgctccgcctgcctcaggatggaaattgttagaggtcagggagccctggccggcctgctcacctcggaaaccccgggcttagagtccgacctgaaccagcagccatccattccgagtgcccccgtacccagcgggtgatggacacaccttcaccttctcaccccccagaggaccgtgcaggccccgagcctgtggggacagtggagctgggtccttcctgtgtcctgctggagggaggcaggaagggtggacacgcctgtgtgggtgatgggcagaggggacctctccttcctgtctccctcgagcccggtgcatctctccttcctgtctccaggactacagtattgacgaggaggccgccttccaggctgctctggccctgtctctctctgagaactgaagggaagcgcagccacccgcctgcgtctggggtcagggatgtccccgctcctgtgtcgcacctggcacctgctcgggagcgcacctcaccggactgagctcacaggaggagcctgcacccgcgcagaaggggagccggggccgagcctccgggcctgaatacgggccagccgcc

SEQ ID NO: 177309 - DNA, 1915 bp, Homo sapiens
  Payload ID: 14792
  Gene Symbol: RNF167
  Gene Name: ring finger protein 167
  Uniprot ID: Q9H6Y7
  ENST ID: ENST00000262482
  CDS Start-End: 657-1709
aggggcgtaactgatttggaaaccagaggaaaggcgctgttttcaccgaattagaatcgcgggaaaatagagaagagtttgtttgaaggtctcgcgagatcgagtgagtacggctcgccaagttggagcgctctcgcgatagacacagcaactattcagctgcgaggggacgggagaggtggtgagcactctcgcgagatttgaaggagcggcggaggccagagggaggagaggaccggaagtccttcatctcaagcatccaatgctgaaagcggcctgattttctctaccggaagcccttttccagaggctgggaacacggcccacctagcaggaagtcccacctccttgagctccgccacccttcccgaagtttttctgtcacctgtgttaggctccgtcccctttccgcgttttatccccgtaccagaaaaggatacatttagtgcctcccacccagctccactaaacgggttggatatctcattctttgagttggtgttccttccccggcgcccccatgtagctgggaagtgggacctgggggtggttggacccctgggatcctaaaggaggggcagggagggcgcagaactccgcttctgctccttgctaccaggacgcgcggcctcctcagcctctttcctcccgctgccatgcaccctgcagccttcccgcttcctgtggttgtggccgctgtgctgtggggagcggccccgacccgggggctcattcgagcgacctcggaccacaatgccagcatggactttgcagaccttccagctctgtttggggctaccttgagccaggagggcctccaggggttccttgtggaggctcacccagacaatgcctgcagccccattgccccaccacccccagccccggtcaatgggtcagtctttattgcgctgcttcgaagattcgactgcaactttgacctcaaggtcctaaatgcccagaaggctggatatggtgccgctgtagtacacaatgtgaattccaatgaacttctgaacatggtgtggaatagtgaggaaatccagcagcagatctggatcccgtctgtatttattggggagagaagctccgagtacctgcgtgccctctttgtctacgagaagggggctcgggtgcttctggttccagacaataccttccccttgggctattacctcatccctttcacagggattgtgggactgctggttttggccatgggagcagtaatgatagctcgttgtatccagcaccggaaacggctccagcggaatcgacttaccaaagagcaactgaaacagattcctacacatgactatcagaagggagaccagtatgatgtctgtgccatttgcctggatgaatatgaggatggggacaagctgcgggtactcccctgtgctcatgcctaccacagccgctgcgtggacccctggctcactcagacccggaagacctgccccatttgcaagcagcctgttcatcggggtcctggggacgaagaccaagaggaagaaactcaagggcaagaggagggtgatgaaggggagccaagggaccaccctgcctcagaaaggaccccacttttgggttctagccccactcttcccacctcctttggttccttagccccagctccccttgtttttcctgggccttcaacagatcccccactgtcccctccctcttcccctgttatcctggtctaataaccccccacacatacacctctggtgacctatttgcacagaccgtcgtcttccctccagtcttctgagggataggggacattccatcccaagcttctcccttacccacacctatccttttgaggggctttggggtggagctggggcaagcagagggactgggtcttcacttcttgggctaataaaattgtttctttgtggactaa

SEQ ID NO: 177310 - DNA, 1436 bp, Homo sapiens
  Payload ID: 14792
  Gene Symbol: RNF167
  Gene Name: ring finger protein 167
  ENST ID: ENST00000576229
  CDS Start-End: 333-1280
gaccggaagtccttcatctcaagcatccaatgctgaaagcggcctgattttctctaccggaagcccttttccagaggctgggaacacggcccacctagcaggaagtcccacctccttgagctccgccacccttcccgaagtttttctgtcacctgtgttaggctccgtcccctttccgcgttttatccccgtaccagaaaaggatacatttagtgcctcccacccagctccactaaacggccttcccgcttcctgtggttgtggccgctgtgctgtggggagcggccccgacccgggggctcattcgagcgacctcggaccacaatgccagcatggactttgcagaccttccagctctgtttggggctaccttgagccaggagggcctccaggggttccttgtggaggctcacccagacaatgcctgcagccccattgccccaccacccccagccccggtcaatgggtcagtctttattgcgctgcttcgaagattcgactgcaactttgacctcaaggtcctaaatgcccagaaggctggatatggtgccgctgtagtacacaatgtgaattccaatgaacttctgaacatggtgtggaatagtgaggaaatccagcagcagatctggatcccgtctgtatttattggggagagaagctccgagtacctgcgtgccctctttgtctacgagaagggggctcgggtgcttctggttccagacaataccttccccttgggctattacctcatccctttcacagggattgtgggactgctggttttggccatgggagcagtaatgatagctcgttgtatccagcaccggaaacggctccagcggaatcgacttaccaaagagcaactgaaacagattcctacacatgactatcagaagggagaccagtatgatgtctgtgccatttgcctggatgaatatgaggatggggacaagctgcgggtactcccctgtgctcatgcctaccacagccgctgcgtggacccctggctcactcagacccggaagacctgccccatttgcaagcagcctgttcatcggggtcctggggacgaagaccaagaggaagaaactcaagggcaagaggagggtgatgaaggggagccaagggaccaccctgcctcagaaaggaccccacttttgggttctagccccactcttcccacctcctttggttccttagccccagctccccttgtttttcctgggccttcaacagatcccccactgtcccctccctcttcccctgttatcctggtctaataaccccccacacatacacctctggtgacctatttgcacagaccgtcgtcttccctccagtcttctgagggataggggacattccatcccaagcttctcccttacccacacctatccttttgaggggctttggggtggagctggggcaagcagagg

SEQ ID NO: 177311 - DNA, 589 bp, Homo sapiens
  Payload ID: 14792
  Gene Symbol: RNF167
  Gene Name: ring finger protein 167
  ENST ID: ENST00000576452
  CDS Start-End: 299-589
aggaggagcttgatggaagcgtgcgagaaggggcgtaactgatttggaaaccagaggaaaggcgctgttttcaccgaattagaatcgcgggaaaatagagaagagtttgtttgaaggtctcgcgagatcgagtgagtacggctcgccaagttggagcgctctcgcgatagacacagcaactattcagctgcgaggggacgggagaggtggtgagcactctcgcgagatttgaaggagcggcggaggccagagggaggagaggacgcgcggcctcctcagcctctttcctcccgctgccatgcaccctgcagccttcccgcttcctgtggttgtggccgctgtgctgtggggagcggccccgacccgggggctcattcgagcgacctcggaccacaatgccagcatggactttgcagaccttccagctctgtttggggctaccttgagccaggagggcctccaggggttccttgtggaggctcacccagacaatgcctgcagccccattgccccaccacccccagccccggtcaatgggtcagtctttattgcgctgcttcgaagattcgactgcaactttgacctcaag

SEQ ID NO: 177312 - DNA, 1511 bp, Homo sapiens
  Payload ID: 14792
  Gene Symbol: RNF167
  Gene Name: ring finger protein 167
  Uniprot ID: Q9H6Y7
  ENST ID: ENST00000572430
  CDS Start-End: 305-1357
gtgcgagaaggggcgtaactgatttggaaaccagaggaaaggcgctgttttcaccgaattagaatcgcgggaaaatagagaagagtttgtttgaaggtctcgcgagatcgagaccggaagtccttcatctcaagcatccaatgctgaaagcggcctgattttctctaccggaagcccttttccagaggctgggaacacggcccacctagcaggaagtcccacctccttgagctccgccacccttcccgaagtttttctgtcacctgtgacgcgcggcctcctcagcctctttcctcccgctgccatgcaccctgcagccttcccgcttcctgtggttgtggccgctgtgctgtggggagcggccccgacccgggggctcattcgagcgacctcggaccacaatgccagcatggactttgcagaccttccagctctgtttggggctaccttgagccaggagggcctccaggggttccttgtggaggctcacccagacaatgcctgcagccccattgccccaccacccccagccccggtcaatgggtcagtctttattgcgctgcttcgaagattcgactgcaactttgacctcaaggtcctaaatgcccagaaggctggatatggtgccgctgtagtacacaatgtgaattccaatgaacttctgaacatggtgtggaatagtgaggaaatccagcagcagatctggatcccgtctgtatttattggggagagaagctccgagtacctgcgtgccctctttgtctacgagaagggggctcgggtgcttctggttccagacaataccttccccttgggctattacctcatccctttcacagggattgtgggactgctggttttggccatgggagcagtaatgatagctcgttgtatccagcaccggaaacggctccagcggaatcgacttaccaaagagcaactgaaacagattcctacacatgactatcagaagggagaccagtatgatgtctgtgccatttgcctggatgaatatgaggatggggacaagctgcgggtactcccctgtgctcatgcctaccacagccgctgcgtggacccctggctcactcagacccggaagacctgccccatttgcaagcagcctgttcatcggggtcctggggacgaagaccaagaggaagaaactcaagggcaagaggagggtgatgaaggggagccaagggaccaccctgcctcagaaaggaccccacttttgggttctagccccactcttcccacctcctttggttccttagccccagctccccttgtttttcctgggccttcaacagatcccccactgtcccctccctcttcccctgttatcctggtctaataaccccccacacatacacctctggtgacctatttgcacagaccgtcgtcttccctccagtcttctgagggataggggacattccatcccaagcttctcccttacccacacctatccttttgaggggctttggggtggagctggggcaagcaga

SEQ ID NO: 177313 - DNA, 298 bp, Homo sapiens
  Payload ID: 14792
  Gene Symbol: RNF167
  Gene Name: ring finger protein 167
  ENST ID: ENST00000570328
  CDS Start-End: 84-298
gggagaggtggtgagcactctcgcgagatttgaaggagcggcggaggccagagggaggagagacctcggaccacaatgccagcatggactttgcagaccttccagctctgtttggggctaccttgagccaggagggcctccaggggttccttgtggaggctcacccagacaatgcctgcagccccattgccccaccacccccagccccggtcaatgggtcagtctttattgcgctgcttcgaagattcgactgcaactttgacctcaaggtcctaaatgcccagaaggctggatatgg

SEQ ID NO: 177314 - DNA, 1728 bp, Homo sapiens
  Payload ID: 14792
  Gene Symbol: RNF167
  Gene Name: ring finger protein 167
  Uniprot ID: Q9H6Y7
  ENST ID: ENST00000571816
  CDS Start-End: 501-1553
cgcccctccagctctcaggtccgacacccgctggaagccggcgcgggcgcaggcgcgcagcgcaaaggcggccgggagtaaggcggagctgaaggaggagcttgatggaagcgtgcgagaaggggcgtaactgatttggaaaccagaggaaaggcgctgttttcaccgaattagaatcgcgggaaaatagagaagagtttgtttgaaggtctcgcgagatcgagaccggaagtccttcatctcaagcatccaatgctgaaagcggcctgattttctctaccggaagcccttttccagaggctgggaacacggcccacctagcaggaagtcccacctccttgagctccgccacccttcccgaagtttttctgtcacctgtgttaggctccgtcccctttccgcgttttatccccgtaccagaaaaggatacatttagtgcctcccacccagctccactaaacgggacgcgcggcctcctcagcctctttcctcccgctgccatgcaccctgcagccttcccgcttcctgtggttgtggccgctgtgctgtggggagcggccccgacccgggggctcattcgagcgacctcggaccacaatgccagcatggactttgcagaccttccagctctgtttggggctaccttgagccaggagggcctccaggggttccttgtggaggctcacccagacaatgcctgcagccccattgccccaccacccccagccccggtcaatgggtcagtctttattgcgctgcttcgaagattcgactgcaactttgacctcaaggtcctaaatgcccagaaggctggatatggtgccgctgtagtacacaatgtgaattccaatgaacttctgaacatggtgtggaatagtgaggaaatccagcagcagatctggatcccgtctgtatttattggggagagaagctccgagtacctgcgtgccctctttgtctacgagaagggggctcgggtgcttctggttccagacaataccttccccttgggctattacctcatccctttcacagggattgtgggactgctggttttggccatgggagcagtaatgatagctcgttgtatccagcaccggaaacggctccagcggaatcgacttaccaaagagcaactgaaacagattcctacacatgactatcagaagggagaccagtatgatgtctgtgccatttgcctggatgaatatgaggatggggacaagctgcgggtactcccctgtgctcatgcctaccacagccgctgcgtggacccctggctcactcagacccggaagacctgccccatttgcaagcagcctgttcatcggggtcctggggacgaagaccaagaggaagaaactcaagggcaagaggagggtgatgaaggggagccaagggaccaccctgcctcagaaaggaccccacttttgggttctagccccactcttcccacctcctttggttccttagccccagctccccttgtttttcctgggccttcaacagatcccccactgtcccctccctcttcccctgttatcctggtctaataaccccccacacatacacctctggtgacctatttgcacagaccgtcgtcttccctccagtcttctgagggataggggacattccatcccaagcttctcccttacccacacctatccttttgaggggctttggggtggagctggggcaagcagagggactgggtcttcacttctt

SEQ ID NO: 177315 - DNA, 552 bp, Homo sapiens
  Payload ID: 14792
  Gene Symbol: RNF167
  Gene Name: ring finger protein 167
  ENST ID: ENST00000573404
  CDS Start-End: 186-552
gagtaaggcggagctgaaggaggagcttgatggaagcgtgcgagaaggggcgtaactgatttggaaaccagaggaaaggcgctgttttcaccgaattagaatcgcgggaaaatagagaagagtttgtttgaaggtctcgcgagatcgagacgcgcggcctcctcagcctctttcctcccgctgccatgcaccctgcagccttcccgcttcctgtggttgtggccgctgtgctgtggggagcggccccgacccgggggctcattcgagcgacctcggaccacaatgccagcatggactttgcagaccttccagctctgtttggggctaccttgagccaggagggcctccaggggttccttgtggaggctcacccagacaatgcctgcagccccattgccccaccacccccagccccggtcaatgggtcagtctttattgcgctgcttcgaagattcgactgcaactttgacctcaaggtcctaaatgcccagaaggctggatatggtgccgctgtagtacacaatgtgaattccaatgaacttctgaacatgg

SEQ ID NO: 177316 - DNA, 989 bp, Homo sapiens
  Payload ID: 14792
  Gene Symbol: RNF167
  Gene Name: ring finger protein 167
  ENST ID: ENST00000572382
  CDS Start-End: 1-627
cacaatgtgaattccaatgaacttctgaacatggtgtggaatagtgaggaaatccagcagcagatctggatcccgtctgtatttattggggagagaagctccgagtacctgcgtgccctctttgtctacgagaagggggctcgggtgcttctggttccagacaataccttccccttgggctattacctcatccctttcacagggattgtgggactgctggttttggccatgggagcagtaatgatagctcgttgtatccagcaccggaaacggctccagcggaatcgacttaccaaagagcaactgaaacagattcctacacatgactatcagaagggagaccagtatgatgtctgtgccatttgcctggatgaatatgaggatggggacaagctgcgggtactcccctgtgctcatggtgaggccctcactgcctgcccatgcccctctgccaccagcagccaccaggtgcttcaccttgttcctctctgcagcctaccacagccgctgcgtggacccctggctcactcagacccggaagacctgccccatttgcaagcagcctgttcatcggggtcctggggacgaagaccaagaggaagaaactcaagggcaagaggagggtgatgaaggggagccaagggaccaccctgcctcagaaaggaccccacttttgggttctagccccactcttcccacctcctttggttccttagccccagctccccttgtttttcctgggccttcaacagatcccccactgtcccctccctcttcccctgttatcctggtctaataaccccccacacatacacctctggtgacctatttgcacagaccgtcgtcttccctccagtcttctgagggataggggacattccatcccaagcttctcccttacccacacctatccttttgaggggctttggggtggagctggggcaagcagagggactgggtcttcacttcttgggctaataaaattgttt

SEQ ID NO: 177317 - DNA, 1757 bp, Homo sapiens
  Payload ID: 14792
  Gene Symbol: RNF167
  Gene Name: ring finger protein 167
  Uniprot ID: Q9H6Y7
  ENST ID: ENST00000575111
  CDS Start-End: 530-1582
cgggtttccgggcacttttattaggtcgtcttctgggccaccagtgccccttccatctccacaggcagtccctccatcgctaacctttttttaaccggccttttaggaccggaagtccttcatctcaagcatccaatgctgaaagcggcctgattttctctaccggaagcccttttccagaggctgggaacacggcccacctagcaggaagtcccacctccttgagctccgccacccttcccgaagtttttctgtcacctgtgttaggctccgtcccctttccgcgttttatccccgtaccagaaaaggatacatttagtgcctcccacccagctccactaaacgggttggatatctcattctttgagttggtgttccttccccggcgcccccatgtagctgggaagtgggacctgggggtggttggacccctgggatcctaaaggaggggcagggagggcgcagaactccgcttctgctccttgctaccaggacgcgcggcctcctcagcctctttcctcccgctgccatgcaccctgcagccttcccgcttcctgtggttgtggccgctgtgctgtggggagcggccccgacccgggggctcattcgagcgacctcggaccacaatgccagcatggactttgcagaccttccagctctgtttggggctaccttgagccaggagggcctccaggggttccttgtggaggctcacccagacaatgcctgcagccccattgccccaccacccccagccccggtcaatgggtcagtctttattgcgctgcttcgaagattcgactgcaactttgacctcaaggtcctaaatgcccagaaggctggatatggtgccgctgtagtacacaatgtgaattccaatgaacttctgaacatggtgtggaatagtgaggaaatccagcagcagatctggatcccgtctgtatttattggggagagaagctccgagtacctgcgtgccctctttgtctacgagaagggggctcgggtgcttctggttccagacaataccttccccttgggctattacctcatccctttcacagggattgtgggactgctggttttggccatgggagcagtaatgatagctcgttgtatccagcaccggaaacggctccagcggaatcgacttaccaaagagcaactgaaacagattcctacacatgactatcagaagggagaccagtatgatgtctgtgccatttgcctggatgaatatgaggatggggacaagctgcgggtactcccctgtgctcatgcctaccacagccgctgcgtggacccctggctcactcagacccggaagacctgccccatttgcaagcagcctgttcatcggggtcctggggacgaagaccaagaggaagaaactcaagggcaagaggagggtgatgaaggggagccaagggaccaccctgcctcagaaaggaccccacttttgggttctagccccactcttcccacctcctttggttccttagccccagctccccttgtttttcctgggccttcaacagatcccccactgtcccctccctcttcccctgttatcctggtctaataaccccccacacatacacctctggtgacctatttgcacagaccgtcgtcttccctccagtcttctgagggataggggacattccatcccaagcttctcccttacccacacctatccttttgaggggctttggggtggagctggggcaagcagagggactgggtcttcacttctt

SEQ ID NO: 177318 - DNA, 858 bp, Homo sapiens
  Payload ID: 14792
  Gene Symbol: RNF167
  Gene Name: ring finger protein 167
  ENST ID: ENST00000575400
  CDS Start-End: 252-653
tttccgcgttttatccccgtaccagaaaaggatacatttagtgcctcccacccagctccactaaacgggttggatatctcattctttgagttggtgttccttccccggcgcccccatgtagctgggaagtgggacctgggggtggttggacccctgggatcctaaaggaggggcagggagggcgcagaactccgcttctgctccttgctaccaggacgcgcggcctcctcagcctctttcctcccgctgccatgcaccctgcagccttcccgcttcctgtggttgtggccgctgtgctgtggggagcggccccgacccgggggctcattcgagcggggttccttgtggaggctcacccagacaatgcctgcagccccattgccccaccacccccagccccggtcaatgggtcagtctttattgcgctgcttcgaagattcgactgcaactttgacctcaaggtcctaaatgcccagaaggctggatatggtgccgctgtagtacacaatgtgaattccaatgaacttctgaacatggtgtggaatagtgaggaaatccagcagcagatctggatcccgtctgtatttattggggagagaagctccgagtacctgcgtgccctctttgtctacgagaaggggagaccagtatgatgtctgtgccatttgcctggatgaatatgaggatggggacaagctgcgggtactcccctgtgctcatgcctaccacagccgctgcgtggacccctggctcactcagacccggaagacctgccccatttgcaagcagcctgttcatcggggtcctggggacgaagaccaagaggaagaaactcaagggcaagaggagggtgatgaa

SEQ ID NO: 177319 - DNA, 599 bp, Homo sapiens
  Payload ID: 14792
  Gene Symbol: RNF167
  Gene Name: ring finger protein 167
  ENST ID: ENST00000576965
  CDS Start-End: 1-224
aggaaatccagcagcagatctggatcccgtctgtatttattggggagagaagctccgagtacctgcgtgccctctttgtctacgagaagggcctaccacagccgctgcgtggacccctggctcactcagacccggaagacctgccccatttgcaagcagcctgttcatcggggtcctggggacgaagaccaagaggaagaaactcaagggcaagaggagggtgatgaaggggagccaagggaccaccctgcctcagaaaggaccccacttttgggttctagccccactcttcccacctcctttggttccttagccccagctccccttgtttttcctgggccttcaacagatcccccactgtcccctccctcttcccctgttatcctggtctaataaccccccacacatacacctctggtgacctatttgcacagaccgtcgtcttccctccagtcttctgagggataggggacattccatcccaagcttctcccttacccacacctatccttttgaggggctttggggtggagctggggcaagcagagggactgggtcttcacttcttgggctaataaaattgtttctttgtggactaa

SEQ ID NO: 177320 - DNA, 5347 bp, Homo sapiens
  Payload ID: 14793
  Gene Symbol: RNF168
  Gene Name: ring finger protein 168, E3 ubiquitin protein ligase
  Uniprot ID: Q8IYW5
  ENST ID: ENST00000318037
  CDS Start-End: 596-2311
gcttgtccggtggctgctgcgctgccgcaacgaatagggtttctggctgcgtaggagggacgggggcgcggagctctgggaaactgcgccaggcgcccgaaaggtgaacacgggagtcgcgcgtctcccccgcagcagcggtaaagcggaagttatgctgcagccggagcccgggcttcctcccggagccgcgtcccggggcccggctgccccgagctgagcggagcatcctttccgggtgaggggaggagaggacttggcgcgttcccctcgctgccccgggagccgcagccgcggtgttcatgccgcggagcagccaggctcctccgacgaaaacctgcatttatttgctggcgggacgtttgccttgaaaatggacaaagacgccgccctccggggtattcctgtttgcctgaccctgagagcgcctttttgcttcaagacgtgttggatgctcctgttctccgaattctgatacgcttctgggcataatactgaaacacaaaactgcttttgctctctctgtggttggccgaaaataggattctttttcgtgcaggtgtcgttgtttagtcggctttactaacatattgaaatggctctacccaaagacgccatcccctcgctgtccgagtgccagtgcgggatctgcatggaaatcctcgtggagcccgtcaccctcccgtgtaaccacacgctgtgtaaaccgtgcttccagtcgaccgtcgaaaaggcgagtttatgctgtcccttctgtcgccgccgggtatcgtcgtggactcggtaccatacccgaagaaattctctcgtcaacgtggaactgtggacgataattcaaaaacactatcccagggagtgcaagcttagagcgtctggccaagaatcagaggaagtggctgatgactatcagccagttcgtctgctcagtaaacctggggaactgagaagagaatatgaagaggaaataagcaaggtggcggcagagcgacgggccagcgaggaagaagaaaacaaagccagtgaagaatacatacagaggttgttggcagaggaggaagaagaggaaaaaagacaggcagaaaaaaggcgaagagcgatggaagaacaactgaaaagtgatgaggaactggcaagaaagctaagcattgatattaacaatttctgtgagggaagtatctcggcttctcccttgaattccagaaaatctgatccagttacacccaagtctgaaaagaaaagtaagaacaaacaaagaaacactggagatattcagaagtatttgacaccgaaatctcagtttgggtcagcctcacactctgaagctgtacaagaagtcaggaaagactccgtatctaaggacattgacagtagtgataggaaaagcccaacagggcaagacacagaaatagaagatatgccgacactttctccacagatatcccttggagttggagaacaaggtgcagattcttcaatagagtcccctatgccatggttatgtgcctgtggtgccgaatggtaccatgaaggaaacgtcaaaacaagaccaagcaatcatgggaaagagttatgtgtcttaagtcacgagcgacctaaaaccagagttccctactcgaaagaaactgcagttatgccttgtggcagaacagaaagtgggtgcgcccccacatcaggggtgacacagacaaatggaaacaacacaggtgagacagaaaatgaagagtcgtgcctactgatcagtaaggagatttccaaaagaaaaaaccaagaatcttcctttgaagcagtcaaggatccatgcttttctgcaaaaagaagaaaagtgtcccccgaatcttccccagatcaagaggaaacagaaataaactttacccaaaaactgatagatttggagcatctactgtttgagagacataaacaagaagaacaggacaggttattggcattacaacttcagaaggaggtggataaagagcaaatggtgccaaaccggcaaaaaggatccccagatgagtatcacttacgcgctacatcctcccctccagacaaagtgctaaatggacagaggaagaatcccaaagatgggaacttcaaaaggcaaactcacacaaagcatccaacaccagagagaggctcaagggacaaaaataggcaagtgtctttaaagatgcagttgaagcagtcagttaatagaagaaagatgccaaattctactagagatcactgtaaggtatccaaaagtgctcactccctacagcctagcatttcacagaaaagtgtttttcagatgtttcagagatgcacaaagtaaggcctggtaaagggagtgctttgtgatctagtaaagctggaatgtgaagctctttcctatcatggaatcttcatccatgtgtcattcatgctgctctctaggcacactcattgtccttaatgaaggtctgtgtgattgtaaggactgcatagacacatgagcttctgcacagctcagcggtaagcaggggtcccctgtcgtttcccttcttaataacagatgtgtattaagctttacaattcttagagatatcttaagctttggccaactccaggaaatcttcaagtgccattgtctttccaaaaactgcatgttttatggcctttgctcacctttttgtcgtgactggtaatcaaagcaagattatactattctgagtgattaaggaacccatgcagggtttaaaatccattttcttgctattgtccaatgtttacagagtactcaaaaggttttcctaaagtaatctaatttccatctccaatttaattcaattttcagcattgtagcatttcctttggtgtttgttttttttttttagacggagtttcaaaatttggattcatattcatatgtgggaaatcccagatttttttttttttttttttttttttttttttttggagacagagtcttgctctgtcacgcaggctggtgtgcaatggcgcgatctcagctcactgcaacctccgcctcccgagttcaagcgattcttctgcctcagcctcccgagtagctgggatcataggcatgtgccactacacccagctacccagctaatttttttttttttttgtacttttagtagagatgggatttcaccatgttggccaggctggtcttgaactcctgtcctcaggtgatccacctgcttcggcctcccagagtgctgggattataggcgtgagccaccacgcccggcctgtttcctttggtttaaagtggattcgaatcagtgttaaatcagaaaatcagggttttctaggaaattgggaattagttgccagaaaggaaactgaactatgcagaaggagttaagagctgggatgaggctggatggggtgactgacagtccagatcattgaaacagattgggtcgtcggaaactggtccagatgaggctggatggggtgactgacagtctggatcattgaaactgattaggtcgtcagaaacgggtccagacgaggatgaggctgaggctggatggggtgactgacagtctggatcattgaaactgattgggtggttggtcagaaacgggtccagatgaggatgaggctgaggctggatggggtgactgacagtctggatcattgaaactgattgggtggttggtcagaaacgggtccagatgaggatgaggctggatggggtgactgacagtctggatcattgaaactgattgggtcgtcagaaactggtccagatgaggctgggtggggtgactgacagtttggatcattgaaactgattgggtggtcagaaactggtccagatgaggatgtggctggatggggtgactgacagtctggatcattgaaactgattgggtggtcagaaactggtccagatgaggatgtggctggatggggtgactgacagtctggatcattgaaactgattgggtggtgagaaatgggtccagatgaggatgaggctggatggggtgactgacagtctggatcattgaaactgattgggtggtgagaaatgggtccagatgaggatgaggctggatggggtgactgacagtctggatcattgaaactggtccactatgacgcagcaggggcagtttggcagagcatcctcttcccttgtccttgtgaaagaacacaggaaacatttgggttttacagcttttcacaccctactatcaggcatcagaatcaaaattagttactaaattgggtgaatttttggaaacctgcatttctatgcatctgctattccagaaaaaaatgggaatgtattacaggagagttacctcacagtgtcttatgttgtggaacctgaaacataaccacgtgttttcttatatgatcatttgtgttgatactgcttttatttgagtttatgaacagaaatagaaagtatggtgcttgggttttgccctttcttactcctgaaagttaaatcagaagacactgatttcattttgtgaaatttagctcagagactattgatcttttgtttcattaatatgaacaactattagtaaaaaatagctttaacagcatttctgctgatatctagtaatctattcttttaatgtgaaaataagataaaatgtcctggagctaattctagcttaaatttgccagtatttctgtatgtcattaagtttttttcctctaaggttggtaatagaattttgttaatctttgcatacctgatggcatctatgtcaatgctgattgggtaattataaattctgtgctaatttaaaacttaatttgcctcttaaggtgattgtcctctgagtaatgattgtagttaaatgaagtatagcttgcaactatactatcacatgggtcgttaagtaaaaataaataaaccaaatttgtctgagacaggctaagatcaatcttctcatcaaaccaatttttctctaagagcaatttcactttcagttttagggtggacattcttgaatgcctcaaattaaacgttatctatttaatcttcctggaatagtctgtgaccaaaaaggagggtgtgatatatttaggtgtaaatatatcacatatatggtgtgatatatttgggatttatatattcagctcattctctgtgaagaagtcttcctgactaaaattggtttcaagataaactaatttctgttagtatttctactctgcctaccatgtatgcctttttgttagaaactaataaatgtatcagtcactagcaggtactggtcctttttcctctcatttttgtggaaaggatatgcaaacactgaatttctcagggagtactaaggctgtgcagaggctgagaatctgaaaaataaaatactaaaaataaaaa

SEQ ID NO: 177321 - DNA, 2202 bp, Homo sapiens
  Payload ID: 14793
  Gene Symbol: RNF168
  Gene Name: ring finger protein 168, E3 ubiquitin protein ligase
  ENST ID: ENST00000437070
  CDS Start-End: 505-855
ggcgcccgaaaggtgaacacgggagtcgcgcgtctcccccgcagcagcggtaaagcggaagttatgctgcagccggagcccgggcttcctcccggagccgcgtcccggggcccggctgccccgagctgagcggagcatcctttccgggtgaggggaggagaggacttggcgcgttcccctcgctgccccgggagccgcagccgcggtgttcatgccgcggagcagccaggctcctccgacgaaaacctgcatttatttgctggcgggacgtttgccttgaaaatggacaaagacgccgccctccggggtattcctgtttgcctgaccctgagagcgcctttttgcttcaagacgtgttggatgctcctgttctccgaattctgatacgcttctgggcataatactgaaacacaaaactgcttttgctctctctgtggttggccgaaaataggattctttttcgtgcaggtgtcgttgtttagtcggctttactaacatattgaaatggctctacccaaagacgccatcccctcgctgtccgagtgccagtgcgggatctgcatggaaatcctcgtggagcccgtcaccctcccgtgtaaccacacgctgtgtaaaccgtgcttccagtcgaccgtcgaaaaggcgagtttatgctgtcccttctgtcgccgccgggtatcgtcgtggactcggtaccatacccgaagaaattctctcgtcaacgtggaactgtggacgataattcaaaaacactatcccagggagtgcaagcttagagcgtctggccaagaatcagaggaagtgggtggcggcagagcgacgggccagcgaggaagaagaaaacaaagccagtgaagaatacatacagaggttgttggcagaggaggaagaagaggaaaaaagacaggcagaaaaaaggcgaagagcgatggaagaacaactgaaaagtgatgaggaactggcaagaaagctaagcattgatattaacaatttctgtgagggaagtatctcggcttctcccttgaattccagaaaatctgatccagttacacccaagtctgaaaagaaaagtaagaacaaacaaagaaacactggagatattcagaagtatttgacaccgaaatctcagtttgggtcagcctcacactctgaagctgtacaagaagtcaggaaagactccgtatctaaggacattgacagtagtgataggaaaagcccaacagggcaagacacagaaatagaagatatgccgacactttctccacagatatcccttggagttggagaacaaggtgcagattcttcaatagagtcccctatgccatggttatgtgcctgtggtgccgaatggtaccatgaaggaaacgtcaaaacaagaccaagcaatcatgggaaagagttatgtgtcttaagtcacgagcgacctaaaaccagagttccctactcgaaagaaactgcagttatgccttgtggcagaacagaaagtgggtgcgcccccacatcaggggtgacacagacaaatggaaacaacacaggtgagacagaaaatgaagagtcgtgcctactgatcagtaaggagatttccaaaagaaaaaaccaagaatcttcctttgaagcagtcaaggatccatgcttttctgcaaaaagaagaaaagtgtcccccgaatcttccccagatcaagaggaaacagaaataaactttacccaaaaactgatagatttggagcatctactgtttgagagacataaacaagaagaacaggacaggttattggcattacaacttcagaaggaggtggataaagagcaaatggtgccaaaccggcaaaaaggatccccagatgagtatcacttacgcgctacatcctcccctccagacaaagtgctaaatggacagaggaagaatcccaaagatgggaacttcaaaaggcaaactcacacaaagcatccaacaccagagagaggctcaagggacaaaaataggcaagtgtctttaaagatgcagttgaagcagtcagttaatagaagaaagatgccaaattctactagagatcactgtaaggtatccaaaagtgctcactccctacagcctagcatttcacagaaaagtgtttttcagatgtttcagagatgcacaaagtaaggcctggtaaagggagtgctttgtgatctagtaaagctggaatgtgaagctctttccta

SEQ ID NO: 177322 - DNA, 7823 bp, Homo sapiens
  Payload ID: 14794
  Gene Symbol: RNF169
  Gene Name: ring finger protein 169
  Uniprot ID: Q8NCN4
  ENST ID: ENST00000299563
  CDS Start-End: 14-2140
aacgggaaacaagatggcggctgcaggtccgagtactcgggcctcttccgcggcggcagcagccgctctgagtcggcggggccggcggggccgctgtgacgagacggcggcagctaagactggggccccaggcccggcttctggaccttcgctgttggtgttgtcgccgccgttgctgcagccgccgctgccgccgcggccggaggaatcgggctgcgccgggtgcctggagccccccggagaagcagcggccctgccgtgcggccactcgctttgccgaggctgcgcccaacgcgccgccgacgcggcgggcccgggttgccctcgctgccgcgcccgcggcccaggctgggcccgccgtcgggcccgcgacgacggccaggccgactcagaggtgctgggcgagtgcgcccgccgcagccaacccgagcgctgccgcccgcgccgggacgggggcgcggctgccgcggggcccaggccagagcaggagccgcgtgccgcgcctgcggagccagactttatattcagagcaccaatcaaattaagcaagcctggggaacttcgtgaggaatatgaaagcttgagaaagctgagagaagaaaagttacaagaggaaaaaccctctgaagatcaaatccacaagctgttaccagaggatacagaaacagggaaaaggaaaatggatgaacagaaaaaaagagatgaaccattagtactgaaaacaaatctggaacgttgtcctgcacgtctctcagattcagagaatgaagaaccttctcgaggccagatgacacagacacatcgctcggcatttgtttccaagaacaactcctactccttagctttcctggcagggaagctaaactccaaggtggaaaggagtcagagctgtagtgacacagcccaggaaagagcgaagagcagagtcagagcagttccaggcaacaaagccaaggtcacaactatgactccagcctccaaccccatcattggtgtcctcttgtcaactcaaaacaaccgctgcgtctcggcccctgacttaaccatcgaaaagcgtctacccttcagctccctttcatccttggcttccctgcataagccagagcgttctgtcagccctgagagcaatgacagcatctccgaagaactaaaccatttcaagcccattgtctgctcaccatgtactcctcccaagagactccctgatggccgtgtgctaagtcctctcatcatcaaatcaactccacgcaacctaaacagaagcctgcagaagcagacttcttatgaggccagtccacggatcctcaaaaagtgggaacagatctttcaggagcggcagatcaaaaagaccctttcaaaagccactcttacctctctggctcctgaaatgggggaagagttactaggctctgaaggtatccattctagcaaggagaagccacttgtggctgtaaatacaagattatctggtgggcaggtcctctctgagtatactggacccacctctgctgatcttgatcatttcccctctgttagccaaacaaaagcagaacaggacagtgataataaaagtagcactgagatcccactggaaacctgctgttcctcagaactcaaagggggaggcagtgggacttctttggagagggagcagtttgaggggttagggtcaactccagatgccaagttagacaaaacctgtataagcagagccatgaaaatcaccacagttaattcagtgctaccccaaaacagtgttttgggtggagtcctcaaaacaaagcaacaattgaagacattaaatcattttgatctgactaatggtgttctagttgagagcctaagtgaagagccacttccttctttgcgtcgaggccggaaaagacactgcaagaccaagcacttagaacaaaatggctcccttaaaaaactgcgacaaaccagtggggaggtgggtctggccccaacagacccagtcctgcgagagatggagcagaagcttcagcaagaggaagaagaccgacagttggctctgcagttgcagcgcatgttcgacaatgagaggcggactgtgagccggcgaaaaggaagtgtggatcagtatctcctacggtccagcaacatggccggggccaagtagcacctaatgaagtgttacctatttttaaaaggtcttaggccttgatcatttatcctgaagagctgagtgttctcactttggttttattttaatggcaaaacactgtctaatatggttctgagaggttccagggcctttgtagtcaatatccaagggaaaagcatctccgtttctctgtgacccaggccagaagcctgagtgacccatccctaagggcttctgggccaaacctggcagcacccactgggaatgagatttggaacggcctcaggagcataatggccacagttagtaatggtaaagaggggataccttcttaaactgatagacttcctgacttctttcagcagggtattgttttaaatcagccttgcagataaaaattaattccatctttttcagacaagtgaacaatttagttccttggcagatccaaaatgatagatggttatgttacgctttctgctgtcccttgccaaaaataagtaaatatatcagttaagattatgcctttacaaaagttaatttacattctctgtttaaaaaataatatttggtgaatgctatatagttgacagagcacatttacagaccttattaatttagtctttccaagagacctctcatgtaactggcattagccccatttttagatgatgaaactgcagtgcagatgttctggttctctcaactaccaagtggcataacccatggattttctaaaggtttcccaaatagatcacaacctaagggtgtgccaggggagcctaggggaagctaggctgggcattgaacactgatagtgcagaatccacatgcaaacaagatcgacagggtggataaacatatatgtgcattatccccatcccccacagtttagagccttctgcttttctgggggtttcagcctatgagacaaactataatcaggcttcattattacttttcaaatggccaagggttatctgcaatgttgatctaaaatcctaaaaaatcaccctgaagtcaggcaaggaacaatacttaaactccatactatggaaacaaggtatctagctggatgcagctggtaaattcagtcccatggacctttgggggtttattttccttagcagctgacaccatgtgtcttttgcatccctggtggtgcttggtgcttctgcccatctgggctcattgagaatagggatgaagatatgattttagggaatttctgatgggctggcatgccccatgtagtatgagttactatataaagtcatgtgactggcattttaacagaccttccagagcttatatatcccaatatatgttgtttcctttgagtagccccagcaggatactgcttagtttttccagtgccattggtgaaagcatttctggaactgtcttcaaagactagaaacactgactcccaaaatgctagaactggaagggaccttaatggttatctattccagcctcctcctaaggtcctcctcagcttctagacctagaagccaaagtccagaacagtgacccattgatcaaggcagatagtataactccttttaagtgttctcagatttgccttttctcagggcaaatcttcagtgttttgtggttatttgtggttgagagagagagagaatgtaatgtctgagactagccagcagctatttgaagcctctgggaaagaaggtggcttatcaagtgggtttgtagtaatgagtgctgctgtaaagcagagccattttcttgtgcagctcatagttcccaaacagttcccaaacagaaattccagagatgtcttaaacattgtggtcatcattgagataggtggaatctctttggtgactacgttggtggggaacatcactcacctgaatgtatgcattctgtgttctctgtgtgtgtgcacatatgcagatgtatgttttaaaaacatttaccaaactcatgattttgtagtcacaccacttcagttctgggccctaccaacaatttatgtcctccaagagctgctggagggcatgtttgtgcccaaaacagaagagctggctctggtttacagaagacagggagggtgaccttactataaatgcccttagaggaaacttatcagttactgccatttcacgcatttcctttttgatcttagtaaatattattggaaggctagtcttgttggtaggagcaaagacacttatttttccacttgccatctttctctatatctccagtaatttgaaaaacacttttcagttggaattgatttttgtctttggtaaaaagaaatatttttaatagataaaagatatatattttaaatatttccccaaattaatactttcattttaagaattgcatagcagttgtaacaagtgcagaatgaagaacaaattcttgttaagcaaatagtccaaactctaggtccagcttactgccttccccccttgtacctacagtgatgcctaggatggtattgacagttgttttctaaacttcctgctgagcaacagtccttcaaatataggtagagtggtctaggttaaggagggaggagggttgatctttaatcaggttggctttggaggaaggaaaaaccactaaggtattatctgaattttaagatgcttcccatccttaataactaaaacctgaatgcttttctttctgaaaaatctccctctctccttccatgattctgaagttggttaaaagtcgatatgttgatgtgtattatttgggggaacagaaaaggacaaggaaggaaacagaacgatgggaagggtttgtgagctagaataagaggtgcaggatttcacaaaacaaattcctcacaaatcattgaagcccagttcaccatacaaattacccatgtcttactctgttccttgtatatatgcattctgggtttttttattattaaaggggaagttaggggggagggtgaaggtcagtctgaggggaaatccaggaaatgtggtgcccttagaagggggctgtcagctcttttccatagagagggaaagaaactttgagaaaatgttcttgacccattgattgtatctgctggaagaagtcatctgggcctgttgggttggtatcagatcaggggattatgcatccagcccctggcccctttaatctatttgcctctttttaaaaaaggttaagtcttcttgggtgaggcttgccagggaaactcctaagtggcttcacttattttttaaattttaatttaatttttaaatttttgcttggaagcagcactggtaataaatgttttattttttgttcattttccctaaaggaaaaatgtccttaagagattaaagctcttaattgattactgtctggttacaaactggcaaactgactaaaatgggaagctgccaccgtgcctgactcatgtagctgatgaccgaaggctcatcctttcttttctatttgacagacatttactgagcttcagacttgagccaaccctgagctggactgtggagataaagcagttcctgctcttgaggagctcaatgtctaatggaatgcatttgaatgtatgtgtggctggagagttcatttatggtcttaggaaagccatttctggtcccatttagaaaactgaccagcacccagcaagctgcattctacattttagagaccccattggtatttgtgaatttgattgcaccaccgcttttcctttactaagtaatgttatggaaggagaatgaattttctcctctagtgattacaggacattaacatctcttcagaagctgcttttagcttaagccccaagaagtgaggtgggttgtggatcactgacatggtcaggggaggcccacacctcaattcagtaaccacctaatctctcccccaacctgatctctcatcagagctggcagcaacttgggattcctttcctttttcctgcctaacttttcattgaaatgtctagtaggagagtgagaaaagagaacaaaggctgggtcacagtcatagaatgttacagctggaatgggcatggaaatcatccaagttaaacttcttctctgccccccgcccccacttttttttttttttttttttaaccaaacgaacttgtgatccagtgccctattttatagtgtggttttccagggtctgaataaataatcattaaagtttgacacacgcagacacacgcaccaatgatggggatacccccaaatgatttaggaggttattttattttaatagttttttcttcctgatttttttcagttagttagagttaaatgtacctatagcccctgaatacatgctcaggtagagaaagtctccatagtataagtaagtaatatgaatgtggaatcttggaaagtgatatattttgattggaataattttaattaaatttaatgattttaattaagaattaaaagccagctagccaaattttctttaaaaattggaaactcattatggtcttaaattgtcctcaggcagccttttcctcatcaacccatagagtggtcttttgaactggtatctaaacatacctggttatgaattctcaaaagagaaagcaggtctggggcggggtggtcaggagacagattctagggaaagtgctgaagagattttcttctgaagatgatctaggaaatgcatctttatacatgattgttagctgctgtagctttctgaagaagattgtagaaaagagactaagatatatgcaagggtcaccagtttagagatcagtcaaattggaaaaagtgccaagactggatgtgcagattgttctatgtattatcagtatttttttcctcttaagaaaaaaatttactctctctcctttgtgagtaaatgcctccttaatgccttttaagtaaggtggcaacttttaactgtcatcttgtgagaggcaacctcaaactctaagcagactccctctctccctttctggtgtcttaaatcaagaactagtttgaagccaaggcaaagcaaggtttgttcatcttcctttcctgtcatttaaggtaaaacaggcaatgaactcgctcttcaaataccatagttcaagagtagctgttggccctggttccagattaatatagcagcaggcagattgccccttcttggggccaccaccctccaaagctgtgccaccaatgagagcattgggttcaagtttgcatcaaacatggtattaccaacgctgagcctccagcagagcacttaaaagtcctagtgagagaatagatactatgcaagggaaaaaaatttaaatgccaacgaatagtttttttttttttgaacctgatacactgtttgtttactctcaactctttgtacaaatattattgtcctaagggccttttcccctcctgcctagaaaataggttgtgtattggttttattcaacctgctgtctgctttaggattggagaaggtacctggatccttgtggactgccactgctggctgcctcctctccaactcatcagaagagcattttgacaaagacagaggacttggaccagggcatgccctgttggggatgtttctgtcagcaaggacatggcatggaatcaagtgggctgatgtgttgttatttaaacagtaccaaagtgcattcttcaatgtatgtttgcctgcttgaagcaaggcccaagttgagaatacagtaaaggaaactcatgaaagtgga

SEQ ID NO: 177323 - DNA, 340 bp, Homo sapiens
  Payload ID: 14794
  Gene Symbol: RNF169
  Gene Name: ring finger protein 169
  ENST ID: ENST00000527301
  CDS Start-End: 1-239
acttagaacaaaatggctcccttaaaaaactgcgacaaaccagtggggaggtgggtctggccccaacagacccagtcctgcgagagatggagcagaagcttcagcaagaggaagaagaccgacagttggctctgcagttgcagcgcatgttcgacaatgagaggcggactgtgagccggcgaaaaggaagtgtggatcagtatctcctacggtccagcaacatggccggggccaagtagcacctaatgaagtgttacctatttttaaaaggattggagaaggtacctggatccttgtggactgccactgctggctgcctcctctccaactcatcagaaga

SEQ ID NO: 177324 - DNA, 5119 bp, Homo sapiens
  Payload ID: 14795
  Gene Symbol: RNF17
  Gene Name: ring finger protein 17
  Uniprot ID: Q9BXT8
  ENST ID: ENST00000255324
  CDS Start-End: 53-4924
gagggccgccgggactcgcactcggcggttgttccagaagaaagagacagcgatggcggcagaggcttcgaagactgggccttctaggtcttcctaccagcgaatggggaggaagagtcagccctggggtgccgctgaaatccagtgcaccaggtgtggaaggagggtatccagatcatccggtcaccattgtgaacttcaatgtggacatgctttttgtgaactatgcttgttaatgactgaagaatgcaccacaattatatgccctgattgtgaggttgctacagctgtaaatactagacaacgctactacccaatggctggatatattaaggaagactccataatggaaaaactgcagcctaagacgataaagaattgttctcaggactttaagaagactgctgatcagctaactactggtttagaacgttcagcctccacagacaagactcttttgaactcatcagctgtaatgttggacactaatactgcagaagaaattgatgaagcattgaatacagcacaccatagtttcgaacagttaagcattgctggaaaagcacttgaacacatgcagaagcaaacgatagaggaaagagaaagagttatagaagttgtggagaaacagtttgaccaacttttggctttttttgattccaggaaaaagaacctgtgtgaagaatttgcaagaactactgatgattatctatcaaatttaataaaggctaaaagctacattgaagagaaaaaaaataatttgaatgcagctatgaacatagcaagagcattacaattatcgccttctctaagaacatactgtgacctgaatcagattatccggactttgcagttaacttcagatagtgaattagcacaagttagttctccacaactaaggaaccctcccaggttgagtgtgaattgcagtgagatcatctgtatgttcaacaatatgggaaagattgaatttagggactcaacaaaatgttatccccaagaaaatgaaattagacagaatgttcaaaagaaatataataacaaaaaggaactttcttgttacgatacatacccaccgctagaaaagaaaaaggttgacatgtctgtcctaaccagtgaagcaccaccacctcctttgcaacctgagacaaatgatgtacatttagaagcaaaaaacttccagccacagaaagacgttgcaacagcatcccctaaaaccattgctgtgttacctcagatgggatctagccctgatgtgataattgaagaaattattgaagacaacgtggaaagttctgcagagctagtttttgtaagccatgtaatagatccttgccatttctacattcggaagtattcacaaataaaagacgccaaagtactggagaagaaggtgaatgaattttgcaataggagttcacaccttgatccttcagacattttggaactaggtgcaagaatatttgtcagcagtattaaaaatggaatgtggtgtcgaggaactatcacagaattaattccaatagagggtagaaataccagaaaaccttgtagtccaaccagattatttgtccatgaagttgcactaatacaaatattcatggtagattttggaaattctgaagtcctgattgtcactggagttgttgatacccatgtgagaccagaacactctgctaagcaacatattgcactaaatgatttatgtctggttctaaggaaatctgaaccatatactgaagggctgctaaaagacatccagccattagcacaaccatgctcattgaaagacattgttccacagaattcaaatgaaggctgggaagaggaagctaaagtggaatttttgaaaatggtaaataacaaggctgtttcaatgaaagtttttagagaagaagatggtgtgcttattgtagatctgcaaaaaccaccaccgaataaaataagcagtgatatgcctgtgtctcttagagatgcgctagtttttatggaactagcaaagtttaagtcacaatcactaagaagtcactttgaaaaaaatactactttacactatcatccacctattttgcctaaagaaatgacagatgtttcagtaacggtttgtcatataaatagtcctggagatttctatcttcagttgatagagggcctggatattttatttctattaaagacaatcgaggaattctataaaagtgaagatggagaaaatctggaaatcctctgtccagttcaagatcaagcctgtgtagctaaatttgaagatggaatttggtaccgagcaaaagttatcggattgcctggacatcaggaagttgaagttaaatatgtggactttggtaatactgcaaaaataacaatcaaagacgtgcgtaaaataaaggatgagtttctgaatgccccagagaaggcaattaaatgtaagttggcctatattgaaccatataaaaggacaatgcagtggtccaaagaagctaaagaaaaatttgaagaaaaggctcaagataaatttatgacatgttcagttatcaaaattctggaagataatgtgctcttagttgagcttttcgattctcttggtgctcctgaaatgactactactagtattaatgaccagctagttaaagagggcctagcatcttatgaaataggatacatcctcaaagataattctcaaaagcatattgaagtttgggatccttctccagaagaaattatttcaaatgaagtacacaacttaaatcctgtgtctgcaaaatctctacctaatgagaattttcagtcactttataataaggaattgcctgtgcatatctgtaatgtaatatctcctgagaagatttatgttcagtggttgttaactgaaaacttacttaatagtttagaagaaaagatgatagctgcttatgaaaactcaaaatgggaacctgttaaatgggaaaatgatatgcactgtgctgttaagatccaagataaaaatcagtggcgaagaggccagatcatcagaatggttacagacacattggtagaggtcttgctgtatgatgtgggtgttgaactagtagtgaatgttgactgtttaagaaaacttgaagaaaatctaaagacaatgggaagactctctttggaatgttctctggttgacataagaccagctggtgggagtgacaagtggacagcaacagcttgtgactgtctttcattgtacctgactggagctgtagcaactataatcttacaggtggatagtgaggaaaacaacacaacatggccattacctgtgaaaattttctgcagagatgaaaaaggagagcgtgttgatgtttctaaatatttgattaaaaagggtttggctttgagagaaaggagaattaataacttagataacagccattcattatctgagaagtctctggaagtccccctggaacaggaagattcagtagttactaactgtattaaaactaactttgaccctgacaagaaaactgctgacataatcagtgaacagaaagtgtctgaatttcaggagaaaattctagaaccaagaaccactagagggtataagccaccagctattcctaacatgaacgtatttgaggcaacagtcagctgtgttggtgatgatggaactatatttgtagtacctaaactatcagaatttgagctaataaaaatgacaaatgaaattcaaagtaatttaaaatgccttggtcttttggagccttatttctggaaaaaaggagaagcatgtgcagtaagaggatccgatactctgtggtatcgtggcaaggtgatggaggttgtaggtggcgctgtcagagtacaatatttagatcatggattcactgaaaagattccgcagtgccatctttaccctattttgctgtatcctgatataccccagttttgtattccttgtcagctccataataccacacctgttgggaatgtctggcaaccagatgcaatagaagttcttcaacaactgctttcaaagagacaggtggacattcacattatggagttacctaaaaatccatgggagaaattgtctattcacctctattttgatggaatgtcactttcttattttatggcatactataaatactgtacttctgaacatactgaggagatgttgaaagaaaaaccaagatcagatcatgataaaaagtatgaagaggaacaatgggaaataaggtttgaggaattgctttcggctgaaacagacactcctcttttaccaccatatttgtcttcatctctgccttccccaggagaactctatgctgttcaagttaagcacgttgtctcacctaatgaagtgtatatttgccttgattctatagaaacttctaaccagtctaaccagcatagtgacacagatgatagtggagtcagcggggaatcagaatccgagagccttgatgaagcactgcagagggttaataagaaggtagaggcgcttcctcctctgacggattttagaacagaaatgccttgccttgcagaatatgatgatggcttatggtatagagcgaagattgttgccattaaagaatttaatcctttatctatcttagtacaatttgttgattatggatcaactgcaaagctgacattaaacagactgtgccaaattccttctcatcttatgcggtatccagctcgagccataaaggttctcttggcagggtttaaacctcccttaagggatctaggggagacaagaataccatattgtcccaaatggagcatggaggcactgtgggctatgatagactgtcttcaaggaaaacaactctatgctgtgtccatggctccagcaccagaacagatagtgacattatatgacgatgaacagcatccagttcatatgccgttggtagaaatggggcttgcagataaagatgaataagtgcctaagtgtatacagtgagagcatctatagaagcctagaagaattctgttatgtttagactatgtcttatctttagactatttcaggcttaattttcctaacttgttcagcactagtgctttacctctcatttttaattgaactgttaggaattgtgtggggaaaaaaagtaaataaatgttcgcttccaaa

SEQ ID NO: 177325 - DNA, 2134 bp, Homo sapiens
  Payload ID: 14795
  Gene Symbol: RNF17
  Gene Name: ring finger protein 17
  Uniprot ID: Q9BXT8
  ENST ID: ENST00000255325
  CDS Start-End: 4-1965
gcgatggcggcagaggcttcgaagactgggccttctaggtcttcctaccagcgaatggggaggaagagtcagccctggggtgccgctgaaatccagtgcaccaggtgtggaaggagggtatccagatcatccggtcaccattgtgaacttcaatgtggacatgctttttgtgaactatgcttgttaatgactgaagaatgcaccacaattatatgccctgattgtgaggttgctacagctgtaaatactagacaacgctactacccaatggctggatatattaaggaagactccataatggaaaaactgcagcctaagacgataaagaattgttctcaggactttaagaagactgctgatcagctaactactggtttagaacgttcagcctccacagacaagactcttttgaactcatcagctgtaatgttggacactaatactgcagaagaaattgatgaagcattgaatacagcacaccatagtttcgaacagttaagcattgctggaaaagcacttgaacacatgcagaagcaaacgatagaggaaagagaaagagttatagaagttgtggagaaacagtttgaccaacttttggctttttttgattccaggaaaaagaacctgtgtgaagaatttgcaagaactactgatgattatctatcaaatttaataaaggctaaaagctacattgaagagaaaaaaaataatttgaatgcagctatgaacatagcaagagcattacaattatcgccttctctaagaacatactgtgacctgaatcagattatccggactttgcagttaacttcagatagtgaattagcacaagttagttctccacaactaaggaaccctcccaggttgagtgtgaattgcagtgagatcatctgtatgttcaacaatatgggaaagattgaatttagggactcaacaaaatgttatccccaagaaaatgaaattagacagaatgttcaaaagaaatataataacaaaaaggaactttcttgttacgatacatacccaccgctagaaaagaaaaaggttgacatgtctgtcctaaccagtgaagcaccaccacctcctttgcaacctgagacaaatgatgtacatttagaagcaaaaaacttccagccacagaaagacgttgcaacagcatcccctaaaaccattgctgtgttacctcagatgggatctagccctgatgtgataattgaagaaattattgaagacaacgtggaaagttctgcagagctagtttttgtaagccatgtaatagatccttgccatttctacattcggaagtattcacaaataaaagacgccaaagtactggagaagaaggtgaatgaattttgcaataggagttcacaccttgatccttcagacattttggaactaggtgcaagaatatttgtcagcagtattaaaaatggaatgtggtgtcgaggaactatcacagaattaattccaatagagggtagaaataccagaaaaccttgtagtccaaccagattatttgtccatgaagttgcactaatacaaatattcatggtagattttggaaattctgaagtcctgattgtcactggagttgttgatacccatgtgagaccagaacactctgctaagcaacatattgcactaaatgatttatgtctggttctaaggaaatctgaaccatatactgaagggctgctaaaagacatccagccattagcacaaccatgctcattgaaagacattgttccacagaattcaaatgaaggctgggaagaggaagctaaagtggaatttttgaaaatggtaaataacaaggctgtttcaatgaaagtttttagagaagaagatggtgtgcttattgtagatctgcaaaaaccaccaccgaataaaataagcagtgatatgcctgtgtctcttagagatgcgctagtttttatggaactagcaaaagatctgatctaataaagttggttgagacactttctcattttttcaatgtttctgtattggaagaagaacttaaagcttcctaatctattttgttggcgtcattcctctgctgaatttttaaatgttcactctggcttacctgttaatggaagaatttgcataatatctacttagaaaggta

SEQ ID NO: 177326 - DNA, 2203 bp, Homo sapiens
  Payload ID: 14795
  Gene Symbol: RNF17
  Gene Name: ring finger protein 17
  ENST ID: ENST00000339524
  CDS Start-End: 107-2008
ttataataaggaattgcctgtgcatatctgtaatgtaatatctcctgagaagatttatgttcagtggttgttaactgaaaacttacttaatagtttagaagaaaagatgatagctgcttatgaaaactcaaaatgggaacctgttaaatgggaaaatgatatgcactgtgctgttaagatccaagataaaaatcagtggcgaagaggccagatcatcagaatggttacagacacattggtagaggtcttgctgtatgatgtgggtgttgaactagtagtgaatgttgactgtttaagaaaacttgaagaaaatctaaagacaatgggaagactctctttggaatgttctctggttgacataagaccagctggtgggagtgacaagtggacagcaacagcttgtgactgtctttcattgtacctgactggagctgtagcaactataatcttacaggtggatagtgaggaaaacaacacaacatggccattacctgtgaaaattttctgcagagatgaaaaaggagagcgtgttgatgtttctaaatatttgattaaaaagggtttggctttgagagaaaggagaattaataacttagataacagccattcattatctgagaagtctctggaagtccccctggaacaggaagattcagtagttactaactgtattaaaactaactttgaccctgacaagaaaactgctgacataatcagtgaacagaaagtgtctgaatttcaggagaaaattctagaaccaagaaccactagagggtataagccaccagctattcctaacatgaacgtatttgaggcaacagtcagctgtgttggtgatgatggaactatatttgtagtacctaaactatcagaatttgagctaataaaaatgacaaatgaaattcaaagtaatttaaaatgccttggtcttttggagccttatttctggaaaaaaggagaagcatgtgcagtaagaggatccgatactctgtggtatcgtggcaaggtgatggaggttgtaggtggcgctgtcagagtacaatatttagatcatggattcactgaaaagattccgcagtgccatctttaccctattttgctgtatcctgatataccccagttttgtattccttgtcagctccataataccacacctgttgggaatgtctggcaaccagatgcaatagaagttcttcaacaactgctttcaaagagacaggtggacattcacattatgaaaccaagatcagatcatgataaaaagtatgaagaggaacaatgggaaataaggtttgaggaattgctttcggctgaaacagacactcctcttttaccaccatatttgtcttcatctctgccttccccaggagaactctatgctgttcaagttaagcacgttgtctcacctaatgaagtgtatatttgccttgattctatagaaacttctaaccagtctaaccagcatagtgacacagatgatagtggagtcagcggggaatcagaatccgagagccttgatgaagcactgcagagggttaataagaaggtagaggcgcttcctcctctgacggattttagaacagaaatgccttgccttgcagaatatgatgatggcttatggtatagagcgaagattgttgccattaaagaatttaatcctttatctatcttagtacaatttgttgattatggatcaactgcaaagctgacattaaacagactgtgccaaattccttctcatcttatgcggtatccagctcgagccataaaggttctcttggcagggtttaaacctcccttaagggatctaggggagacaagaataccatattgtcccaaatggagcatggaggcactgtgggctatgatagactgtcttcaaggaaaacaactctatgctgtgtccatggctccagcaccagaacagatagtgacattatatgacgatgaacagcatccagttcatatgccgttggtagaaatggggcttgcagataaagatgaataagtgcctaagtgtatacagtgagagcatctatagaagcctagaagaattctgttatgtttagactatgtcttatctttagactatttcaggcttaattttcctaacttgttcagcactagtgctttacctctcatttttaattgaactgttaggaattgtgtggggaaaaaaagtaaataaatgttcgcttccaaa

SEQ ID NO: 177327 - DNA, 2826 bp, Homo sapiens
  Payload ID: 14795
  Gene Symbol: RNF17
  Gene Name: ring finger protein 17
  ENST ID: ENST00000418120
  CDS Start-End: 260-2826
gctgacacagaccacagatatcaatgtaacacaaaaaatagaagcagctttgaatctaagtacgacatgaaagcctagctctaaagttttgagacttgatatcttatttaacctggtttgataattgaagacaataccaagaaatgttagaagaaagaaattggaagatgagcgcttttggtttaagtcacaatcactaagaagtcactttgaaaaaaatactactttacactatcatccacctattttgcctaaagaaatgacagatgtttcagtaacggtttgtcatataaatagtcctggagatttctatcttcagttgatagagggcctggatattttatttctattaaagacaatcgaggaattctataaaagtgaagatggagaaaatctggaaatcctctgtccagttcaagatcaagcctgtgtagctaaatttgaagatggaatttggtaccgagcaaaagttatcggattgcctggacatcaggaagttgaagttaaatatgtggactttggtaatactgcaaaaataacaatcaaagacgtgcgtaaaataaaggatgagtttctgaatgccccagagaaggcaattaaatgtaagttggcctatattgaaccatataaaaggacaatgcagtggtccaaagaagctaaagaaaaatttgaagaaaaggctcaagataaatttatgacatgttcagttatcaaaattctggaagataatgtgctcttagttgagcttttcgattctcttggtgctcctgaaatgactactactagtattaatgaccagctagttaaagagggcctagcatcttatgaaataggatacatcctcaaagataattctcaaaagcatattgaagtttgggatccttctccagaagaaattatttcaaatgaagtacacaacttaaatcctgtgtctgcaaaatctctacctaatgagaattttcagtcactttataataaggaattgcctgtgcatatctgtaatgtaatatctcctgagaagatttatgttcagtggttgttaactgaaaacttacttaatagtttagaagaaaagatgatagctgcttatgaaaactcaaaatgggaacctgttaaatgggaaaatgatatgcactgtgctgttaagatccaagataaaaatcagtggcgaagaggccagatcatcagaatggttacagacacattggtagaggtcttgctgtatgatgtgggtgttgaactagtagtgaatgttgactgtttaagaaaacttgaagaaaatctaaagacaatgggaagactctctttggaatgttctctggttgacataagaccagctggtgggagtgacaagtggacagcaacagcttgtgactgtctttcattgtacctgactggagctgtagcaactataatcttacaggtggatagtgaggaaaacaacacaacatggccattacctgtgaaaattttctgcagagatgaaaaaggagagcgtgttgatgtttctaaatatttgattaaaaagggtttggctttgagagaaaggagaattaataacttagataacagccattcattatctgagaagtctctggaagtccccctggaacaggaagattcagtagttactaactgtattaaaactaactttgaccctgacaagaaaactgctgacataatcagtgaacagaaagtgtctgaatttcaggagaaaattctagaaccaagaaccactagagggtataagccaccagctattcctaacatgaacgtatttgaggcaacagtcagctgtgttggtgatgatggaactatatttgtagtacctaaactatcagaatttgagctaataaaaatgacaaatgaaattcaaagtaatttaaaatgccttggtcttttggagccttatttctggaaaaaaggagaagcatgtgcagtaagaggatccgatactctgtggtatcgtggcaaggtgatggaggttgtaggtggcgctgtcagagtacaatatttagatcatggattcactgaaaagattccgcagtgccatctttaccctattttgctgtatcctgatataccccagttttgtattccttgtcagctccataataccacacctgttgggaatgtctggcaaccagatgcaatagaagttcttcaacaactgctttcaaagagacaggtggacattcacattatggagttacctaaaaatccatgggagaaattgtctattcacctctattttgatggaatgtcactttcttattttatggcatactataaatactgtacttctgaacatactgaggagatgttgaaagaaaaaccaagatcagatcatgataaaaagtatgaagaggaacaatgggaaataaggtttgaggaattgctttcggctgaaacagacactcctcttttaccaccatatttgtcttcatctctgccttccccaggagaactctatgctgttcaagttaagcacgttgtctcacctaatgaagtgtatatttgccttgattctatagaaacttctaaccagtctaaccagcatagtgacacagatgatagtggagtcagcggggaatcagaatccgagagccttgatgaagcactgcagagggttaataagaaggtagaggcgcttcctcctctgacggattttagaacagaaatgccttgccttgcagaatatgatgatggcttatggtatagagcgaagattgttgccattaaagaatttaatcctttatctatcttagtacaatttgttgattatggatcaactgcaaagctgacattaaacaggttaaaaataaa

SEQ ID NO: 177328 - DNA, 2023 bp, Homo sapiens
  Payload ID: 14796
  Gene Symbol: RNF170
  Gene Name: ring finger protein 170
  Uniprot ID: Q96K19
  ENST ID: ENST00000240159
  CDS Start-End: 410-760
gtccggtcgcgccctcgcggaagctcggcagtgcgcgtgcgcccgcacccgcactccaaattagaaaggggacgtctagtgggttgcccgggaggggtggcgggagcggtcctggaaataatctgtcctctgtcgccgggaactggcgaggtagttccttcgcggtggagaggtacgtccggcgcgcggcggccacgcccaccctatcggggcccgcggagccgcggacggcggggtctggccttcttggggtagctctggccgccgaggctctgcggggcggcgggagtcgccgcctccttccccccgggcccctccctcgtctggaagccccagaatcgccccgcggctgtccggagtcgccggcgacggtggaggggccgacgcggagagcggctctagacctggaatggccaaatatcaaggtgaagttcaaagtttgaaactggatgatgattcagttatagaaggagtaagcgaccaagtacttgtggcagttgtggtcagtttcgctttgattgctaccctggtatatgcacttttcagaaatgtacatcaaaacattcacccagaaaaccaggagctagtaagggtacttcgagaacagcttcaaacagaacaggatgcacctgctgccactcgacagcagttctacactgacatgtactgtcccatctgcctgcaccaagcctccttcccggtggagaccaactgtggacatcttttttgtggtaaccttactcctaacagtatttggtgaagatgatcagtctcaggatgttctgagattgcatcaggatattaatgattataaccggagattctcagggcaacccagatctattatggagagaattatggatctacccactttactgaggcatgcattcagggaaatgttttcagtcgggggccttttctggatgtttcgcatcaggataatactttgtttaatgggagcttttttctatcttatatcacctctagattttgtacctgaagccttgtttggaattctaggctttctagatgatttctttgtcatctttttattgcttatctacatctctattatgtatcgagaagtgataacccaaaggctaactagatgaaaaagaaaacaaaactgagtttactaggatatctgagctaatgtagaacatcaaacagaaggacccatggcagtataaagcaatgaagcaatggagtattatctcacaaatataaaaccactataagacaaacatttgattatcatttgacaaatacctaggtataactggaattttcatgtttgaagttctaatattaagtttagaattataatgatctacagttgtatcttgattctatgttgtctggaaaaaatatggaattatataaaaagggatgcttttatatatttttcttttccccagaattacttagattaattagatgtatagtaaaatattgttaaatgtcagtttatccatcttatccttctcagcaggtacctatatgataatatatagctgtgaaactcatctaaatatttttgttccaataaaatattatatactattggggaaaattcagtatttcttttagtgctagctaagttttgtgcatttggagcagttctgccttttcattctggtataattaattatttgctatcagctgaaactgaaagaagaaacttgaacttcatacttcgatatcatattctagtttacagaacacattttaatcaatagaagaattaagatgaaaaacatggccgggcggggtggctcacgcctgtaatcctagcactttgggaggctgaggcgggtagatcacaaggtcaggagatcaggaccatcctggctaacatggtgaaaccccgtctctactaaaaatacaaaaaattagccaggcgtggtggcaggcgcctgtagtcccagctactcgggaggctgaggcagaagaatggcgtaaacccaggaggtggattgcgccactgcactccagcctgggcaacagagtgagactccctctc

SEQ ID NO: 177329 - DNA, 1265 bp, Homo sapiens
  Payload ID: 14796
  Gene Symbol: RNF170
  Gene Name: ring finger protein 170
  Uniprot ID: Q96K19
  ENST ID: ENST00000319073
  CDS Start-End: 113-463
ggggacgtctagtgggttgcccgggaggggtggcgggagcggtcctggaaataatctgtcctctgtcgccgggaactggcgaggtagttccttcgcggtggagagacctggaatggccaaatatcaaggtgaagttcaaagtttgaaactggatgatgattcagttatagaaggagtaagcgaccaagtacttgtggcagttgtggtcagtttcgctttgattgctaccctggtatatgcacttttcagaaatgtacatcaaaacattcacccagaaaaccaggagctagtaagggtacttcgagaacagcttcaaacagaacaggatgcacctgctgccactcgacagcagttctacactgacatgtactgtcccatctgcctgcaccaagcctccttcccggtggagaccaactgtggacatcttttttgtggtaaccttactcctaacagtatttggtgaagatgatcagtctcaggatgttctgagattgcatcaggatattaatgattataaccggagattctcagggcaacccagatctattatggagagaattatggatctacccactttactgaggcatgcattcagggaaatgttttcagtcgggggccttttctggatgtttcgcatcaggataatactttgtttaatgggagcttttttctatcttatatcacctctagattttgtacctgaagccttgtttggaattctaggctttctagatgatttctttgtcatctttttattgcttatctacatctctattatgtatcgagaagtgataacccaaaggctaactagatgaaaaagaaaacaaaactgagtttactaggatatctgagctaatgtagaacatcaaacagaaggacccatggcagtataaagcaatgaagcaatggagtattatctcacaaatataaaaccactataagacaaacatttgattatcatttgacaaatacctaggtataactggaattttcatgtttgaagttctaatattaagtttagaattataatgatctacagttgtatcttgattctatgttgtctggaaaaaatatggaattatataaaaagggatgcttttatatatttttcttttccccagaattacttagattaattagatgtatagtaaaatattgttaaatgtcagtttatccatcttatccttctcagcaggtacctatatgataatatatagctgtgaaactcatctaaatatttttgttccaataaaatattatatact

SEQ ID NO: 177330 - DNA, 1866 bp, Homo sapiens
  Payload ID: 14796
  Gene Symbol: RNF170
  Gene Name: ring finger protein 170
  Uniprot ID: Q96K19
  ENST ID: ENST00000319104
  CDS Start-End: 110-712
gacgtctagtgggttgcccgggaggggtggcgggagcggtcctggaaataatctgtcctctgtcgccgggaactggcgaggtagttccttcgcggtggagagacctggaatggccaaatatcaaggtgaagttcaaagtttgaaactggatgatgattcagttatagaaggagtaagcgaccaagtacttgtggcagttgtggtcagtttcgctttgattgctaccctggtatatgcacttttcagaaatgtacatcaaaacattcacccagaaaaccaggagctagtaagggtacttcgagaacagcttcaaacagaacaggatgcacctgctgccactcgacagcagttctacactgacatgtactgtcccatctgcctgcaccaagcctccttcccggtggagaccaactgtggacatcttttttgtggtgcctgcattattgcttactggcgatatggttcatggcttggggcaatcagttgtccaatctgtagacaaacgggttcatcagagaagagcagccgtgcaagtgagcagacccatcaagaggctgttgcatgcctggacacacagaactctcctgcctgtacagtcggatgcaggtcagggcctcagcatataccccatgaccgaatgctcccttcagcctcaccacgtttatgcttcacgttactagactgtgtttccatcctttggttctcaggttaaatgttccctcctcactcagactacccaaaagtaggcagtgcaaaagtagtgcaaaagtaggcagtgaccctcccctccccttaccccagggcactctgaggcattcagacatctcagcacagcatcatcatattgacatttccattgtctgtctgcttctcactagaacacaagctctatgaaaacagagacaatgttagttttgtccacccagatattcacagatgtaccattatgcctgccaccacagtagtgctcaacacattaaagattaataaataaagcaagggaaagacaggaaagggcagaagacaaggaaagatcacttcttactcagtcatggctgccgcccaggtctaagccaccctcacttctcacctaaaggatcacagcgaccttccaggcagtctcccaggcaccaagtgcctggctccctacatgcaacgcagcccgatgatcatctcaagtgtgactctgctggaaagcctgctctccctttcccacagagtaaaggtaaagtcctcacgccagcctgcaaggccccatgtgaccttggttgctcatttcctctctaacctcatctcacatttgtccccacagctcactctgctccagccatccagccctccttgctgtcctttgagcaggctgaagacgcccagcctcaggagctctgccctggccagtccctctgactgctaggctcctccgccgggcatcctcacagccaactctcaccaactccagatcttcgcacaatagccatttcctctgttaggcctgtcctgtccaccataaggaaacttgcaactccctcagcccacagagcacctctcaccggctaacatactctgtggtcacgtgtttgctatctgcctccctaatgtctttgagaacattagctccctgagggcagaaatctccttcactgacatatcccaagcccccagaactatgcgtgcagcatagtcagtaactatttgttgaatcaatgaatgagaaaacaatatcagggaactctaagttgaaatacactttctcagttcacaatgttatccattctgacctttatcagacacaggcacagaggacctcagagatattcccagcagtctcaatatccatggtaatgctaataaactactattctggca

SEQ ID NO: 177331 - DNA, 3880 bp, Homo sapiens
  Payload ID: 14796
  Gene Symbol: RNF170
  Gene Name: ring finger protein 170
  Uniprot ID: Q96K19
  ENST ID: ENST00000527424
  CDS Start-End: 246-1022
ttcgctgcgtgtcgaggcgagcacgcgctccgccctggaggctgcggcgacgggtcctcctccgccgtccggtcgcgccctcgcggaagctcggcagtgcgcgtgcgcccgcacccgcactccaaattagaaaggggacgtctagtgggttgcccgggaggggtggcgggagcggtcctggaaataatctgtcctctgtcgccgggaactggcgaggtagttccttcgcggtggagagacctggaatggccaaatatcaaggtgaagttcaaagtttgaaactggatgatgattcagttatagaaggagtaagcgaccaagtacttgtggcagttgtggtcagtttcgctttgattgctaccctggtatatgcacttttcagaaatgtacatcaaaacattcacccagaaaaccaggagctagtaagggtacttcgagaacagcttcaaacagaacaggatgcacctgctgccactcgacagcagttctacactgacatgtactgtcccatctgcctgcaccaagcctccttcccggtggagaccaactgtggacatcttttttgtggtgcctgcattattgcttactggcgatatggttcatggcttggggcaatcagttgtccaatctgtagacaaacggtaaccttactcctaacagtatttggtgaagatgatcagtctcaggatgttctgagattgcatcaggatattaatgattataaccggagattctcagggcaacccagatctattatggagagaattatggatctacccactttactgaggcatgcattcagggaaatgttttcagtcgggggccttttctggatgtttcgcatcaggataatactttgtttaatgggagcttttttctatcttatatcacctctagattttgtacctgaagccttgtttggaattctaggctttctagatgatttctttgtcatctttttattgcttatctacatctctattatgtatcgagaagtgataacccaaaggctaactagatgaaaaagaaaacaaaactgagtttactaggatatctgagctaatgtagaacatcaaacagaaggacccatggcagtataaagcaatgaagcaatggagtattatctcacaaatataaaaccactataagacaaacatttgattatcatttgacaaatacctaggtataactggaattttcatgtttgaagttctaatattaagtttagaattataatgatctacagttgtatcttgattctatgttgtctggaaaaaatatggaattatataaaaagggatgcttttatatatttttcttttccccagaattacttagattaattagatgtatagtaaaatattgttaaatgtcagtttatccatcttatccttctcagcaggtacctatatgataatatatagctgtgaaactcatctaaatatttttgttccaataaaatattatatactattggggaaaattcagtatttcttttagtgctagctaagttttgtgcatttggagcagttctgccttttcattctggtataattaattatttgctatcagctgaaactgaaagaagaaacttgaacttcatacttcgatatcatattctagtttacagaacacattttaatcaatagaagaattaagatgaaaaacatggccgggcggggtggctcacgcctgtaatcctagcactttgggaggctgaggcgggtagatcacaaggtcaggagatcaggaccatcctggctaacatggtgaaaccccgtctctactaaaaatacaaaaaattagccaggcgtggtggcaggcgcctgtagtcccagctactcgggaggctgaggcagaagaatggcgtaaacccaggaggtggattgcgccactgcactccagcctgggcaacagagtgagactccctctcaaaaaaaaaaaaaaaaaagatgaaaaacatttatctccagtcagcacacttgatgttcacagttagacatttaaacaagagctcatcctttcgtagtagatataaaagtaatttgtaaagggaagattgttttaggaacctgggcgatgctgcaaacacagagtagcctgatgcatttctgaggaaggtgaatcttcgtgtctttgagcatcaagccaataggaaggtactgggaacggtatttacatttgacaaaagaaattactggttagctatagcaacagattggacaaattttgttagttttctgttgtcagaaatttttataatactgtctcaggatggcagcacacagctcagattcatgtcttgagccaaacaagtgaatgtatctgagaagactcagtaccacatggtactgggagatcttactcacttcagctggcgttgctcattagtgaatgtatgacagcaggatgtgaggggatgcccaggagtcagtgttagcattgtcatctgagatcactgctattaatatcatccattaatttattagtgagcttcactatatgcagactgggagataaggagaaaatctgtcacattctctctagctaatcagatcagctaccaattaatgagattctgaatgaaatatcaatatgtgtttttctaatttggacctaggacagagctgttgcttgtcatagagaaaaacaataatgcttaaacatagcacattataattaaagcaggtttctcacatacttttcattttatcctttggataattttgtgaggaacgcaggacaccaacttccctttcatagatacaatccccatgctattgatgaaagtgtttttgaatgaagtcatacaacaaataactgatcaaagtggcattacaccaaaatttcttagtaggactcctgcatagaatgtttagatagacgtgaaagttgttaagaggaacagcaagagagaaactggttctttggaagtctttcgtgctacattatacctccatcagagtaagacagcttaggcactcctaagaggaaaggtctgtggagatgacatgaatccgaattctacacttccaaatcaaataggtaaaagggtggcatacatcacagaaaaacatttcagctgcagtcaccaacttgaaaagcgagtgagtaggagtttgtcacactgccatgtaccagactggaaatgcatttcctaccaattacacatttggtgtgggggaatggtgatgtcattttttgacaggattttattttgtgtgcatgcattctgctccaagtgtcacaattctggttacaataattataatatttggagttactactaagactttcctgaaagaggtgtattgtaccaaattttgtaacataaaaaaatactaaatgatcttaaagcttcctaaattgtgaaaagggtatgtgctaacatctcagaactttagacctgcttgttgtcatctttaccgatctctgatgataaatgcagaagggatctgagagtttttaaagcaagtagagtcaatcagagttttgaacatcatagtaatacttccgtgattcagagttagatcatataaatcaaagtaacaatttggattttttttaaacaacaatatcataactgtcataaaacagatggtccaaccccaggagcagataataacttgggcagctctgtggggaacaagacggggaaaacaactgttctaactgcccactagaacagtggtttcaactactacaattctcagtgtttgagaggtacaagggaagaaaggactatgtggatcccttgtggctatgcagatacctacctcacagagttgttgtagaagactggtggtttggttcaaaccttgtgattaaagagtttgtcaagcattttattcttttgaataaaagcaacatatctaaaaca

SEQ ID NO: 177332 - DNA, 1338 bp, Homo sapiens
  Payload ID: 14796
  Gene Symbol: RNF170
  Gene Name: ring finger protein 170
  Uniprot ID: Q96K19
  ENST ID: ENST00000526349
  CDS Start-End: 362-886
ggcgagcacgcgctccgccctggaggctgcggcgacgggtcctcctccgccgtccggtcgcgccctcgcggaagctcggcagtgcgcgtgcgcccgcacccgcactccaaattagaaaggggacgtctagtgggttgcccgggaggggtggcgggagcggtcctggaaataatctgtcctctgtcgccgggaactggcgaggtagttccttcgcggtggagagacctggaatggccaaatatcaagaaatgtacatcaaaacattcacccagaaaaccaggagctagtaagggtacttcgagaacagcttcaaacagaacaggatgcacctgctgccactcgacagcagttctacactgacatgtactgtcccatctgcctgcaccaagcctccttcccggtggagaccaactgtggacatcttttttgtggtgcctgcattattgcttactggcgatatggttcatggcttggggcaatcagttgtccaatctgtagacaaacggtaaccttactcctaacagtatttggtgaagatgatcagtctcaggatgttctgagattgcatcaggatattaatgattataaccggagattctcagggcaacccagatctattatggagagaattatggatctacccactttactgaggcatgcattcagggaaatgttttcagtcgggggccttttctggatgtttcgcatcaggataatactttgtttaatgggagcttttttctatcttatatcacctctagattttgtacctgaagccttgtttggaattctaggctttctagatgatttctttgtcatctttttattgcttatctacatctctattatgtatcgagaagtgataacccaaaggctaactagatgaaaaagaaaacaaaactgagtttactaggatatctgagctaatgtagaacatcaaacagaaggacccatggcagtataaagcaatgaagcaatggagtattatctcacaaatataaaaccactataagacaaacatttgattatcatttgacaaatacctaggtataactggaattttcatgtttgaagttctaatattaagtttagaattataatgatctacagttgtatcttgattctatgttgtctggaaaaaatatggaattatataaaaagggatgcttttatatatttttcttttccccagaattacttagattaattagatgtatagtaaaatattgttaaatgtcagtttatccatcttatccttctcagcaggtacctatatgataatatatagctgtgaaactcatctaaatatttttgttccaataaaatattatatactat

SEQ ID NO: 177333 - DNA, 580 bp, Homo sapiens
  Payload ID: 14796
  Gene Symbol: RNF170
  Gene Name: ring finger protein 170
  ENST ID: ENST00000531440
  CDS Start-End: 235-580
aaattagaaaggggacgtctagtgggttgcccgggaggggtggcgggagcggtcctggaaataatctgtcctctgtcgccgggaactggcgaggtagttccttcgcggtggagaggtgtcttataagactttgacacttcctgttttgtctgaaaaaaatgtgaattacctgtgatatttggactccagtgtggctgggctatctcccctcatacctatagaattagacctggaatggccaaatatcaaggtgaagttcaaagtttgaaactggatgatgattcagttatagaaggagtaagcgaccaagtacttgtggcagttgtggtcagtttcgctttgattgctaccctggtatatgcacttttcagaaatgtacatcaaaacattcacccagaaaaccaggagctagtaagggtacttcgagaacagcttcaaacagaacaggatgcacctgctgccactcgacagcagttctacactgacatgtactgtcccatctgcctgcaccaagcctccttcccggtggagaccaactgtggacatcttttttgtggtgcctgcattattgcttactggc

SEQ ID NO: 177334 - DNA, 195 bp, Homo sapiens
  Payload ID: 14796
  Gene Symbol: RNF170
  Gene Name: ring finger protein 170
  ENST ID: ENST00000524954
  CDS Start-End: 59-195
ggcaccgtcgcccgcagcgctcgccccacgggccgcgcgtggagggtcccgacctggaatggccaaatatcaaggtgaagttcaaagtttgaaactggatgatgattcagttatagaaggagtaagcgaccaagtacttgtggcagttgtggtcagtttcgctttgattgctaccctggtatatgcacttttcag

SEQ ID NO: 177335 - DNA, 4116 bp, Homo sapiens
  Payload ID: 14796
  Gene Symbol: RNF170
  Gene Name: ring finger protein 170
  Uniprot ID: Q96K19
  ENST ID: ENST00000534961
  CDS Start-End: 478-1254
agttcgctgcgtgtcgaggcgagcacgcgctccgccctggaggctgcggcgacgggtcctcctccgccgtccggtcgcgccctcgcggaagctcggcagtgcgcgtgcgcccgcacccgcactccaaattagaaaggggacgtctagtgggttgcccgggaggggtggcgggagcggtcctggaaataatctgtcctctgtcgccgggaactggcgaggtagttccttcgcggtggagaggtacgtccggcgcgcggcggccacgcccaccctatcggggcccgcggagccgcggacggcggggtctggccttcttggggtagctctggccgccgaggctctgcggggcggcgggagtcgccgcctccttccccccgggcccctccctcgtctggaagccccagaatcgccccgcggctgtccggagtcgccggcgacggtggaggggccgacgcggagagcggctctagacctggaatggccaaatatcaaggtgaagttcaaagtttgaaactggatgatgattcagttatagaaggagtaagcgaccaagtacttgtggcagttgtggtcagtttcgctttgattgctaccctggtatatgcacttttcagaaatgtacatcaaaacattcacccagaaaaccaggagctagtaagggtacttcgagaacagcttcaaacagaacaggatgcacctgctgccactcgacagcagttctacactgacatgtactgtcccatctgcctgcaccaagcctccttcccggtggagaccaactgtggacatcttttttgtggtgcctgcattattgcttactggcgatatggttcatggcttggggcaatcagttgtccaatctgtagacaaacggtaaccttactcctaacagtatttggtgaagatgatcagtctcaggatgttctgagattgcatcaggatattaatgattataaccggagattctcagggcaacccagatctattatggagagaattatggatctacccactttactgaggcatgcattcagggaaatgttttcagtcgggggccttttctggatgtttcgcatcaggataatactttgtttaatgggagcttttttctatcttatatcacctctagattttgtacctgaagccttgtttggaattctaggctttctagatgatttctttgtcatctttttattgcttatctacatctctattatgtatcgagaagtgataacccaaaggctaactagatgaaaaagaaaacaaaactgagtttactaggatatctgagctaatgtagaacatcaaacagaaggacccatggcagtataaagcaatgaagcaatggagtattatctcacaaatataaaaccactataagacaaacatttgattatcatttgacaaatacctaggtataactggaattttcatgtttgaagttctaatattaagtttagaattataatgatctacagttgtatcttgattctatgttgtctggaaaaaatatggaattatataaaaagggatgcttttatatatttttcttttccccagaattacttagattaattagatgtatagtaaaatattgttaaatgtcagtttatccatcttatccttctcagcaggtacctatatgataatatatagctgtgaaactcatctaaatatttttgttccaataaaatattatatactattggggaaaattcagtatttcttttagtgctagctaagttttgtgcatttggagcagttctgccttttcattctggtataattaattatttgctatcagctgaaactgaaagaagaaacttgaacttcatacttcgatatcatattctagtttacagaacacattttaatcaatagaagaattaagatgaaaaacatggccgggcggggtggctcacgcctgtaatcctagcactttgggaggctgaggcgggtagatcacaaggtcaggagatcaggaccatcctggctaacatggtgaaaccccgtctctactaaaaatacaaaaaattagccaggcgtggtggcaggcgcctgtagtcccagctactcgggaggctgaggcagaagaatggcgtaaacccaggaggtggattgcgccactgcactccagcctgggcaacagagtgagactccctctcaaaaaaaaaaaaaaaaaagatgaaaaacatttatctccagtcagcacacttgatgttcacagttagacatttaaacaagagctcatcctttcgtagtagatataaaagtaatttgtaaagggaagattgttttaggaacctgggcgatgctgcaaacacagagtagcctgatgcatttctgaggaaggtgaatcttcgtgtctttgagcatcaagccaataggaaggtactgggaacggtatttacatttgacaaaagaaattactggttagctatagcaacagattggacaaattttgttagttttctgttgtcagaaatttttataatactgtctcaggatggcagcacacagctcagattcatgtcttgagccaaacaagtgaatgtatctgagaagactcagtaccacatggtactgggagatcttactcacttcagctggcgttgctcattagtgaatgtatgacagcaggatgtgaggggatgcccaggagtcagtgttagcattgtcatctgagatcactgctattaatatcatccattaatttattagtgagcttcactatatgcagactgggagataaggagaaaatctgtcacattctctctagctaatcagatcagctaccaattaatgagattctgaatgaaatatcaatatgtgtttttctaatttggacctaggacagagctgttgcttgtcatagagaaaaacaataatgcttaaacatagcacattataattaaagcaggtttctcacatacttttcattttatcctttggataattttgtgaggaacgcaggacaccaacttccctttcatagatacaatccccatgctattgatgaaagtgtttttgaatgaagtcatacaacaaataactgatcaaagtggcattacaccaaaatttcttagtaggactcctgcatagaatgtttagatagacgtgaaagttgttaagaggaacagcaagagagaaactggttctttggaagtctttcgtgctacattatacctccatcagagtaagacagcttaggcactcctaagaggaaaggtctgtggagatgacatgaatccgaattctacacttccaaatcaaataggtaaaagggtggcatacatcacagaaaaacatttcagctgcagtcaccaacttgaaaagcgagtgagtaggagtttgtcacactgccatgtaccagactggaaatgcatttcctaccaattacacatttggtgtgggggaatggtgatgtcattttttgacaggattttattttgtgtgcatgcattctgctccaagtgtcacaattctggttacaataattataatatttggagttactactaagactttcctgaaagaggtgtattgtaccaaattttgtaacataaaaaaatactaaatgatcttaaagcttcctaaattgtgaaaagggtatgtgctaacatctcagaactttagacctgcttgttgtcatctttaccgatctctgatgataaatgcagaagggatctgagagtttttaaagcaagtagagtcaatcagagttttgaacatcatagtaatacttccgtgattcagagttagatcatataaatcaaagtaacaatttggattttttttaaacaacaatatcataactgtcataaaacagatggtccaaccccaggagcagataataacttgggcagctctgtggggaacaagacggggaaaacaactgttctaactgcccactagaacagtggtttcaactactacaattctcagtgtttgagaggtacaagggaagaaaggactatgtggatcccttgtggctatgcagatacctacctcacagagttgttgtagaagactggtggtttggttcaaaccttgtgattaaagagtttgtcaagcattttattcttttgaataaaagcaacatatctaaaacatttt

SEQ ID NO: 177336 - DNA, 1604 bp, Homo sapiens
  Payload ID: 14797
  Gene Symbol: RNF175
  Gene Name: ring finger protein 175
  Uniprot ID: Q8N4F7
  ENST ID: ENST00000347063
  CDS Start-End: 374-1360
ccagtcctgccgcccggtaacaaaaccggggttcccgccacacgcacccggtagggctcaagacgctttatcggcgacaatggctggctgaatgggaggcctgaggttctgaaggaaccggggtgctggcgaccgggacctcgaggccgctgctggggaggacgctggccagcgtgcagggggcggaggcggggcgtgccgggaggctcccatctcccgccccgcacaacccgggcagggccgccgctccgccgccgccgcagatccggctctcaccctcggctcccgaggccccgcggcgcctccttctgcggactctgcgggaccctccccggcaggcgctgtgccctggagaaggcacagtggctcaggcatggccgcggggacggcggcgcggaaggcagcgccggtgctggaggcccccccgcagcaggagcagctctctcatacaaagctttctgcagaagacacatggaacctgcagcaggagaggatgtacaagatgcaccggggccacgattccatgcacgtggaaatgatcttgatcttcctctgcgttctggtcattgcccagatagtgctggttcagtggagacagaggcatggccgatcctacaatctggtgaccttgttgcagatgtgggttgtccccttatatttcacgataaaattatactggtggcggtttctgtctatgtgggggatgttctccgttattaccagttacatcctcttcagagctacccgaaaacccctctcaggaaggacaccacgattggtctacaaatggtttcttttgatctacaaactcagctatgcatttggtgttgtgggttacttggcgatcatgtttacaatgtgtggattcaatctgtttttcaaaatcaaagctagagattccatggattttggcattgtgtctttgttctacggcctctactatggagtaatggggagagactttgccgagatctgctcagactacatggcttccactatagggttctacagtgtcagccggttgcctacaaggagcttatcggacaatatctgtgcagtctgtgggcagaagatcattgtggagcttgatgaagaagggctcattgaaaacacctaccagctttcctgtaatcatgtctttcatgaattctgcatccgaggttggtgtatcgttgggaaaaagcagacttgcccttactgcaaagagaaagttgatttgaagaggatgatcagtaatccctgggagcgcacacattttctgtatggacaaatcctggattggcttcgttatttggtggcctggcaacctgtggtgataggaatagttcaaggcattatctattcactagggctggaataggacagcagaccccagaagcaacatactgcatggttgaaatccttggtccaacatttaatattaatttttttaattttagagatgatcccaagtgtttagaaaactaagtaaactttgttgtcaagcaatttgtccatgtggaaagaatttaaagagaagctgaacaatggaataaacaaataaagcatgttttttcatctttcccattacagctgtttcttaactcatgcacatgtcacatttg

SEQ ID NO: 177337 - DNA, 824 bp, Homo sapiens
  Payload ID: 14797
  Gene Symbol: RNF175
  Gene Name: ring finger protein 175
  ENST ID: ENST00000513656
  CDS Start-End: 109-219
ccggctctcaccctcggctcccgaggccccgcggcgcctccttctgcggactctgcgggaccctccccggcaggcgctgtgccctggagaaggcacagtggctcaggcatggccgcggggacggcggcgcggaaggcagcgccggtgctggaggcccccccgcagcaggagcagctctctcatacaaagctttctgcagaagacacatggaactggtgaccttgttgcagatgtgggttgtccccttatatttcacgataaaattatactggtggcggtttctgtctatgtgggggatgttctccgttattaccagttacatcctcttcagagctacccgaaaacccctctcaggaaggacaccacgattggtctacaaatggtttcttttgatctacaaactcagctatgcatttggtgttgtgggttacttggcgatcatgtttacaatgtgtggattcaatctgtttttcaaaatcaaagctagagattccatggattttggcattgtgtctttgttctacggcctctactatggagtaatggggagagactttgccgagatctgctcagactacatggcttccactatagggttctacagtgtcagccggttgcctacaaggagcttatcggacaatatctgtgcagtctgtgggcagaagatcattgtggagcttgatgaagaagggctcattgaaaacacctaccagctttcctgtaatcatgtctttcatgaattctgcatccgaggttggtgtatcgttgggaaaaagcagacttgcccttactgcaaagagaaagttgatttgaagaggatgatc

SEQ ID NO: 177338 - DNA, 3203 bp, Homo sapiens
  Payload ID: 14797
  Gene Symbol: RNF175
  Gene Name: ring finger protein 175
  ENST ID: ENST00000503694
  CDS Start-End: 149-514
acaacccgggcagggccgccgctccgccgccgccgcagatccggctctcaccctcggctcccgaggccccgcggcgcctccttctgcggactctgcgggaccctccccggcaggcgctgtgccctggagaaggcacagtggctcaggcatggccgcggggacggcggcgcggaaggcagcgccggtgctggaggcccccccgcagcaggagcagctctctcatacaaagctttctgcagaagacacatggaacctgcagcaggagaggatgtacaagatgcaccggggccacgattccatgcacgtggaaatgatcttgatcttcctctgcgttctggtcattgcccagatagtgctggttcagtggagacagaggcatggccgatcctacaatattggtctacaaatggtttcttttgatctacaaactcagctatgcatttggtgttgtgggttacttggcgatcatgtttacaatgtgtggattcaatctgtttttcaaaatcaaagctagagattccatggattttggcattgtgtctttgttctacggcctctactatggagtaatggggagagactttgccgagatctgctcagactacatggcttccactatagggttctacagtgtcagccggttgcctacaaggagcttatcggacaatatctgtgcagtctgtgggcagaagatcattgtggagcttgatgaagaagggctcattgaaaacacctaccagctttcctgtaatcatgtgtatccttttcaaaggaaattgtttgggcttcatcaagcctccttctttcctccttctcctcctcctcctcctgtccccatctcctccatcttgcttaccttccatgcccaaaccccagtcctttatcctccagcccagtcgagtcttcctgtttgtccctgctgaataatgaactgctaattaaggtgaacctcctcctccagtaatttcctttctaaagaggactgttaatgccacatagacaggaaggcagtatctgagcagggtgctggcaggggaaattggttgaagtcataagtgagcagatagccaacaaagatcagggaaagaaggggtttggaggtgagaaaaagagtgaagtatcaggtgcaggggggaacttaagactatccaagtggagcccaaggtctgaatcttagcagatcaagaaatacaaagagtgctttgcctagaaataatcctaggaacctacctgtggcaacagtagtcttgggggcagccaagggaggaaaccaagccttcttctcagcttcagtctttagaagaagatacagccacaggcagcaagacaccttggattacaaaagcagggaccaaaatttggacatttgttcttggaccatgggctcctccaccaatgggttctatcccaaatagctatccattggctgagggatcttcatatgataggtaccagacagcctgagcctggaaaccagcattctatgtgaactccagtaaccattaaggaaagcctcaatgtgctgaaaaatgctggcatcgagacccctgaacaaatcaacctgtgttgcctgaacatgtatggacactacttttgctatggataccaaagttaggcttaggttggccaatcatcagtattttaattcttcctaaatacaaaaaagggtatcatttatctttattttatagtacagtatcaatttaataatgtcatcgctatgtacccagttagttcaaagctctggcattatgagatggttaaaccatctgtcttttgcctaaagcccacttaatttagtcagtcatacctcggtgtccagtacctatgattcaattctgtttaatctggacagtttccacttattcaatcctgaaagtaaaaccaggaccaaatgcatctcaaaagtaataggagcctttactccaatacataagccttaaaatcttaagggaagaaacacaaagataccccatatggatttctgtagtggttttttcagtgtgatacctttcccaaaaaactcattctttgtagcaattttccaagtctggccctagttttaaatatgatttatttttcaaatgttggaacagagccccttctgccatttgcaaatggaaatgttttctctctccacctttaaaagcccttagggattgttgtacatgtgtgcatatataatctaaaatgtagtcacctttaaatttgcttttcagggagtattattaatggcccattttagcatgagtcatattagtgagaaatgggcaaatatgagtcatattaacaaggatgggttatctgagtcttgctctgcagaagttctgccagtgtgcaagtttttcagcattgagattttgaaaatgaaaaagaacattagagagaatgtggacatttctgtgctgactcaatggcccctgaattctatacctctgtagaagatggggctgtattccagcccttttgaatgaaaggctgtttgagttttggttcaaaatcttcgttataatacaccactttattttaaagcatattgcaaaaatgaccccaattccaagaacataaaataatggaaactcctggttacattgaaatttaatactgaggagttatatacatggccttgacttgctacacctccaagctcctccatttgttagggagggaacttctacatcgttgctgttcacctgggtgtgtagcaggccagtcagaagatcatgtgatcttggcccagaaagtcacattgggagcagcgattgtagaaataaacaaatcagtaggatggatttcattatagttcattttgcccaaatccatagtatcagggaacatggaaatatatattcccaaaaataatcagttttgaaagagtcattcaaatgttcattcaataaatatttcttaggcatggcttaaggtgctgaggacactgaaatgaatgagacatagtcctacaggtaacacatggtctaggagaaacatgtaagtaccaaaagtcctgctacactagagtaagtccctggtgctgtgagaacacatagggttcactcaagtttggggacaaagggtcagactttctggaccaggagacgtatacaaatggatctgtaaatgcctagagtttgagaagttaagtttagtaggtatatattctattaaaaataattggctccttatcagtacttttaaaagtcaag

SEQ ID NO: 177339 - DNA, 512 bp, Homo sapiens
  Payload ID: 14797
  Gene Symbol: RNF175
  Gene Name: ring finger protein 175
  ENST ID: ENST00000507512
  CDS Start-End: 12-218
gtggctcaggcatggccgcggggacggcggcgcggaaggcagcgccggtgctggaggcccccccgcagcaggagcagctctctcatacaaagctttctgcagaagacacatggaagttgagggctttttcagatgacctcattttgctggttccagcctgcagcaggagaggatgtacaagatgcaccggggccacgattccatgcacgtggaaatgatcttgatcttcctctgcgttctggtcattgcccagatagtgctggttcagtggagacagaggcatggccgatcctacaatctggtgaccttgttgcagatgtgggttgtccccttatatttcacgataaaattatactggtggcggtttctgtctatgtgggggatgttctccgttattaccagttacatcctcttcagagctacccgaaaacccctctcaggaaggacaccacgattggtctacaaatggtttcttttgatctacaaactcagctatgcatttggtgttgtgg

SEQ ID NO: 177340 - DNA, 585 bp, Homo sapiens
  Payload ID: 14797
  Gene Symbol: RNF175
  Gene Name: ring finger protein 175
  ENST ID: ENST00000508248
  CDS Start-End: 136-585
ggccgccgctccgccgccgccgcagatccggctctcaccctcggctcccgaggccccgcggcgcctccttctgcggactctgcgggaccctccccggcaggcgctgtgccctggagaaggcacagtggctcaggcatggccgcggggacggcggcgcggaaggcagcgccggtgctggaggcccccccgcagcaggagcagctggtgaccttgttgcagatgtgggttgtccccttatatttcacgataaaattatactggtggcggtttctgtctatgtgggggatgttctccgttattaccagttacatcctcttcagagctacccgaaaacccctctcaggaaggacaccacgattggtctacaaatggtttcttttgatctacaaactcagctatgcatttggtgttgtgggttacttggcgatcatgtttacaatgtgtggattcaatctgtttttcaaaatcaaagctagagattccatggattttggcattgtgtctttgttctacggcctctactatggagtaatggggagagactttgccgagatctgctcagactacatggcttccactataggg

SEQ ID NO: 177341 - DNA, 1727 bp, Homo sapiens
  Payload ID: 14798
  Gene Symbol: RNF180
  Gene Name: ring finger protein 180
  Uniprot ID: Q86T96
  ENST ID: ENST00000296615
  CDS Start-End: 111-1361
aaccggcatcgccgccgccggagccgcagcgagtcctcagagcctggctgctggcggccgggagcgccgggacggggcgcgaagccggaggctccgggacgtggatacagatgaaaagaagcaaagaattgataactaaaaatcatagtcaagaggaaacaagtattcttcgttgttggaaatgtagaaaatgtatagcaagctctggttgttttatggagtatcttgagaatcaagtgattaaggataaagatgattcagttgatgctcaaaatatttgtcatgtgtggcacatgaatgtagaagcccttccagaatggataagctgcctaatccaaaaagcccagtggacagttggaaaactgaattgtcctttctgtggggcccgtttagggggctttaattttgtcagcactccaaaatgttcctgtggccagcttgcagctgtacatctctccaagagccggactgattatcagccaacacaggcaggcagactaatgagaccatcagtgaaatacttgtcacatcctagagttcagtcaggttgtgacaaggaagctctgctgacaggtggtggctctgaaaacagaaatcacaggcttttaaacatggcccgaaataataatgaccctggaagattaacagaagcactctgcctggaggtgcgaccaacatattttgagatgaagaacgaaaaactgctgtccaaagcatcagaaccaaaataccagctttttgttccccagcttgtgactggcagatgcgctacaagagcttttcatagaaaatcacatagtttggatctgaacatcagtgagaaactgactttattacccactttatatgaaatacatagtaagactactgcctattccagactaaatgaaacacagcctattgacctttcaggcttgcctttacaatctagtaaaaatagctattcctttcagaatccatccagttttgatcctagtatgctgctgcaaagattttcagtggccccccatgagacccagacacaaagaggaggagaatttcagtgtggtctagaagctgcttcagtgtattctgaccatactaatactaacaatctgactttcctgatggacctgccctcagctggcaggagcatgccggaggcctcagaccaggaagagcacctctcccctctggacttcctgcactcagccaatttttcattgggcagcattaatcagaggcttaataagagagaaaggagcaagttgaagaatctaagaaggaaacaacgaaggcgtgaaagatggctacagaagcagggtaaatactcaggagtgggattgctggatcatatggtaagtatatatttacttatatgagaaattgtcaaattgttttccagaatggctgtaccattttgcattccaagcagcaaagacttccattttctgtgcgtccttgaaagcaagcactggtattctcagtgttttaaaattttagtcattcaaatacatagacagttgtatcacatcatgactttaatttgcttttccttaaggatgctgaacatatgtgcttattttacatttgtatatattctttagttaagtgtcttcaaatcttttgggctggtgtggcagcttatgtctataatcccagcacttttgagaggccaaggcaggaggattgcttgagttcaggagttcaagaccagcctgggcaacatagcaaaaccttatctctac

SEQ ID NO: 177342 - DNA, 4906 bp, Homo sapiens
  Payload ID: 14798
  Gene Symbol: RNF180
  Gene Name: ring finger protein 180
  Uniprot ID: Q86T96
  ENST ID: ENST00000389100
  CDS Start-End: 73-1851
agagcctggctgctggcggccgggagcgccgggacggggcgcgaagccggaggctccgggacgtggatacagatgaaaagaagcaaagaattgataactaaaaatcatagtcaagaggaaacaagtattcttcgttgttggaaatgtagaaaatgtatagcaagctctggttgttttatggagtatcttgagaatcaagtgattaaggataaagatgattcagttgatgctcaaaatatttgtcatgtgtggcacatgaatgtagaagcccttccagaatggataagctgcctaatccaaaaagcccagtggacagttggaaaactgaattgtcctttctgtggggcccgtttagggggctttaattttgtcagcactccaaaatgttcctgtggccagcttgcagctgtacatctctccaagagccggactgattatcagccaacacaggcaggcagactaatgagaccatcagtgaaatacttgtcacatcctagagttcagtcaggttgtgacaaggaagctctgctgacaggtggtggctctgaaaacagaaatcacaggcttttaaacatggcccgaaataataatgaccctggaagattaacagaagcactctgcctggaggtgcgaccaacatattttgagatgaagaacgaaaaactgctgtccaaagcatcagaaccaaaataccagctttttgttccccagcttgtgactggcagatgcgctacaagagcttttcatagaaaatcacatagtttggatctgaacatcagtgagaaactgactttattacccactttatatgaaatacatagtaagactactgcctattccagactaaatgaaacacagcctattgacctttcaggcttgcctttacaatctagtaaaaatagctattcctttcagaatccatccagttttgatcctagtatgctgctgcaaagattttcagtggccccccatgagacccagacacaaagaggaggagaatttcagtgtggtctagaagctgcttcagtgtattctgaccatactaatactaacaatctgactttcctgatggacctgccctcagctggcaggagcatgccggaggcctcagaccaggaagagcacctctcccctctggacttcctgcactcagccaatttttcattgggcagcattaatcagaggcttaataagagagaaaggagcaagttgaagaatctaagaaggaaacaacgaaggcgtgaaagatggctacagaagcagggtaaatactcaggagtgggattgctggatcatatgactttgaataatgagatgagtacagatgaagacaatgaatatgcagaagaaaaggatagctacatctgtgcagtgtgtctggacgtttatttcaacccttatatgtgttacccttgccatcacatcttctgtgagccctgcttacggactctggccaaagacaatccttcaagcactccatgcccattgtgtcggacaattatttctagagtctttttccaaacagaattgaacaatgccacaaaaactttctttactaaagaatatttgaaaataaaacaaagctttcagaaatccaactctgcaaaatggcccctaccaagctgcagaaaagcatttcatctttttggaggtttccgcagacatgcagctccagttacaagaaggcagttcccacacggtgcacacaggatggattacctgcactttgaggatgatagccgtggatggtggtttgacatggatatggtgatcatatatatttattcagtgaactgggtcattggattcattgttttctgctttctttgctattttttctttccgttttaggaatttcataccttactacaattgaccaatcataaatgatgtaaataacaattgcttaaacatttttaaatgtgctttgaagtttttttaatgttgcattatacaaattgttgatgtttatagaaagcctgagaataatgaatttatttattaatgtttttcatgtaacaaactaaactttattcaagagctaacctacccagcacttagcaacaatgcactattaatttcatagttgttcttgggttaggatttggggctctgattttataatatcactttaatacttattttgattgtaaaaaactgaagttttctctccacttaaaaatagtaaaaatacaaaaagaaatgataatctaggtagatattatctttactgataaaatatttagtcaatcaccacttattctcaggcaaattatatgtattaaagataaaccatattctctgggaactaatctagcagggtatattcagttttggtttctaattgtcactacttatatccctttctagtaccaagaaaactgactattctttttgtacagatctaattagtacaacattttaaattattataaacagaatactaaatacaaatcatgagactaatccctaccaataaacactttagctagctataaacactttccagattgaaggattaatcaccagaagacatgaaaaatttaccgacttttagtagtctaaaagagcaatgcatggtccaaaatgtaatttagtgattcatttaagtaggagatggtcaaatatattgtaaatgtgcaataaagagtggcttttaatttttttaatgtctgaataaagtattgttataaataggcttatcgattttagaaagaaaacctgacatttttaattacagtaatcattaatttttttcattattaaaatttaaaaataagagaactgaatcattagaacatggaattggggcaggtaacccaattcaaaaaaggaaaaactggagcagagacttaagcttatttattcagttattctggtggtctttgtgaaacctgggacaaagtttttattatgaattactaatccagtattactacactatgatgtcatatatctggtaattcaataagcaaacttttacataaaataggtgactctctcgtggcactaaaaatactaccactatccaaaaacattgggatcaactgggctttaacagtttcaatctatgaaaagccaaaatttaagctaattgctactaactgtatttcaataaaagcacttgactgttggtatgtgatgttctaagaaaactagaagaatggtactgatttctattctaatgctgttcttattattgtgttttaaattatatctattacagaaaatagtatacactagacatcaaatccagaaatcagaacactaagtacaatttagaaacacagataaatttatacttataaatggatatttataattactaattgctcaaagtaaacataagggaaaatatcagctctcttaaaatatatagcaagattgaaaacacacatatgaggagttgcattattttaagaactttaaattgcagccatttcctaggcaacttctggtttatacactctagaaaatatatcttgattcattcctaaatcacaataaaggttttaattatgtataaactaaataagtattattatagatacagatctctcataggaacaaagttgattcccaatatatatttgttaggtcagtgatacatatcagtttatagatctcagtctactaaatatttatgatacccttaaataaacatgaacctttaaatgaagaaagcataatctggaaaagcattcaaaatggattgagtatatttatcttgactaataacttgatctgaaaattatagaatattaaaagaagtaaattcataaaattataaattactaatctttaaaatattcttaaattttgtaaaagtggagataaaaactgctaaatattaagaagtatagcatttcctagatctaccagcttataagaagccagataaaatctcagatggaaagaaaccagtttcttctggtatgtagcacacagtagccattcaaaataaaatacatggatgagctttagagtaaaacaaaaaattataatgctcttcctaagcatctctcacagtaaaaactcactgtccaataaagagccaaagaaaggaaaagaagaaaaatgttaaagttaatgaagcatagtacttgtcccaagtaatattatttaataagcttaattttatgagttatcattatcaataatttctatttctaccaagcttaattatggtaaaggttaattttaaacatgttcacacattcttttttaaaaaaatgccctaattgaggtatatttctgaatagtttcagcaggttattttttaattttaaaaaagcaaattcacaaacctagacccatttattttatactcagcagaagacagggaaatttaaattagacaaagttgaaaaagaatcagaatttatattttacaaagcttctaccactctgaatcaacaaaatcaggaatggaaaaaaaaatttctgtatctgctgaattattaatgccactatagtattatatgctaaatatgaaagcagtgctgccatcagtttcacttctgccttggaatcttgctcctaagttagctctgtggcataacaaaattccagttaataaaattttcatttaaatgtcttttgtatggctaaatgaatatacagattcttaaacatctaatttttatatggatttctcaaagaatgccttacagaagagcattctctgattaaatgcaattacagttggagtctttgattcttcacagaattctgtagttgaagccagaaaacactgtcatttaggaaagtgttcctaaaggtttgaatgctttaacatgctcaactcttacttcttgaagtgtttgattgtcagtaaattttcgaagaacattaaagttctaccaatgtagaagcatgaggaataaaagatggtctggatcaagaa

SEQ ID NO: 177343 - DNA, 421 bp, Homo sapiens
  Payload ID: 14798
  Gene Symbol: RNF180
  Gene Name: ring finger protein 180
  ENST ID: ENST00000504296
  CDS Start-End: 101-421
tcgcacctgaggctctcggagcggcctcggggcgcgcccacctggaggttggaattacacagggtcgaaaaagctgagtcctggaggcgaggcgctgtagatgaaaagaagcaaagaattgataactaaaaatcatagtcaagaggaaacaagtattcttcgttgttggaaatgtagaaaatgtatagcaagctctggttgttttatggagtatcttgagaatcaagtgattaaggataaagatgattcagttgatgctcaaaatatttgtcatgtgtggcacatgaatgtagaagcccttccagaatggataagctgcctaatccaaaaagcccagtggacagttggaaaactgaattgtcctttctgtggggcccgtttagggggctttaattttgtcagcactccaaaatgttcctgt

SEQ ID NO: 177344 - DNA, 569 bp, Homo sapiens
  Payload ID: 14799
  Gene Symbol: RNF181
  Gene Name: ring finger protein 181
  Uniprot ID: Q9P0P0
  ENST ID: ENST00000306368
  CDS Start-End: 31-492
ccgagggctgtgtcagaaggctgggcagccatggcgtcctatttcgatgaacacgactgcgagccgtcggaccctgagcaggagacgcgaaccaacatgctgctggagctcgcaaggtcacttttcaataggatggactttgaagacttggggttggtagtagattgggaccaccacctgcctccaccagctgccaagactgtggttgagaacctccccaggacagtcatcagaggctctcaggctgagctcaagtgccccgtgtgtcttttggaatttgaggaggaggagactgccattgagatgccttgccatcaccttttccattccagctgcattctgccctggctaagcaagacaaattcctgtcccttgtgccgctatgagctgcccactgatgacgacacttatgaggagcacagacgagataaggctcgaaaacagcagcagcaacaccgactggagaacctccatggagccatgtacacgtgaggaggttggggctgagtgctggccctctgcgtcttccttattaaccttgaatcctcattaaaggtttctttacccac

SEQ ID NO: 177345 - DNA, 535 bp, Homo sapiens
  Payload ID: 14799
  Gene Symbol: RNF181
  Gene Name: ring finger protein 181
  ENST ID: ENST00000443647
  CDS Start-End: 9-245
gggcagccatggcgtcctatttcgatgaacacgactgcgagccgtcggaccctgagcaggagacgcgaaccaacatgctgctggagctcgcaaggtcacttttcaataggatggactttgaagacttggggttggtagtagattgggaccaccacctgcctccaccagctgccaagactgtggttgagaacctccccaggacagtcatcagaggctctcaggctggaggaggagactgccattgagatgccttgccatcaccttttccattccagctgcattctgccctggctaagcaagacaaattcctgtcccttgtgccgctatgagctgcccactgatgacgacacttatgaggagcacagacgagataaggctcgaaaacagcagcagcaacaccgactggagaacctccatggagccatgtacacgtgaggaggttggggctgagtgctggccctctgcgtcttccttattaaccttgaatcctcattaaaggtttctttacccaccctgaggctgtattgatcacaga

SEQ ID NO: 177346 - DNA, 327 bp, Homo sapiens
  Payload ID: 14799
  Gene Symbol: RNF181
  Gene Name: ring finger protein 181
  ENST ID: ENST00000414390
  CDS Start-End: 17-327
agaaggctgggcagccatggcgtcctatttcgatgaacacgactgcgagccgtcggaccctgagcaggagacgcgaaccaacatgctgctggagctcgcaaggtcacttttcaataggatggactttgaagacttggggttggtagtagattgggaccaccacctgcctccaccagctgccaagactgtggttgagaacctccccaggacagtcatcagaggctctcaggctgttttccaggtcaggtgggggcaagtgtccttcaggagtgggagcttgggaggcagagcctgtagcagctctcctgatcagcactccttcctaaa

SEQ ID NO: 177347 - DNA, 844 bp, Homo sapiens
  Payload ID: 14799
  Gene Symbol: RNF181
  Gene Name: ring finger protein 181
  ENST ID: ENST00000441634
  CDS Start-End: 40-459
gagcagggtccgagggctgtgtcagaaggctgggcagccatggcgtcctatttcgatgaacacgactgcgagccgtcggaccctgagcaggagacgcgaaccaacatgctgctggagctcgcaaggtcacttttcaataggatggactttgaagacttggggttggtagtagattgggaccaccacctgcctccaccagctgccaagactgtggttgagaacctccccaggacagtcatcagaggctctcaggctgagctcaagtgccccgtgtgtcttttggaatttgaggaggaggagactgccattgagatgccttgccatcaccttttccattccagctgcattctgccctggctaagcaagacaaattcctgtcccttgtgccgctatgagctgcccactgatgacgacacttatgaggagcacagacgagataaggtaggggctgatgcttaagtggaggggtcgtaatgggctccctgagtcctgtccccgctgccatcacttcccacctcagcaggactgggtaggcctcagaatccctggctctggctgtcttcttagtgactttgatttgtggtgagagcctcagcaatgcagacgccagaggcctgaaaacagagccagccccataatagctgcccatcccctcacccataggccttcagttttggcccctgcccagcatgccttctttccttcaggctcgaaaacagcagcagcaacaccgactggagaacctccatggagccatgtacacgtgaggaggttggggctgagtgctggccctctgcgtcttccttattaaccttgaatcctcattaaaggtttctttacccac

SEQ ID NO: 177348 - DNA, 559 bp, Homo sapiens
  Payload ID: 14799
  Gene Symbol: RNF181
  Gene Name: ring finger protein 181
  ENST ID: ENST00000456023
  CDS Start-End: 1-511
gacgcgaaccaacatgctgctggagctcgcaaggtcacttttcaataggatggactttgaagacttggggttggtagtagattgggaccaccacctgcctccaccagctgccaagactgtggttgagaacctccccaggacagtcatcagaggctctcaggctgctctcaccgtgccctgggcccagtactcaagcttctttctgttcatggactgctgggggatggaagaagagtggcagttgggagcaggggagggtggttatcagcttatgaagatcagaccaaggctagaacactactctacttttctcagacaaattcctgtcccttgtgccgctatgagctgcccactgatgacgacacttatgaggagcacagacgagataaggctcgaaaacagcagcagcaacaccgactggagaacctccatggagccatgtacacgtgaggaggttggggctgagtgctggccctctgcgtcttccttattaaccttgaatcctcattaaaggtttctttacccaccctgaggctgtattgatcacagacctggccag

SEQ ID NO: 177349 - DNA, 646 bp, Homo sapiens
  Payload ID: 14800
  Gene Symbol: RNF182
  Gene Name: ring finger protein 182
  ENST ID: ENST00000488763
  CDS Start-End: 494-646
gtgcatgctgcggcagttgcaacaggagaaccgagtaccagttgctcaacactttatcactttgcattgctctttctcctcccttaagtgaatttccattttgagggtacagctccacaggagaaaggaagaaatacttgtgttggctgcatttccagggatgctaccagagctcaaggctgtcacctggtcttgcccagaagagccgttcttagaggcaggacttgatgaaggctttcctgctgatggaataggtttgctagagctggccttggaattagaacccttcatgtggcctttataaatatgcgtttgagacagagttatatgcagaagttgaaaatgcctggaagatttctggtttctttcactacttatcctgcctttttgcatcgctgccagatttggatgatatgatattcagaggggcaccttaatcaaagccattcttcaacaagacccacctggcataagattgcacacataattcaagatggccagtcaacctcctgaagacactgcggagtctcaggcctctgatgagctggagtgcaaaatctgttacaatcgatacaatctgaaacagaggaaacccaaagtgctggagtgttgtcatagggtttgtgccaaatgcctctacaagatc

SEQ ID NO: 177350 - DNA, 557 bp, Homo sapiens
  Payload ID: 14800
  Gene Symbol: RNF182
  Gene Name: ring finger protein 182
  ENST ID: ENST00000471906
  CDS Start-End: 519-557
aacctccctcccctcccaggcgccgccgcagccggagcggctcccgggccctgggccgccgccggccagactgcctgcaagggatggtcatactcctggctgcacttccagagtcttgaagaagaaagcagatgtggatacctaaatatagggaagaaatacttgtgttggctgcatttccagggatgctaccagagctcaaggctgtcacctggtcttgcccagaagagccgttcttagaggcaggacttgatgaaggctttcctgctgatggaataggtttgctagagctggccttggaattagaacccttcatgtggcctttataaatatgcgtttgagacagagttatatgcagaagttgaaaatgcctggaagatttctggtttctttcactacttatcctgcctttttgcatcgctgccagatttggatgatatgatattcagaggggcaccttaatcaaagccattcttcaacaagacccacctggcataagattgcacacataattcaagatggccagtcaacctcctgaagacactgcggagtctcag

SEQ ID NO: 177351 - DNA, 633 bp, Homo sapiens
  Payload ID: 14800
  Gene Symbol: RNF182
  Gene Name: ring finger protein 182
  ENST ID: ENST00000423553
  CDS Start-End: 386-633
gtctccctccgggcaccacgggggccgccgtcctggcaccaacttgaggggctgtgcggcggagggcggctgcggagcgcccgcgcgggctgcacctgctcagggagctgcccctctgttgttgttgttattttccttcttggcgtgccatcgaggcttttgggggaaaaaaagacccttcatgtggcctttataaatatgcgtttgagacagagttatatgcagaagttgaaaatgcctggaagatttctggtttctttcactacttatcctgcctttttgcatcgctgccagatttggatgatatgatattcagaggggcaccttaatcaaagccattcttcaacaagacccacctggcataagattgcacacataattcaagatggccagtcaacctcctgaagacactgcggagtctcaggcctctgatgagctggagtgcaaaatctgttacaatcgatacaatctgaaacagaggaaacccaaagtgctggagtgttgtcatagggtttgtgccaaatgcctctacaagatcatagactttggggactccccacaaggtgtcattgtctgtcctttctgcaggtttgagacgtgcctgccagatgatgaagttagtagcctgcccga

SEQ ID NO: 177352 - DNA, 826 bp, Homo sapiens
  Payload ID: 14800
  Gene Symbol: RNF182
  Gene Name: ring finger protein 182
  ENST ID: ENST00000420478
  CDS Start-End: 340-826
agacaaagccgcccgcccgccagcccgctagctcctcgcgcgagctcctcctccacgggaacctccctcccctcccaggcgccgccgcagccggagcggctcccgggccctgggccgccgccggccagacccttcatgtggcctttataaatatgcgtttgagacagagttatatgcagaagttgaaaatgcctggaagatttctggtttctttcactacttatcctgcctttttgcatcgctgccagatttggatgatatgatattcagaggggcaccttaatcaaagccattcttcaacaagacccacctggcataagattgcacacataattcaagatggccagtcaacctcctgaagacactgcggagtctcaggcctctgatgagctggagtgcaaaatctgttacaatcgatacaatctgaaacagaggaaacccaaagtgctggagtgttgtcatagggtttgtgccaaatgcctctacaagatcatagactttggggactccccacaaggtgtcattgtctgtcctttctgcaggtttgagacgtgcctgccagatgatgaagttagtagcctgcccgatgacaacaacatccttgtaaacttgacttgtggaggcaaagggaagaagtgcctgccagagaaccctactgagctgctgctcacccccaagaggctggcctctctggtcagtccttctcacacgtcctccaactgcctggtcataaccatcatggaggtgcagagagagagctccccgtccctgagctccactcctgtggtagaattttataggcctgcgagtttcgactctgtcacca

SEQ ID NO: 177353 - DNA, 3706 bp, Homo sapiens
  Payload ID: 14800
  Gene Symbol: RNF182
  Gene Name: ring finger protein 182
  Uniprot ID: Q8N6D2
  ENST ID: ENST00000488300
  CDS Start-End: 524-1267
gacgcagggtcggcggctcagcgccgtagagacaaagccgcccgcccgccagcccgctagctcctcgcgcgagctcctcctccacgggaacctccctcccctcccaggcgccgccgcagccggagcggctcccgggccctgggccgccgccggccaggaagaaatacttgtgttggctgcatttccagggatgctaccagagctcaaggctgtcacctggtcttgcccagaagagccgttcttagaggcaggacttgatgaaggctttcctgctgatggaataggtttgctagagctggccttggaattagaacccttcatgtggcctttataaatatgcgtttgagacagagttatatgcagaagttgaaaatgcctggaagatttctggtttctttcactacttatcctgcctttttgcatcgctgccagatttggatgatatgatattcagaggggcaccttaatcaaagccattcttcaacaagacccacctggcataagattgcacacataattcaagatggccagtcaacctcctgaagacactgcggagtctcaggcctctgatgagctggagtgcaaaatctgttacaatcgatacaatctgaaacagaggaaacccaaagtgctggagtgttgtcatagggtttgtgccaaatgcctctacaagatcatagactttggggactccccacaaggtgtcattgtctgtcctttctgcaggtttgagacgtgcctgccagatgatgaagttagtagcctgcccgatgacaacaacatccttgtaaacttgacttgtggaggcaaagggaagaagtgcctgccagagaaccctactgagctgctgctcacccccaagaggctggcctctctggtcagtccttctcacacgtcctccaactgcctggtcataaccatcatggaggtgcagagagagagctccccgtccctgagctccactcctgtggtagaattttataggcctgcgagtttcgactctgtcaccactgtgtcacacaactggactgtgtggaactgcacgtccctgctgtttcagacatccatccgggtgttagtgtggttgctaggtttgctctacttcagctccttacccttaggaatctacttactggtgtctaagaaagtcacccttggggtcgtctttgtcagcctggtcccttcgagcctcgttattcttatggtgtatggtttttgccagtgtgtttgtcatgaatttctagactgtatggcacctccttcttaactgatatgcaaaataagaaattggacacacattgccctgtttgagtgtgaagttagataatttataatttattttcttttatgttctttatgattagtatccatgacattaacaaaacccttggccacatgttgacttgattggttttcctgtaggctggaagtaaaaatgttcatttctacttaggggttagcaaaattgtataagctcacacttcatggagcactgacagcagtgagtcttcccagagaaaggacagggtttctctcagcactgccagacagacggcaggggtgtggtgtgttatactatagggagagcatggatccctcctttcgtattcatggatgttctatgatggcagttggacacaagaggaaagttgctctgagacacaaagtgtgtactcctttcccaccccatacccctggtattggaacaccctagaattgtcttcaggtgttttctctcttaagtcactctctgtggtcggcgatcccattgagatacttgtttcctctgcccattctcccttgccaagaggaaactcggttccattcccttgggtagtttcaactgaataccagttttgccacattactaaggagaatgaaaagcactgaggaatttgcatcacagtcagcttcatggcagaatgtggccatttgtccttgagacacactctttcctccatgtctgttttcctctctcctcagtcttatctgagaagaatggaggagaaggaacttctcatacagcggttattattgatgaaaaccttcatttgagtctttccttataacatcttagttttggtttttttaaaccacattgcccaatcagcctcaccccttgtcctgaaaaggttccatttaaattagttgctataaattcatcaatactttttttccctattatatttttggttctattaggatttacttaactgaatcttataacaattcgaggtgaactgtggcaatgaaaaccagaaacagttaatgagatgcttcagctcacagtttgaagtgctgagaacctaagtattttgctgtacggtactgagctgtaccaaaatatgatggtttaggtttatgtgcaagactttgtgttgtagtctagacaaaggggtgggcaagagacatgcaaagctgaagccctgcttgaaaagacccttcaaggaagtaaaatggcaggggcagagtgcagcttaacatgttgctatccctgttgtttttgagttggttttggaatggattcaagttcttacacaatttattttgaatacaagcataatctaggtgatttgagttaatgaacttcttttcatgatgtagggaaagttgaatgtatatatttctaagaagaatttgtttagcagattacaagttggcaaaatagactgttcacagaaactaggcaaaaatttaaaaaaacattctagtctctaaaacccattactaatgattaacattaaaatatttgtaactcttagaaagggggcattactaagacgactttaacttgttatgaaatctttgttgtgtgatgcaggtacagtgcgcccattccaactggaatagcagtttgattttaattgtaaaactaaacttcgggaatatgtatgcccaaagtaagtaggatgagaatagtatacatgggatatggtccaatgaatttaagccccaagatacagctaaatacatttatgatttcataaaatctagtttagatagcattgtgatgcaatttccagaaatccatttgtgtttagagtaaataccatgtttagaagatgttttgtggtttggatttatatatttgtaaggtttttttaaaaaaatgttcgttttgtttgaaatgtaacattgagtaaattggtgagttatataatgagatttctagaaagctctggacatgggtacgatgtgttttgcttctctgtataatgtctacagtgataaacttgtgtctccgtgtattgtggcagtctttttttctagttaatttggctttagagagcaatctttgtatgacaccagaaaactcttcatgctattgaatgataaaaagataatgctttaatattttattcactgtgatactattttgtttgtctattaaattgttattatttccaaatttagaagtttgatttctctgacttatggttaaaattcagttatgactttgcacctctgttagctttagataacggcaaacatgaacattcagaaacgttggttcagctaatgcctttatcatgcccgtgaagacttcagaactttccaacaaaggggacctaacccatcacacttttaaaaggccttcatagtttttttattttattttattttattttattttattttattttatttatttattttaaagcaggggagaaaaattaggggagatgaaataaaaatatcgtcttta

SEQ ID NO: 177354 - DNA, 3274 bp, Homo sapiens
  Payload ID: 14800
  Gene Symbol: RNF182
  Gene Name: ring finger protein 182
  Uniprot ID: Q8N6D2
  ENST ID: ENST00000537388
  CDS Start-End: 386-1129
gtctccctccgggcaccacgggggccgccgtcctggcaccaacttgaggggctgtgcggcggagggcggctgcggagcgcccgcgcgggctgcacctgctcagggagctgcccctctgttgttgttgttattttccttcttggcgtgccatcgaggcttttgggggaaaaaaagacccttcatgtggcctttataaatatgcgtttgagacagagttatatgcagaagttgaaaatgcctggaagatttctggtttctttcactacttatcctgcctttttgcatcgctgccagatttggatgatatgatattcagaggggcaccttaatcaaagccattcttcaacaagacccacctggcataagattgcacacataattcaagatggccagtcaacctcctgaagacactgcggagtctcaggcctctgatgagctggagtgcaaaatctgttacaatcgatacaatctgaaacagaggaaacccaaagtgctggagtgttgtcatagggtttgtgccaaatgcctctacaagatcatagactttggggactccccacaaggtgtcattgtctgtcctttctgcaggtttgagacgtgcctgccagatgatgaagttagtagcctgcccgatgacaacaacatccttgtaaacttgacttgtggaggcaaagggaagaagtgcctgccagagaaccctactgagctgctgctcacccccaagaggctggcctctctggtcagtccttctcacacgtcctccaactgcctggtcataaccatcatggaggtgcagagagagagctccccgtccctgagctccactcctgtggtagaattttataggcctgcgagtttcgactctgtcaccactgtgtcacacaactggactgtgtggaactgcacgtccctgctgtttcagacatccatccgggtgttagtgtggttgctaggtttgctctacttcagctccttacccttaggaatctacttactggtgtctaagaaagtcacccttggggtcgtctttgtcagcctggtcccttcgagcctcgttattcttatggtgtatggtttttgccagtgtgtttgtcatgaatttctagactgtatggcacctccttcttaactgatatgcaaaataagaaattggacacacattgccctgtttgagtgtgaagttagataatttataatttattttcttttatgttctttatgattagtatccatgacattaacaaaacccttggccacatgttgacttgattggttttcctgtaggctggaagtaaaaatgttcatttctacttaggggttagcaaaattgtataagctcacacttcatggagcactgacagcagtgagtcttcccagagaaaggacagggtttctctcagcactgccagacagacggcaggggtgtggtgtgttatactatagggagagcatggatccctcctttcgtattcatggatgttctatgatggcagttggacacaagaggaaagttgctctgagacacaaagtgtgtactcctttcccaccccatacccctggtattggaacaccctagaattgtcttcaggtgttttctctcttaagtcactctctgtggtcggcgatcccattgagatacttgtttcctctgcccattctcccttgccaagaggaaactcggttccattcccttgggtagtttcaactgaataccagttttgccacattactaaggagaatgaaaagcactgaggaatttgcatcacagtcagcttcatggcagaatgtggccatttgtccttgagacacactctttcctccatgtctgttttcctctctcctcagtcttatctgagaagaatggaggagaaggaacttctcatacagcggttattattgatgaaaaccttcatttgagtctttccttataacatcttagttttggtttttttaaaccacattgcccaatcagcctcaccccttgtcctgaaaaggttccatttaaattagttgctataaattcatcaatactttttttccctattatatttttggttctattaggatttacttaactgaatcttataacaattcgaggtgaactgtggcaatgaaaaccagaaacagttaatgagatgcttcagctcacagtttgaagtgctgagaacctaagtattttgctgtacggtactgagctgtaccaaaatatgatggtttaggtttatgtgcaagactttgtgttgtagtctagacaaaggggtgggcaagagacatgcaaagctgaagccctgcttgaaaagacccttcaaggaagtaaaatggcaggggcagagtgcagcttaacatgttgctatccctgttgtttttgagttggttttggaatggattcaagttcttacacaatttattttgaatacaagcataatctaggtgatttgagttaatgaacttcttttcatgatgtagggaaagttgaatgtatatatttctaagaagaatttgtttagcagattacaagttggcaaaatagactgttcacagaaactaggcaaaaatttaaaaaaacattctagtctctaaaacccattactaatgattaacattaaaatatttgtaactcttagaaagggggcattactaagacgactttaacttgttatgaaatctttgttgtgtgatgcaggtacagtgcgcccattccaactggaatagcagtttgattttaattgtaaaactaaacttcgggaatatgtatgcccaaagtaagtaggatgagaatagtatacatgggatatggtccaatgaatttaagccccaagatacagctaaatacatttatgatttcataaaatctagtttagatagcattgtgatgcaatttccagaaatccatttgtgtttagagtaaataccatgtttagaagatgttttgtggtttggatttatatatttgtaaggtttttttaaaaaaatgttcgttttgtttgaaatgtaacattgagtaaattggtgagttatataatgagatttctagaaagctctggacatgggtacgatgtgttttgcttctctgtataatgtctacagtgataaacttgtgtctccgtgtattgtggcagtctttttttctagttaatttggctttagagagcaatctttgtatgacaccagaaaactcttcatgctattgaatgataaaaagataatgctttaatattttattcactgtgatactattttgtttgtctattaaattgttattatttccaaattt

SEQ ID NO: 177355 - DNA, 3495 bp, Homo sapiens
  Payload ID: 14800
  Gene Symbol: RNF182
  Gene Name: ring finger protein 182
  Uniprot ID: Q8N6D2
  ENST ID: ENST00000544682
  CDS Start-End: 607-1350
gacgcagggtcggcggctcagcgccgtagagacaaagccgcccgcccgccagcccgctagctcctcgcgcgagctcctcctccacgggaacctccctcccctcccaggcgccgccgcagccggagcggctcccgggccctgggccgccgccggccagactgcctgcaagggatggtcatactcctggctgcacttccagagtcttgaagaagaaagcagatgtggatacctaaatatagggaagaaatacttgtgttggctgcatttccagggatgctaccagagctcaaggctgtcacctggtcttgcccagaagagccgttcttagaggcaggacttgatgaaggctttcctgctgatggaataggtttgctagagctggccttggaattagaacccttcatgtggcctttataaatatgcgtttgagacagagttatatgcagaagttgaaaatgcctggaagatttctggtttctttcactacttatcctgcctttttgcatcgctgccagatttggatgatatgatattcagaggggcaccttaatcaaagccattcttcaacaagacccacctggcataagattgcacacataattcaagatggccagtcaacctcctgaagacactgcggagtctcaggcctctgatgagctggagtgcaaaatctgttacaatcgatacaatctgaaacagaggaaacccaaagtgctggagtgttgtcatagggtttgtgccaaatgcctctacaagatcatagactttggggactccccacaaggtgtcattgtctgtcctttctgcaggtttgagacgtgcctgccagatgatgaagttagtagcctgcccgatgacaacaacatccttgtaaacttgacttgtggaggcaaagggaagaagtgcctgccagagaaccctactgagctgctgctcacccccaagaggctggcctctctggtcagtccttctcacacgtcctccaactgcctggtcataaccatcatggaggtgcagagagagagctccccgtccctgagctccactcctgtggtagaattttataggcctgcgagtttcgactctgtcaccactgtgtcacacaactggactgtgtggaactgcacgtccctgctgtttcagacatccatccgggtgttagtgtggttgctaggtttgctctacttcagctccttacccttaggaatctacttactggtgtctaagaaagtcacccttggggtcgtctttgtcagcctggtcccttcgagcctcgttattcttatggtgtatggtttttgccagtgtgtttgtcatgaatttctagactgtatggcacctccttcttaactgatatgcaaaataagaaattggacacacattgccctgtttgagtgtgaagttagataatttataatttattttcttttatgttctttatgattagtatccatgacattaacaaaacccttggccacatgttgacttgattggttttcctgtaggctggaagtaaaaatgttcatttctacttaggggttagcaaaattgtataagctcacacttcatggagcactgacagcagtgagtcttcccagagaaaggacagggtttctctcagcactgccagacagacggcaggggtgtggtgtgttatactatagggagagcatggatccctcctttcgtattcatggatgttctatgatggcagttggacacaagaggaaagttgctctgagacacaaagtgtgtactcctttcccaccccatacccctggtattggaacaccctagaattgtcttcaggtgttttctctcttaagtcactctctgtggtcggcgatcccattgagatacttgtttcctctgcccattctcccttgccaagaggaaactcggttccattcccttgggtagtttcaactgaataccagttttgccacattactaaggagaatgaaaagcactgaggaatttgcatcacagtcagcttcatggcagaatgtggccatttgtccttgagacacactctttcctccatgtctgttttcctctctcctcagtcttatctgagaagaatggaggagaaggaacttctcatacagcggttattattgatgaaaaccttcatttgagtctttccttataacatcttagttttggtttttttaaaccacattgcccaatcagcctcaccccttgtcctgaaaaggttccatttaaattagttgctataaattcatcaatactttttttccctattatatttttggttctattaggatttacttaactgaatcttataacaattcgaggtgaactgtggcaatgaaaaccagaaacagttaatgagatgcttcagctcacagtttgaagtgctgagaacctaagtattttgctgtacggtactgagctgtaccaaaatatgatggtttaggtttatgtgcaagactttgtgttgtagtctagacaaaggggtgggcaagagacatgcaaagctgaagccctgcttgaaaagacccttcaaggaagtaaaatggcaggggcagagtgcagcttaacatgttgctatccctgttgtttttgagttggttttggaatggattcaagttcttacacaatttattttgaatacaagcataatctaggtgatttgagttaatgaacttcttttcatgatgtagggaaagttgaatgtatatatttctaagaagaatttgtttagcagattacaagttggcaaaatagactgttcacagaaactaggcaaaaatttaaaaaaacattctagtctctaaaacccattactaatgattaacattaaaatatttgtaactcttagaaagggggcattactaagacgactttaacttgttatgaaatctttgttgtgtgatgcaggtacagtgcgcccattccaactggaatagcagtttgattttaattgtaaaactaaacttcgggaatatgtatgcccaaagtaagtaggatgagaatagtatacatgggatatggtccaatgaatttaagccccaagatacagctaaatacatttatgatttcataaaatctagtttagatagcattgtgatgcaatttccagaaatccatttgtgtttagagtaaataccatgtttagaagatgttttgtggtttggatttatatatttgtaaggtttttttaaaaaaatgttcgttttgtttgaaatgtaacattgagtaaattggtgagttatataatgagatttctagaaagctctggacatgggtacgatgtgttttgcttctctgtataatgtctacagtgataaacttgtgtctccgtgtattgtggcagtctttttttctagttaatttggctttagagagcaatctttgtatgacaccagaaaactcttcatgctattgaatgataaaaagataatgctttaatattttattcactgtgatactattttgtttgtctattaaattgttattatttccaaattt

SEQ ID NO: 177356 - DNA, 3382 bp, Homo sapiens
  Payload ID: 14800
  Gene Symbol: RNF182
  Gene Name: ring finger protein 182
  Uniprot ID: Q8N6D2
  ENST ID: ENST00000537663
  CDS Start-End: 494-1237
gtgcatgctgcggcagttgcaacaggagaaccgagtaccagttgctcaacactttatcactttgcattgctctttctcctcccttaagtgaatttccattttgagggtacagctccacaggagaaaggaagaaatacttgtgttggctgcatttccagggatgctaccagagctcaaggctgtcacctggtcttgcccagaagagccgttcttagaggcaggacttgatgaaggctttcctgctgatggaataggtttgctagagctggccttggaattagaacccttcatgtggcctttataaatatgcgtttgagacagagttatatgcagaagttgaaaatgcctggaagatttctggtttctttcactacttatcctgcctttttgcatcgctgccagatttggatgatatgatattcagaggggcaccttaatcaaagccattcttcaacaagacccacctggcataagattgcacacataattcaagatggccagtcaacctcctgaagacactgcggagtctcaggcctctgatgagctggagtgcaaaatctgttacaatcgatacaatctgaaacagaggaaacccaaagtgctggagtgttgtcatagggtttgtgccaaatgcctctacaagatcatagactttggggactccccacaaggtgtcattgtctgtcctttctgcaggtttgagacgtgcctgccagatgatgaagttagtagcctgcccgatgacaacaacatccttgtaaacttgacttgtggaggcaaagggaagaagtgcctgccagagaaccctactgagctgctgctcacccccaagaggctggcctctctggtcagtccttctcacacgtcctccaactgcctggtcataaccatcatggaggtgcagagagagagctccccgtccctgagctccactcctgtggtagaattttataggcctgcgagtttcgactctgtcaccactgtgtcacacaactggactgtgtggaactgcacgtccctgctgtttcagacatccatccgggtgttagtgtggttgctaggtttgctctacttcagctccttacccttaggaatctacttactggtgtctaagaaagtcacccttggggtcgtctttgtcagcctggtcccttcgagcctcgttattcttatggtgtatggtttttgccagtgtgtttgtcatgaatttctagactgtatggcacctccttcttaactgatatgcaaaataagaaattggacacacattgccctgtttgagtgtgaagttagataatttataatttattttcttttatgttctttatgattagtatccatgacattaacaaaacccttggccacatgttgacttgattggttttcctgtaggctggaagtaaaaatgttcatttctacttaggggttagcaaaattgtataagctcacacttcatggagcactgacagcagtgagtcttcccagagaaaggacagggtttctctcagcactgccagacagacggcaggggtgtggtgtgttatactatagggagagcatggatccctcctttcgtattcatggatgttctatgatggcagttggacacaagaggaaagttgctctgagacacaaagtgtgtactcctttcccaccccatacccctggtattggaacaccctagaattgtcttcaggtgttttctctcttaagtcactctctgtggtcggcgatcccattgagatacttgtttcctctgcccattctcccttgccaagaggaaactcggttccattcccttgggtagtttcaactgaataccagttttgccacattactaaggagaatgaaaagcactgaggaatttgcatcacagtcagcttcatggcagaatgtggccatttgtccttgagacacactctttcctccatgtctgttttcctctctcctcagtcttatctgagaagaatggaggagaaggaacttctcatacagcggttattattgatgaaaaccttcatttgagtctttccttataacatcttagttttggtttttttaaaccacattgcccaatcagcctcaccccttgtcctgaaaaggttccatttaaattagttgctataaattcatcaatactttttttccctattatatttttggttctattaggatttacttaactgaatcttataacaattcgaggtgaactgtggcaatgaaaaccagaaacagttaatgagatgcttcagctcacagtttgaagtgctgagaacctaagtattttgctgtacggtactgagctgtaccaaaatatgatggtttaggtttatgtgcaagactttgtgttgtagtctagacaaaggggtgggcaagagacatgcaaagctgaagccctgcttgaaaagacccttcaaggaagtaaaatggcaggggcagagtgcagcttaacatgttgctatccctgttgtttttgagttggttttggaatggattcaagttcttacacaatttattttgaatacaagcataatctaggtgatttgagttaatgaacttcttttcatgatgtagggaaagttgaatgtatatatttctaagaagaatttgtttagcagattacaagttggcaaaatagactgttcacagaaactaggcaaaaatttaaaaaaacattctagtctctaaaacccattactaatgattaacattaaaatatttgtaactcttagaaagggggcattactaagacgactttaacttgttatgaaatctttgttgtgtgatgcaggtacagtgcgcccattccaactggaatagcagtttgattttaattgtaaaactaaacttcgggaatatgtatgcccaaagtaagtaggatgagaatagtatacatgggatatggtccaatgaatttaagccccaagatacagctaaatacatttatgatttcataaaatctagtttagatagcattgtgatgcaatttccagaaatccatttgtgtttagagtaaataccatgtttagaagatgttttgtggtttggatttatatatttgtaaggtttttttaaaaaaatgttcgttttgtttgaaatgtaacattgagtaaattggtgagttatataatgagatttctagaaagctctggacatgggtacgatgtgttttgcttctctgtataatgtctacagtgataaacttgtgtctccgtgtattgtggcagtctttttttctagttaatttggctttagagagcaatctttgtatgacaccagaaaactcttcatgctattgaatgataaaaagataatgctttaatattttattcactgtgatactattttgtttgtctattaaattgttattatttccaaattt

SEQ ID NO: 177357 - DNA, 1366 bp, Homo sapiens
  Payload ID: 14801
  Gene Symbol: RNF183
  Gene Name: ring finger protein 183
  Uniprot ID: Q96D59
  ENST ID: ENST00000441031
  CDS Start-End: 275-853
ccccaccccccaggaagctctctggccttggctccaagcaggtgtgctcaagaggctgccgactgggccacctggcagccccaggtgctgcgtgcatgctgccatggagacaggcccctgggttggtggcaagaaggcagtctcccaaagctttgccgattcaggggagggagcaactggagcctcaggccctccagagtagtctgcctgaccaccctggagcccacagaagcccaggacgtctcccgcgaagcctccccgtgtgtggctgaggatggctgagcagcagggccgggagcttgaggctgagtgccccgtctgctggaaccccttcaacaacacgttccatacccccaaaatgctggattgctgccactccttctgcgtggaatgtctggcccacctcagccttgtgactccagcccggcgccgcctgctgtgcccactctgtcgccagcccacagtgctggcctcagggcagcctgtcactgacttgcccacggacactgccatgctcgccctgctccgcctggagccccaccatgtcatcctggaaggccatcagctgtgcctcaaggaccagcccaagagccgctacttcctgcgccagcctcaagtctacacgctggaccttggcccccagcctgggggccagactgggccgcccccagacacggcctctgccaccgtgtctacgcccatcctcatccccagccaccactctttgagggagtgtttccgcaaccctcagttccgcatctttgcctacctgatggccgtcatcctcagtgtcactctgttgctcatattctccatcttttggaccaagcagttcctttggggtgtggggtgagtgctgttcccagacaagaaaccaaacctttttcggttgctgctgggtatggtgactacggagcctcatttggtattgtcttcctttgtagtgttgtttattttacaatccagggattgttcaggccatgtgtttgcttctgggaacaattttaaaaaaaaacaaaaaaacgaaaagcttgaaggactgggagatgtggagcgacctccgggtgtgagtgtggcgtcatggaagggcagagaagcggttctgaccacagagctccacagcaagttgtgccaaagggctgcacagtggtatccaggaacctgactagcccaaatagcaagttgcatttctcactggagctgcttcaaaatcagtgcatatttttttgagttgctcttttactatgggttgctaaaaaaaaaaaaaaaattgggaagtgagcttcaattctgtgggtaaatgtgtgtttgtttctctttgaatgtcttgccactggttgcagtaaaagtgttctgtattcattaa

SEQ ID NO: 177358 - DNA, 1830 bp, Homo sapiens
  Payload ID: 14801
  Gene Symbol: RNF183
  Gene Name: ring finger protein 183
  Uniprot ID: Q96D59
  ENST ID: ENST00000297894
  CDS Start-End: 1100-1678
aaagcaaccaaagcttccagggtgtacaggaggtccaaagtcaccagaaggaagaagaaaacctgaaacagcgagagctggccaaacgctgctaagacctatgcaaataagacccacccacgctacctggaaatcgggcctgggaagtcagaaaacaaagcacatgcgtgcagggctgcacgaacggaggcggaggaggcggctccgagggagcagctgatcctgaaacagcagtggatccctgggagagcagcacagataaagatccaggcaataatgatgcttcctcctcttggacagccttttacagttctggccatggaacttcagagaaggtaggtctgatttggggggaaacaggagatcttgacgtgtagtaatacaagcttactggatggagtaaagttagaattttcaggtaagagaattaaaaaaaaaaaaaaaacttataatcttgcccccagagataaccactgctaatatctggttgtttatctctccagacattttttccattgcacacacacttttggaaattggattatatggtaatatggttttgttgctggttctttttcgcttaatgacattatatcctaggtatatatccatattaatagttttaccacatcatattaaaggctgcataatatctcttcctatggatggagcagaatctacttaatcaatgtcctattactggatgatgacgtagttctccatacgtcaccgttaaaccagcgcctggatgggcatctctttactcacatctttgcagaagtccttgatggtttccgtggaatcgattcccagtgggggaaatgatgagtcaaggttacatacagtttacggcctctgcagatcaactcttcaaattattcgaatgacccatatgagaaacagagaaaagccaagtatttctggttgaaacggagaagctgggctggagtgcgcctccctccaactccccgctttaactccctaaggttggtgggatggccagctctaagatctcagaaggctgaccagctgtgtgctaagaacaaagcagaaggcagcgaggacgtctcccgcgaagcctccccgtgtgtggctgaggatggctgagcagcagggccgggagcttgaggctgagtgccccgtctgctggaaccccttcaacaacacgttccatacccccaaaatgctggattgctgccactccttctgcgtggaatgtctggcccacctcagccttgtgactccagcccggcgccgcctgctgtgcccactctgtcgccagcccacagtgctggcctcagggcagcctgtcactgacttgcccacggacactgccatgctcgccctgctccgcctggagccccaccatgtcatcctggaaggccatcagctgtgcctcaaggaccagcccaagagccgctacttcctgcgccagcctcaagtctacacgctggaccttggcccccagcctgggggccagactgggccgcccccagacacggcctctgccaccgtgtctacgcccatcctcatccccagccaccactctttgagggagtgtttccgcaaccctcagttccgcatctttgcctacctgatggccgtcatcctcagtgtcactctgttgctcatattctccatcttttggaccaagcagttcctttggggtgtggggtgagtgctgttcccagacaagaaaccaaacctttttcggttgctgctgggtatggtgactacggagcctcatttggtattgtcttcctttgtagtgttgtttattttacaatccagggattgttcaggccatgtgtttgcttctgggaacaattt

SEQ ID NO: 177359 - DNA, 2312 bp, Homo sapiens
  Payload ID: 14801
  Gene Symbol: RNF183
  Gene Name: ring finger protein 183
  Uniprot ID: Q96D59
  ENST ID: ENST00000478815
  CDS Start-End: 1582-2160
cttcaaattattcgaatgacccatatgagaaacagagaaaagccaagtatttctggttgaaacggagaagctgggctggagtgcgcctccctccaactccccgctttaactccctaaggttggtgggatggccagctctaagatctcagaaggctgaccagctgtgtgctaagaacaaagcagaaggcagcgaggtttgtacacgctgattgcagttacttaggcacattaaaagatcagcgggtgactggactgaatctgatagtcggagctcttaagcttcgaagtaggtgactttcacagcaaccaaagtgctgagcaggcagcccctttgtgcaaggaggaggttccagccactttcgaagagaaatgagggccccagagagaggaagcccagaagactcagttaccctcttcacatctacaaagacgaaattgccaccctacctttccagaccagggactccaggtgttgaagggactgcccacaatctcacaggtgcttggcttccaggttcaattagttgccatgccctggggggaactcaggtcccccatcttcctccccaccccaccccccaggaagctctctggccttggctccaagcaggtgtgctcaagaggctgccgactgggccacctggcagccccaggtgctgcgtgcatgctgccatggagacaggcccctgggttggtggcaagaaggcagtctcccaaagctttgccgattcaggggagggagcaactggagcctcaggccctccagagtagtctgcctgaccaccctggagcccacagaagcccaggtgcgtgccctgaaggtttcccaggacaaagggagggaggaggagccagggtaggcagaggatggggaagaggctctggaaggggaagaggctctggaaggggaagaggctctggaagggctgatctggggactggggcagggaagcttctgcaaggcttccaggtaaggagaaaggcctttccaggggcttccttgccaggccaaggactgggtgagtaggatgtggagggttggccctctagctcaaggggaggagggaaagagggctggcatttgtccccataggagggacagaccagggaattcacaaaacccatctctgcgctagtcagggatttgaggtagcagggaaggaaacatttgtcctgtagcaaaacccgcagactgcagcttacccccagctccctggattcagggcagccaagggcacagacaatgaccataaggagcatttgcgtccagctccaaagcccagggcgacatctgctccaatgccggctctcttgggggctcttggtaggggtggcccaggccttcaccttgacagaggggaggctgtaggagcatttgactcaactcgatgggttaggaactggtgatcaagaacaaaacgcttttgaacctaagtaaaacgtggtgattacacctttcaacacccacagaacactttgccccaggccaagcacaaggatgggacttcatggctgttcctttgctcctttcccccttctgccaggacgtctcccgcgaagcctccccgtgtgtggctgaggatggctgagcagcagggccgggagcttgaggctgagtgccccgtctgctggaaccccttcaacaacacgttccatacccccaaaatgctggattgctgccactccttctgcgtggaatgtctggcccacctcagccttgtgactccagcccggcgccgcctgctgtgcccactctgtcgccagcccacagtgctggcctcagggcagcctgtcactgacttgcccacggacactgccatgctcgccctgctccgcctggagccccaccatgtcatcctggaaggccatcagctgtgcctcaaggaccagcccaagagccgctacttcctgcgccagcctcaagtctacacgctggaccttggcccccagcctgggggccagactgggccgcccccagacacggcctctgccaccgtgtctacgcccatcctcatccccagccaccactctttgagggagtgtttccgcaaccctcagttccgcatctttgcctacctgatggccgtcatcctcagtgtcactctgttgctcatattctccatcttttggaccaagcagttcctttggggtgtggggtgagtgctgttcccagacaagaaaccaaacctttttcggttgctgctgggtatggtgactacggagcctcatttggtattgtcttcctttgtagtgttgtttattttacaatccagggattgttcaggccatgtgtttgcttctgggaacaattt

SEQ ID NO: 177360 - DNA, 849 bp, Homo sapiens
  Payload ID: 14801
  Gene Symbol: RNF183
  Gene Name: ring finger protein 183
  Uniprot ID: Q96D59
  ENST ID: ENST00000416588
  CDS Start-End: 108-686
tggaaggggaagaggctctggaagggctgatctggggactggggcagggaagcttctgcaaggcttccaggacgtctcccgcgaagcctccccgtgtgtggctgaggatggctgagcagcagggccgggagcttgaggctgagtgccccgtctgctggaaccccttcaacaacacgttccatacccccaaaatgctggattgctgccactccttctgcgtggaatgtctggcccacctcagccttgtgactccagcccggcgccgcctgctgtgcccactctgtcgccagcccacagtgctggcctcagggcagcctgtcactgacttgcccacggacactgccatgctcgccctgctccgcctggagccccaccatgtcatcctggaaggccatcagctgtgcctcaaggaccagcccaagagccgctacttcctgcgccagcctcaagtctacacgctggaccttggcccccagcctgggggccagactgggccgcccccagacacggcctctgccaccgtgtctacgcccatcctcatccccagccaccactctttgagggagtgtttccgcaaccctcagttccgcatctttgcctacctgatggccgtcatcctcagtgtcactctgttgctcatattctccatcttttggaccaagcagttcctttggggtgtggggtgagtgctgttcccagacaagaaaccaaacctttttcggttgctgctgggtatggtgactacggagcctcatttggtattgtcttcctttgtagtgttgtttattttacaatccagggattgttcaggccatgtgtttgcttctgggaacaattttaaaaaaaaac

SEQ ID NO: 177361 - DNA, 2946 bp, Homo sapiens
  Payload ID: 14802
  Gene Symbol: RNF185
  Gene Name: ring finger protein 185
  Uniprot ID: Q96GF1
  ENST ID: ENST00000266252
  CDS Start-End: 110-520
agtattggccgtgtacccgaaaaactgattgactgggctggcgttaactgtgcggaggcaggatttccctggggaaagtcttcactcagagcttcgctgacagccaaggatggcaagcaaggggccctcggcctctgcatctcctgagaactccagtgcaggggggcccagtgggagcagcaatggcgctggcgagagcggagggcaggacagcactttcgagtgcaacatctgcttggacacagccaaggatgccgtcatcagcctgtgtggccacctcttctgttggccgtgtttacatcagggatttcaaggatttggatttggagatggtggcttccagatgtcttttggaattggggcatttccctttgggatatttgccacagcatttaatataaatgatgggcggcctcctccagctgtccctgggacaccccagtatgtggacgagcagttcctgtcacgcctcttcctatttgtggccctggtgatcatgttctggctcctgattgcctaatgctgggctcctgcctacatccgtggcagggctctggactggtgacgtgccaccccaactcctggtgtttggcttcctggctaatcttgactcctggaatcagtgggatcagtaacacatcaaggagtcttgtttcttcatcagagctttggaactcgagaccagttggcgatgacccctgaatatcgccaccgctgtaaacactctataacttcaggccttggcattgagtcatctctcatgggtgacaccatgaaatcttgtttcagccagttctgcaggtcctgactctgcagagggaagaggcagaaagagagaaactgtcagagtataatttcacctgagtttaatattacagaaacaaagggatgcaccaaatggtatttctggaaattttcatgtctttaaataccccttggtaagttgcttctgaagccagtgggggctcctcagatagagaggttcccctttcaaatcccagtgccgctctgttctctttccttcccctcccactccccctcttcttcctctgtagagatgcaagaaattgctgtcccataaaaatcataattgcagtagctaaagctggggtcacttcgtgaattcaccagagactcaaagatcttttattggctctgggctgtgctcagtgtctttggcctcagagaacaacttgaatgacttcctggtttcctggcataaattattcctggtgagacatgtggcttaactcacaggtttcccatcagctttctccctaaaactatgttcatctgcctctctctgccagagaacatacagccgagaatactgccgaagctgagactgactactgtgcattaggaaagacctggagtcaggactttggtgggatttggagctccgaggcagtaataactgaacaagcagccctgtcccctaggctgcagaagcttgaatgcatcctctcccagaacctgccacaggaaactgggggctttgtcaggtcagcccaactgcatgcaaaagaccaccatcctcagaagccaagttgtcttttatgaagaggcaaggaaaggggaaacccacatgtgaccctgattttggtatggcttgatagagttccctgaaaactccttgtatgtgtgctaaaaccagggaagcatgtgactgccaagcaggcaacccctgatgatttgtaaagccaggtggcagggccttggggagccccagcacaatgatattgtgtggtcttccctcctgtggaatcgaggggaaattattcttcccaataccttgatttgattttcagtttcataagcttcttcctctgaatcttattgagggactatggtaccaagcaggtaggactgttcacctggtggaacagttcttgctctgccttctaggcttcatcccagaaatccagcctctttctggagaccccaaagctggagggagatgggctttcctctgggcctctctcctactttgccatccacactgctcctggctaaccccagcaataaccaacaaatggtaggaagccccatctattgctttttctcaattatgactgcatagtttatggaaacaaagatcttgaggaagatgagggaagccctcccctcttcacagtccccatctcttctcctttgtacctgtcaacaccagagttcagtgtttaaacagacaaaatataaagtattgagtaggtggttcatatgccgaatccacttggtaggaagaaaccaccagctttatagtgtgcctgatagattttaaacattcctgggcacccactcaagagtgctctttttatcaccttctggaaatccgcaaagttgcaggggcctctggagtgtctcttctctagagagaattggtgggacccccctcagtgcagtggccccaactagtggagggagagaggacttaagtcagatggactcaacagaaatgggtttccagaagaataatgaaaagttgtgggtaggaaaatgaatcatttggactcttcaatgaaatggagtgagcccaggagagctcagccaacagaggcactctgggaacctgttagtaaagccaggctggccaaatgccatttgattttgaacctcgtaggtccccactcaccctctgccaggagctaagtaaggcaggagagctgacttgggactcctggctcggccccaacagggagcccccttcccaccatccctcggcaagctcaccacctcatccttctgccaaggcagctttcctttcttttgtgtgttttctgtgttcttagcctccaccctcctcctgccacccttgtggactaggaccaggtcctgaccccagtcagaaaatgatgatatgtacagtggcacaccttaaccagtcactaattttcactgttgtgaaagtgatttgatttagaattaaacaaatggttttacatt

SEQ ID NO: 177362 - DNA, 3171 bp, Homo sapiens
  Payload ID: 14802
  Gene Symbol: RNF185
  Gene Name: ring finger protein 185
  Uniprot ID: Q96GF1
  ENST ID: ENST00000326132
  CDS Start-End: 160-738
gtccgcgtaggaggggtcggaggtcttacccaacagattgacgcggcgttagtattggccgtgtacccgaaaaactgattgactgggctggcgttaactgtgcggaggcaggatttccctggggaaagtcttcactcagagcttcgctgacagccaaggatggcaagcaaggggccctcggcctctgcatctcctgagaactccagtgcaggggggcccagtgggagcagcaatggcgctggcgagagcggagggcaggacagcactttcgagtgcaacatctgcttggacacagccaaggatgccgtcatcagcctgtgtggccacctcttctgttggccgtgtttacatcagtggttggagaccagacctaacagacaggtgtgtcctgtttgcaaagctggcatcagccgagacaaggtcatccccctctatggaaggggcagcactgggcaacaggaccccagagagaagacccctcctcgtcctcaaggacagaggccagagccggagaatagagggggatttcaaggatttggatttggagatggtggcttccagatgtcttttggaattggggcatttccctttgggatatttgccacagcatttaatataaatgatgggcggcctcctccagctgtccctgggacaccccagtatgtggacgagcagttcctgtcacgcctcttcctatttgtggccctggtgatcatgttctggctcctgattgcctaatgctgggctcctgcctacatccgtggcagggctctggactggtgacgtgccaccccaactcctggtgtttggcttcctggctaatcttgactcctggaatcagtgggatcagtaacacatcaaggagtcttgtttcttcatcagagctttggaactcgagaccagttggcgatgacccctgaatatcgccaccgctgtaaacactctataacttcaggccttggcattgagtcatctctcatgggtgacaccatgaaatcttgtttcagccagttctgcaggtcctgactctgcagagggaagaggcagaaagagagaaactgtcagagtataatttcacctgagtttaatattacagaaacaaagggatgcaccaaatggtatttctggaaattttcatgtctttaaataccccttggtaagttgcttctgaagccagtgggggctcctcagatagagaggttcccctttcaaatcccagtgccgctctgttctctttccttcccctcccactccccctcttcttcctctgtagagatgcaagaaattgctgtcccataaaaatcataattgcagtagctaaagctggggtcacttcgtgaattcaccagagactcaaagatcttttattggctctgggctgtgctcagtgtctttggcctcagagaacaacttgaatgacttcctggtttcctggcataaattattcctggtgagacatgtggcttaactcacaggtttcccatcagctttctccctaaaactatgttcatctgcctctctctgccagagaacatacagccgagaatactgccgaagctgagactgactactgtgcattaggaaagacctggagtcaggactttggtgggatttggagctccgaggcagtaataactgaacaagcagccctgtcccctaggctgcagaagcttgaatgcatcctctcccagaacctgccacaggaaactgggggctttgtcaggtcagcccaactgcatgcaaaagaccaccatcctcagaagccaagttgtcttttatgaagaggcaaggaaaggggaaacccacatgtgaccctgattttggtatggcttgatagagttccctgaaaactccttgtatgtgtgctaaaaccagggaagcatgtgactgccaagcaggcaacccctgatgatttgtaaagccaggtggcagggccttggggagccccagcacaatgatattgtgtggtcttccctcctgtggaatcgaggggaaattattcttcccaataccttgatttgattttcagtttcataagcttcttcctctgaatcttattgagggactatggtaccaagcaggtaggactgttcacctggtggaacagttcttgctctgccttctaggcttcatcccagaaatccagcctctttctggagaccccaaagctggagggagatgggctttcctctgggcctctctcctactttgccatccacactgctcctggctaaccccagcaataaccaacaaatggtaggaagccccatctattgctttttctcaattatgactgcatagtttatggaaacaaagatcttgaggaagatgagggaagccctcccctcttcacagtccccatctcttctcctttgtacctgtcaacaccagagttcagtgtttaaacagacaaaatataaagtattgagtaggtggttcatatgccgaatccacttggtaggaagaaaccaccagctttatagtgtgcctgatagattttaaacattcctgggcacccactcaagagtgctctttttatcaccttctggaaatccgcaaagttgcaggggcctctggagtgtctcttctctagagagaattggtgggacccccctcagtgcagtggccccaactagtggagggagagaggacttaagtcagatggactcaacagaaatgggtttccagaagaataatgaaaagttgtgggtaggaaaatgaatcatttggactcttcaatgaaatggagtgagcccaggagagctcagccaacagaggcactctgggaacctgttagtaaagccaggctggccaaatgccatttgattttgaacctcgtaggtccccactcaccctctgccaggagctaagtaaggcaggagagctgacttgggactcctggctcggccccaacagggagcccccttcccaccatccctcggcaagctcaccacctcatccttctgccaaggcagctttcctttcttttgtgtgttttctgtgttcttagcctccaccctcctcctgccacccttgtggactaggaccaggtcctgaccccagtcagaaaatgatgatatgtacagtggcacaccttaaccagtcactaattttcactgttgtgaaagtgatttgatttagaattaaacaaatggttttacattactatga

SEQ ID NO: 177363 - DNA, 3315 bp, Homo sapiens
  Payload ID: 14802
  Gene Symbol: RNF185
  Gene Name: ring finger protein 185
  ENST ID: ENST00000426256
  CDS Start-End: 142-615
ggaggtcttacccaacagattgacgcggcgttagtattggccgtgtacccgaaaaactgattgactgggctggcgttaactgtgcggaggcaggatttccctggggaaagtcttcactcagagcttcgctgacagccaaggatggcaagcaaggggccctcggcctctgcatctcctgagaactccagtgcaggggggcccagtgggagcagcaatggcgctggcgagagcggagggcaggacagcactttcgagtgcaacatctgcttggacacagccaaggatgccgtcatcagcctgtgtggccacctcttctgttggccgtgtttacatcagtggttggagaccagacctaacagacaggtgtgtcctgtttgcaaagctggcatcagccgagacaaggtcatccccctctatggaaggggcagcactgggcaacaggaccccagagagaagacccctcctcgtcctcaaggacagaggccagagccggagaatagaggggtgaggaacattctaggagaagcttctacaaatgagctgatggctttagaagtttccttcttagccttacaatttttctccttgattataaaagtaaaggaaaacttgtaaaatacagaaaggaaaagagggggaaaaaaatcacttataaccacaccaatccagaggggatttcaaggatttggatttggagatggtggcttccagatgtcttttggaattggggcatttccctttgggatatttgccacagcatttaatataaatgatgggcggcctcctccagctgtccctgggacaccccagtatgtggacgagcagttcctgtcacgcctcttcctatttgtggccctggtgatcatgttctggctcctgattgcctaatgctgggctcctgcctacatccgtggcagggctctggactggtgacgtgccaccccaactcctggtgtttggcttcctggctaatcttgactcctggaatcagtgggatcagtaacacatcaaggagtcttgtttcttcatcagagctttggaactcgagaccagttggcgatgacccctgaatatcgccaccgctgtaaacactctataacttcaggccttggcattgagtcatctctcatgggtgacaccatgaaatcttgtttcagccagttctgcaggtcctgactctgcagagggaagaggcagaaagagagaaactgtcagagtataatttcacctgagtttaatattacagaaacaaagggatgcaccaaatggtatttctggaaattttcatgtctttaaataccccttggtaagttgcttctgaagccagtgggggctcctcagatagagaggttcccctttcaaatcccagtgccgctctgttctctttccttcccctcccactccccctcttcttcctctgtagagatgcaagaaattgctgtcccataaaaatcataattgcagtagctaaagctggggtcacttcgtgaattcaccagagactcaaagatcttttattggctctgggctgtgctcagtgtctttggcctcagagaacaacttgaatgacttcctggtttcctggcataaattattcctggtgagacatgtggcttaactcacaggtttcccatcagctttctccctaaaactatgttcatctgcctctctctgccagagaacatacagccgagaatactgccgaagctgagactgactactgtgcattaggaaagacctggagtcaggactttggtgggatttggagctccgaggcagtaataactgaacaagcagccctgtcccctaggctgcagaagcttgaatgcatcctctcccagaacctgccacaggaaactgggggctttgtcaggtcagcccaactgcatgcaaaagaccaccatcctcagaagccaagttgtcttttatgaagaggcaaggaaaggggaaacccacatgtgaccctgattttggtatggcttgatagagttccctgaaaactccttgtatgtgtgctaaaaccagggaagcatgtgactgccaagcaggcaacccctgatgatttgtaaagccaggtggcagggccttggggagccccagcacaatgatattgtgtggtcttccctcctgtggaatcgaggggaaattattcttcccaataccttgatttgattttcagtttcataagcttcttcctctgaatcttattgagggactatggtaccaagcaggtaggactgttcacctggtggaacagttcttgctctgccttctaggcttcatcccagaaatccagcctctttctggagaccccaaagctggagggagatgggctttcctctgggcctctctcctactttgccatccacactgctcctggctaaccccagcaataaccaacaaatggtaggaagccccatctattgctttttctcaattatgactgcatagtttatggaaacaaagatcttgaggaagatgagggaagccctcccctcttcacagtccccatctcttctcctttgtacctgtcaacaccagagttcagtgtttaaacagacaaaatataaagtattgagtaggtggttcatatgccgaatccacttggtaggaagaaaccaccagctttatagtgtgcctgatagattttaaacattcctgggcacccactcaagagtgctctttttatcaccttctggaaatccgcaaagttgcaggggcctctggagtgtctcttctctagagagaattggtgggacccccctcagtgcagtggccccaactagtggagggagagaggacttaagtcagatggactcaacagaaatgggtttccagaagaataatgaaaagttgtgggtaggaaaatgaatcatttggactcttcaatgaaatggagtgagcccaggagagctcagccaacagaggcactctgggaacctgttagtaaagccaggctggccaaatgccatttgattttgaacctcgtaggtccccactcaccctctgccaggagctaagtaaggcaggagagctgacttgggactcctggctcggccccaacagggagcccccttcccaccatccctcggcaagctcaccacctcatccttctgccaaggcagctttcctttcttttgtgtgttttctgtgttcttagcctccaccctcctcctgccacccttgtggactaggaccaggtcctgaccccagtcagaaaatgatgatatgtacagtggcacaccttaaccagtcactaattttcactgttgtgaaagtgatttgatttagaattaaacaaatggttttacatta

SEQ ID NO: 177364 - DNA, 2737 bp, Homo sapiens
  Payload ID: 14802
  Gene Symbol: RNF185
  Gene Name: ring finger protein 185
  Uniprot ID: Q96GF1
  ENST ID: ENST00000518626
  CDS Start-End: 142-720
ggaggtcttacccaacagattgacgcggcgttagtattggccgtgtacccgaaaaactgattgactgggctggcgttaactgtgcggaggcaggatttccctggggaaagtcttcactcagagcttcgctgacagccaaggatggcaagcaaggggccctcggcctctgcatctcctgagaactccagtgcaggggggcccagtgggagcagcaatggcgctggcgagagcggagggcaggacagcactttcgagtgcaacatctgcttggacacagccaaggatgccgtcatcagcctgtgtggccacctcttctgttggccgtgtttacatcagtggttggagaccagacctaacagacaggtgtgtcctgtttgcaaagctggcatcagccgagacaaggtcatccccctctatggaaggggcagcactgggcaacaggaccccagagagaagacccctcctcgtcctcaaggacagaggccagagccggagaatagagggggatttcaaggatttggatttggagatggtggcttccagatgtcttttggaattggggcatttccctttgggatatttgccacagcatttaatataaatgatgggcggcctcctccagctgtccctgggacaccccagtatgtggacgagcagttcctgtcacgcctcttcctatttgtggccctggtgatcatgttctggctcctgattgcctaatgctgggctcctgcctacatccgtggcagggctctggactggtgacgtgccaccccaactcctggtgtttggcttcctggctaatcttgactcctggaatcagtgggatcagtaacacatcaaggagtcttgtttcttcatcagagctttggaactcgagaccagttggcgatgacccctgaatatcgccaccgctgtaaacactctataacttcaggccttggcattgagtcatctctcatgggtgacaccatgaaatcttgtttcagccagttctgcaggtcctgactctgcagagggaagaggcagaaagagagaaactgtcagagtataatttcacctgagtttaatattacagaaacaaagggatgcaccaaatgagaacatacagccgagaatactgccgaagctgagactgactactgtgcattaggaaagacctggagtcaggactttggtgggatttggagctccgaggcagtaataactgaacaagcagccctgtcccctaggctgcagaagcttgaatgcatcctctcccagaacctgccacaggaaactgggggctttgtcaggtcagcccaactgcatgcaaaagaccaccatcctcagaagccaagttgtcttttatgaagaggcaaggaaaggggaaacccacatgtgaccctgattttggtatggcttgatagagttccctgaaaactccttgtatgtgtgctaaaaccagggaagcatgtgactgccaagcaggcaacccctgatgatttgtaaagccaggtggcagggccttggggagccccagcacaatgatattgtgtggtcttccctcctgtggaatcgaggggaaattattcttcccaataccttgatttgattttcagtttcataagcttcttcctctgaatcttattgagggactatggtaccaagcaggtaggactgttcacctggtggaacagttcttgctctgccttctaggcttcatcccagaaatccagcctctttctggagaccccaaagctggagggagatgggctttcctctgggcctctctcctactttgccatccacactgctcctggctaaccccagcaataaccaacaaatggtaggaagccccatctattgctttttctcaattatgactgcatagtttatggaaacaaagatcttgaggaagatgagggaagccctcccctcttcacagtccccatctcttctcctttgtacctgtcaacaccagagttcagtgtttaaacagacaaaatataaagtattgagtaggtggttcatatgccgaatccacttggtaggaagaaaccaccagctttatagtgtgcctgatagattttaaacattcctgggcacccactcaagagtgctctttttatcaccttctggaaatccgcaaagttgcaggggcctctggagtgtctcttctctagagagaattggtgggacccccctcagtgcagtggccccaactagtggagggagagaggacttaagtcagatggactcaacagaaatgggtttccagaagaataatgaaaagttgtgggtaggaaaatgaatcatttggactcttcaatgaaatggagtgagcccaggagagctcagccaacagaggcactctgggaacctgttagtaaagccaggctggccaaatgccatttgattttgaacctcgtaggtccccactcaccctctgccaggagctaagtaaggcaggagagctgacttgggactcctggctcggccccaacagggagcccccttcccaccatccctcggcaagctcaccacctcatccttctgccaaggcagctttcctttcttttgtgtgttttctgtgttcttagcctccaccctcctcctgccacccttgtggactaggaccaggtcctgaccccagtcagaaaatgatgatatgtacagtggcacaccttaaccagtcactaattttcactgttgtgaaagtgatttgatttagaattaaacaaatggttttacatta

SEQ ID NO: 177365 - DNA, 1250 bp, Homo sapiens
  Payload ID: 14803
  Gene Symbol: RNF186
  Gene Name: ring finger protein 186
  Uniprot ID: Q9NXI6
  ENST ID: ENST00000375121
  CDS Start-End: 178-861
aagaaacaagctgggcagctctgggagagaggagtgtcagacagctgttgtcaacaggcacctggccagagtgaaaaggaggggcagattccatccaagtcccagcggcgccagctgacactctctgccaatgcccaggtgctgagcgacagtgtcccaccggtccctgtgcccagaatggcctgcaccaagaccctgcaacagtcccagcccatctccgcaggagccaccacaaccaccaccgctgtggcccctgctgggggtcattctggctccacagaatgtgacctggagtgtctggtgtgccgggagccctacagctgtccccggttgcccaagctgctggcctgccagcatgccttctgcgccatctgcctgaagctcctgctgtgcgtgcaggacaacacctggtccatcacctgcccgctgtgccgcaaggtcaccgccgtccccgggggcctcatctgcagcctgcgcgaccatgaggcggtggtggggcagctggcccagccatgcacagaggtatcgctctgtcctcaggggctggtggatcctgctgacttggcagcaggacaccccagcttggtgggagaggatggacaggatgaagtaagtgcaaaccacgtggcagcccggcgcctggccgcgcacctactcctgctggccttgctcattatcctcatcgggcccttcatctacccgggtgtcttacgatgggtgctcaccttcatcatcgccctggccctgctgatgtccaccctcttctgctgtctccccagcacccggggcagctgctggccctcctccaggactctcttctgcagagagcagaaacacagccacatctcttccattgcctgagtgccctctgatgaggctatccctgcagccctttctgcccttgggcccccggacttccacaatgaacagggtaaggggttacggactaagactggctcctttgggaaatcacatgccagcgggacttgcaagccacaaccgagatggccagcctgggtcaagaattacacgcttggatgacaggcttgcacttgcccttgggatagcatagctaaaactgttggtggctaggggagcagacacaaactacttgaacatgacaagatgggggaagctcctgttcctcttattccaatgttcttggtttttctttatataacttgatgaaagtattgcagtattgatgccattgtagaatagaactggaattccattctttttgcaattta

SEQ ID NO: 177366 - DNA, 3017 bp, Homo sapiens
  Payload ID: 14804
  Gene Symbol: RNF187
  Gene Name: ring finger protein 187
  Uniprot ID: Q5TA31
  ENST ID: ENST00000305943
  CDS Start-End: 429-1136
ccgcaggcagtagagtgaagcgcgcagctgccaggacttgcgcggtgacgtgcgccgctgccaggaccttgcaggtggagagcatagttgccaaaatcaaggcggaggagcgcaccgccgctaggatccaggcggagaagcccaccgcggccaggacctaaggatgcagtacactgctgccaggatcttgtctgtggagcgcagcgcggccaggacctccggctgcagcacaccgctgccaggatcttatcggcagagcgctccgcggtccggaccccgccccgtgcgcgtccccgaccccgccccgtgcgcgtccccggcgttggcgtcttcgtcctgttgctggtctccgtccggtcgccggccgtctaggtctccggccctccccagccgctcctgcgcccttgccggccccgccgcccgcagccctggcgctccctgcgggccccgccgaggccgcctgcgccctgtgccagcgcgcgccccgggaaccggtgcgcgccgactgcggccaccgcttctgtcgggcgtgcgtggtgcgcttctgggccgaggaggacgggcccttcccgtgccccgagtgcgccgacgactgctggcagcgcgccgtggagcccggcaggcccccgctcagccgccgccttctggcgctcgaggaggcggccgcggcgcccgcgcgcgacggcccggccagcgaggccgcgctgcagctgctgtgccgcgccgacgccggcccgctctgcgccgcctgccgtatggctgcgggccccgagccgcccgagtgggaaccgcgctggaggaaggcgctgcgcggcaaggagaacaaggggtctgtggaaatcatgagaaaggacttgaatgacgcccgggacctgcatggccaggcagagtcagcagctgcagtgtggaagggacacgtgatggaccgtaggaagaaggcactgaccgactacaagaagctgcgggccttctttgtggaggaggaggagcatttcctgcaggaggctgagaaggaggaggggctccctgaggacgagctggctgaccccactgagcggttcaggtcactgctgcaggcggtctcggagctggagaagaagcatcgcaacctgggcctcagcatgctgctgcagtgatggcgccaacccgtggcagtcccagagctggaggcaggaggatggatcctcatctccatgggaagtgtcagcgtgtggctgccagggaagcgtggcaggcgcctggccttgggtccatctacatagttgcgtgtttcaacaatgtccatttatccttcaccccgaggcgtgttttgggggctgcaaacacctcccggtagaggctggacctgaggacccttcccacctgtgcccgtcccttcctgaagtcctagccacagcccatcctccatgagtcccggcagctctgggtcatgcccttccctggtcacccatctgcccctcacctcgtcatccagggacccagaccctgcaccttccatgtgggcccacagatccttggcaggtacctgaggtgcaccattgagtgtcggatttggggttagcatccagaaagaagaatgcgcatgacgctctgtgaaggctggaactcaggtcttcagggagagaaaggaagactggattgcaccttgatgcctcctgaggaggcggcccccctcttgaggtgggcgtgggcccggcccagccttatccaagtcgctctgtccacctcccccttcctggcccccaccccactcctgtgcctcccaggagccctccctgtgctccacctgcctccgcagaaggaagcctctttctctgtttccctgggtgagggggctggcaggtggctaaccccatttagcatctccaggccctgccatcgtgtctcatcttgctgttatctctagctctttccctcctcccatttcctttagtagttgaattttgcaaagcttgtagcagtagctcagttgcctgcagcatccttgtgtgtagataaattagtcgacagaaactcagcactggggacaggattgcaaagtcggggacatagatgcagacagttgttgagatttggggatagccgggcttgtgagcggtgcccatttccagatgaagcctttcagcccttctgagtccccggcccttggtgcgatgtctgtgagtttgacctgcccagcgtgtgggctggctcaatgctgaataaagtgggtttgtgtcagctcgtttgcttcgtctccgtgtgtccacctggcctcttccccctgccctggccaccctccagtgtcaaaggaaacttcctcgtgacacgtgctaaagcatggtgaggaggactttgattgggaccattgagatgggtgtgggaccctttccttggggcctggggggagatggggctccaccccgacgtagcagggcaggggttggaggagcgaggagcagtatagggtccatgggtgggaatgactgtgaggagacatcagggctgagggggctctggctaaacccacctcacagagtccttgctgcaggcaggcagggcgatcagacattggctgcaaacggtcagagaggaacccagtcaggtaccattgagggtggtcagatattatggttaaccaaattagggttcttgctaaaactggatttcataagaaagggcaaagagggccctaggagaagattccagagcctggccagagtttggccaagtagagaatctttgtcagcacgccaacaacatcccgaccctgagacctccagtttgtctttctcactgtctccgcctgctgcagtctgctgtcatccctgagcatccctgcccctgccctgcacacctgtgatgcttgcccggacaggtcctgatggcagagtctcccacaacatcagtgtctccacatcaccaggtccgacagtggcttcaccatcctcacctaacctagctgaccagcaacatcccaccctgtcaatcacaacctctttctatttaagaaaattatatatttatggggcacagtg

SEQ ID NO: 177367 - DNA, 4285 bp, Homo sapiens
  Payload ID: 14805
  Gene Symbol: RNF19A
  Gene Name: ring finger protein 19A, RBR E3 ubiquitin protein ligase
  Uniprot ID: Q9NV58
  ENST ID: ENST00000341084
  CDS Start-End: 555-3071
gggggccgcagtcggggccacccgggtgcagcggggcggctcctgcgcgggcgcggaacgaacgtgcgcaagggaacagccgcgtccagagccgcccgcagcgggcccggtgggcgtgacgccatgacgcacagcacgcgggcggcgcgctggggcggggcggccgggggcgggaggaagaagtgggaggaggaggaggggaaagcgggggctgcgggagggggaggtggtagttgcggcgctggttcccgggagcagccgtcgagccacaactgcggaggaggagttcgggaaagcggccgtcgggactcctcccctccgtcgtctccgccccggttgagaggcgcctcggcgcatcggagggaccctcccccgcgcttcctcaggctgctgtcgccgctgctgggagatgggcctactcgcccgccaccctgcgctgccgccgctctgaggagttaaagaacatccatgatagcagtcttctgtaaatcgaacttttcaagaattctctgaaggaaccaagtaggatattcttacatcatgacttaatgtgaatgcaagaacaagaaataggttttatctctaaatataatgaagggctgtgtgtaaacactgaccctgtctcaattctaacaagcattttagacatgagtttacatcggcaaatgggttcagatcgagatcttcagtcctctgcttcatctgtgagcttgccttcagtcaaaaaggcacccaaaaaaagaagaatttcaataggctccctgtttcggaggaaaaaagataacaaacgtaaatcaagggagctaaatggcggggtggatggaattgcaagtattgaaagtatacattctgaaatgtgtactgataagaactccattttctctacaaatacctcttctgacaatggattaacttccatcagcaaacaaattggagacttcatagagtgccctttgtgccttttgcggcattctaaagacagatttcctgatataatgacttgtcatcacagatcttgtgtggattgcttacgacaatatttaaggatagaaatctctgaaagcagagttaatattagttgcccagaatgtactgaacggtttaatccccatgatattcgcttgatattaagtgatgatgtcttgatggaaaaatacgaagaatttatgcttagacggtggcttgttgcagatcctgattgtaggtggtgtccagctccagactgtggatatgctgtgatagcatttggatgtgccagctgtccaaaattaacttgtgggcgagagggctgtggaacagagttttgctaccactgtaaacagatttggcaccccaaccagacctgtgatgctgctcgacaagagagagcccagagcttacgtttgagaactatacgttcttcatccattagttatagtcaagagtctggagcagcagctgatgatataaagccatgtccacgatgtgctgcttatataataaagatgaatgatgggagctgcaatcacatgacatgtgctgtttgtggttgtgagttttgttggttgtgtatgaaagaaatctcagatttgcattatctaagtccatcaggatgtactttttgggggaagaaaccctggagccgaaagaagaaaatattgtggcaactgggaacactggttggtgctcctgtcggaatcgctttaatagctggcattgctattcctgcaatgattattggcattcctgtgtatgtgggccgcaagattcacaatcgctatgaaggcaaggatgtttcaaagcacaaacggaatttggccatagcaggtggtgtaacgttgtctgtaatcgtgtctccagtagtagctgcagtgactgtaggtatcggtgttcctattatgttagcttatgtctatggcgtagttccaatttctctttgtcgaagcggaggttgtggagtctcagcaggcaatggaaaaggagttaggattgaatttgatgatgaaaatgatataaatgttggtggaactaacacagctgtagacacaacatcagtagcagaagcaagacacaacccaagcataggggagggaagtgttggtgggctgactggcagtttgagtgcaagtggaagccacatggatcgaataggagccatccgagacaacctgagtgaaacggccagcaccatggcactagctggagccagtataacggggagtctgtcaggaagtgccatggtaaactgttttaacaggttggaagtacaagcagatgtacagaaagaacggtacagtctaagtggagaatctggcacagtcagcttgggaacagttagtgataatgccagcaccaaagcaatggcaggatccattctgaattcctacatcccattggacaaagaaggcaacagtatggaggtgcaagtagatattgagtcaaagccatccaaattcaggcacaacagtggaagcagtagtgtggatgatggcagtgccacccgaagtcatgctggcggttcatccagtggcttgcctgaaggtaaatctagtgccaccaagtggtccaaagaagcaacagcagggaaaaaatcaaaaagtggtaaactgaggaaaaagggtaacatgaagataaatgagacgagagaggacatggatgcacagttgttagaacaacaaagcacgaactcaagtgaatttgaggctccatccctcagtgacagtatgccttctgtagcagattctcactctagtcatttttctgaatttagttgttctgacctagaaagcatgaaaacttcttgtagtcatggttccagtgattatcacacccgctttgctactgttaacattcttcctgaggtagaaaatgaccgtctggaaaattccccacatcagtgtagcatttctgtggttacccaaactgcttcctgttcagaagtttcacagttgaatcatattgctgaagaacatggtaacaatggaataaaacctaatgttgatttatattttggcgatgcactaaaagaaacaaataacaaccactcacatcagacaatggaattaaaagttgcaattcagactgaaatttaggcccataaatgctgcagaataattaccactgtacaaccgtgtttggagctggttgaactacatgtgactacttaagtttcaggttaccagcaaaagccgggtttcattatcataatgcagatacattttctgtgttcagcaaggcattgtgtgtcatgtggatcttagttaccaaactatgaagtgaaggctttaaaagtgcattattttaaggataataaatttgaagagcaaagcatgttttgtgtgtttgccacaaaacattgcttgaagcacatacttagatagaaattggtcttaatttatataatcaatataaaatactaatgcaattctacagcattcaaatgaagaaaacttgaggctttagggataagtggttagtgatattttattgaaaccactaaagagataagtttaaaagaactgcataggttactctcagtatatgatactctgtaacatttctatttatatcggcataaatttcattttttttcttcatatgcaatgtggttatataaagcttaatgcagctcatttgctaccatttggatacttagacactttgagcaagattgtggcagtttttgcacaactttgaaatagaaatacctggtactctatcttgtttattgttgatgccatcttagaggaaaaaatgtaaaggtaagtaattaagcatatgacagcaacaaataagatacataaaactacaaaataaagtcccattaggttataagtattacaaaaaatccacctttctctaaggggaagtttgtaccccattgattcttggtgcctttgggatcgactgggttttaatggcctagttatttgaggattttgctgtgttgttttccatgtcttctctggtcaccttggattatatataaaaatacaggaaatagataaacatgaatgtgattaataatgctgaaaaagtattagcctaccaaagacacactcaggctttagtgaataactttacataacctcagtttttaacacatgcatatcttctccaaccatgaaatcaaagcacggtgcagaacttgtaccaagtacaaaaggtccatgtatgattagcattattttcttttgcttttgtttatggacaatgttcagctgacataagcagaagttggccaaaatactgcctgtactgttaatttcctgtataattcacttaaataaaagcaggttaacctcaa

SEQ ID NO: 177368 - DNA, 432 bp, Homo sapiens
  Payload ID: 14805
  Gene Symbol: RNF19A
  Gene Name: ring finger protein 19A, RBR E3 ubiquitin protein ligase
  ENST ID: ENST00000432381
  CDS Start-End: 165-432
gacacattctcccctcaagccccagtgggagcacggcccagctggattttggacttctggcctccagaactaacatccatgatagcagtcttctgtaaatcgaacttttcaagaattctctgaaggaaccaagtaggatattcttacatcatgacttaatgtgaatgcaagaacaagaaataggttttatctctaaatataatgaagggctgtgtgtaaacactgaccctgtctcaattctaacaagcattttagacatgagtttacatcggcaaatgggttcagatcgagatcttcagtcctctgcttcatctgtgagcttgccttcagtcaaaaaggcacccaaaaaaagaagaatttcaataggctccctgtttcggaggaaaaaagataacaaacgtaaatcaagggagctaaatggcggggtggatg

SEQ ID NO: 177369 - DNA, 4330 bp, Homo sapiens
  Payload ID: 14805
  Gene Symbol: RNF19A
  Gene Name: ring finger protein 19A, RBR E3 ubiquitin protein ligase
  Uniprot ID: Q9NV58
  ENST ID: ENST00000519449
  CDS Start-End: 318-2834
atagtcaccagaagctggaagagtcaaaggacacattctcccctcaagccccagtgggagcacggcccagctggattttggacttctggcctccagaactagacagggcctcactgtgtcacccagggtggaatacagtggtgtgatcatagctcactgcagcctggaattcctgggctcaagcaaccctgccacctcagccttccaagtagctaggactacagaacatccatgatagcagtcttctgtaaatcgaacttttcaagaattctctgaaggaaccaagtaggatattcttacatcatgacttaatgtgaatgcaagaacaagaaataggttttatctctaaatataatgaagggctgtgtgtaaacactgaccctgtctcaattctaacaagcattttagacatgagtttacatcggcaaatgggttcagatcgagatcttcagtcctctgcttcatctgtgagcttgccttcagtcaaaaaggcacccaaaaaaagaagaatttcaataggctccctgtttcggaggaaaaaagataacaaacgtaaatcaagggagctaaatggcggggtggatggaattgcaagtattgaaagtatacattctgaaatgtgtactgataagaactccattttctctacaaatacctcttctgacaatggattaacttccatcagcaaacaaattggagacttcatagagtgccctttgtgccttttgcggcattctaaagacagatttcctgatataatgacttgtcatcacagatcttgtgtggattgcttacgacaatatttaaggatagaaatctctgaaagcagagttaatattagttgcccagaatgtactgaacggtttaatccccatgatattcgcttgatattaagtgatgatgtcttgatggaaaaatacgaagaatttatgcttagacggtggcttgttgcagatcctgattgtaggtggtgtccagctccagactgtggatatgctgtgatagcatttggatgtgccagctgtccaaaattaacttgtgggcgagagggctgtggaacagagttttgctaccactgtaaacagatttggcaccccaaccagacctgtgatgctgctcgacaagagagagcccagagcttacgtttgagaactatacgttcttcatccattagttatagtcaagagtctggagcagcagctgatgatataaagccatgtccacgatgtgctgcttatataataaagatgaatgatgggagctgcaatcacatgacatgtgctgtttgtggttgtgagttttgttggttgtgtatgaaagaaatctcagatttgcattatctaagtccatcaggatgtactttttgggggaagaaaccctggagccgaaagaagaaaatattgtggcaactgggaacactggttggtgctcctgtcggaatcgctttaatagctggcattgctattcctgcaatgattattggcattcctgtgtatgtgggccgcaagattcacaatcgctatgaaggcaaggatgtttcaaagcacaaacggaatttggccatagcaggtggtgtaacgttgtctgtaatcgtgtctccagtagtagctgcagtgactgtaggtatcggtgttcctattatgttagcttatgtctatggcgtagttccaatttctctttgtcgaagcggaggttgtggagtctcagcaggcaatggaaaaggagttaggattgaatttgatgatgaaaatgatataaatgttggtggaactaacacagctgtagacacaacatcagtagcagaagcaagacacaacccaagcataggggagggaagtgttggtgggctgactggcagtttgagtgcaagtggaagccacatggatcgaataggagccatccgagacaacctgagtgaaacggccagcaccatggcactagctggagccagtataacggggagtctgtcaggaagtgccatggtaaactgttttaacaggttggaagtacaagcagatgtacagaaagaacggtacagtctaagtggagaatctggcacagtcagcttgggaacagttagtgataatgccagcaccaaagcaatggcaggatccattctgaattcctacatcccattggacaaagaaggcaacagtatggaggtgcaagtagatattgagtcaaagccatccaaattcaggcacaacagtggaagcagtagtgtggatgatggcagtgccacccgaagtcatgctggcggttcatccagtggcttgcctgaaggtaaatctagtgccaccaagtggtccaaagaagcaacagcagggaaaaaatcaaaaagtggtaaactgaggaaaaagggtaacatgaagataaatgagacgagagaggacatggatgcacagttgttagaacaacaaagcacgaactcaagtgaatttgaggctccatccctcagtgacagtatgccttctgtagcagattctcactctagtcatttttctgaatttagttgttctgacctagaaagcatgaaaacttcttgtagtcatggttccagtgattatcacacccgctttgctactgttaacattcttcctgaggtagaaaatgaccgtctggaaaattccccacatcagtgtagcatttctgtggttacccaaactgcttcctgttcagaagtttcacagttgaatcatattgctgaagaacatggtaacaatggaataaaacctaatgttgatttatattttggcgatgcactaaaagaaacaaataacaaccactcacatcagacaatggaattaaaagttgcaattcagactgaaatttaggcccataaatgctgcagaataattaccactgtacaaccgtgtttggagctggttgaactacatgtgactacttaagtttcaggttaccagcaaaagccgggtttcattatcataatgcagatacattttctgtgttcagcaaggcattgtgtgtcatgtggatcttagttaccaaactatgaagtgaaggctttaaaagtgcattattttaaggataataaatttgaagagcaaagcatgttttgtgtgtttgccacaaaacattgcttgaagcacatacttagatagaaattggtcttaatttatataatcaatataaaatactaatgcaattctacagcattcaaatgaagaaaacttgaggctttagggataagtggttagtgatattttattgaaaccactaaagagataagtttaaaagaactgcataggttactctcagtatatgatactctgtaacatttctatttatatcggcataaatttcattttttttcttcatatgcaatgtggttatataaagcttaatgcagctcatttgctaccatttggatacttagacactttgagcaagattgtggcagtttttgcacaactttgaaatagaaatacctggtactctatcttgtttattgttgatgccatcttagaggaaaaaatgtaaaggtaagtaattaagcatatgacagcaacaaataagatacataaaactacaaaataaagtcccattaggttataagtattacaaaaaatccacctttctctaaggggaagtttgtaccccattgattcttggtgcctttgggatcgactgggttttaatggcctagttatttgaggattttgctgtgttgttttccatgtcttctctggtcaccttggattatatataaaaatacaggaaatagataaacatgaatgtgattaataatgctgaaaaagtattagcctaccaaagacacactcaggctttagtgaataactttacataacctcagtttttaacacatgcatatcttctccaaccatgaaatcaaagcacggtgcagaacttgtaccaagtacaaaaggtccatgtatgattagcattattttcttttgcttttgtttatggacaatgttcagctgacataagcagaagttggccaaaatactgcctgtactgttaatttcctgtataattcacttaaataaaagcaggttaacctcaatgatagcagttaaaatgttctatcttatgtatttcttttaagtattaccattatggtgctactgagcgttttcttttggtaaaaagaaaaatgccatgggctgcagtcttcttccatcacttttccctaccaggtccattaatatgcttataacactagtgccagttattttatttgataatgcttatggtatttgtatatttgtttgcattccaattttgtttaataatgagtgtgtaaactgcatacgttaaataaatgtaaatactaatgtactgctgc

SEQ ID NO: 177370 - DNA, 317 bp, Homo sapiens
  Payload ID: 14805
  Gene Symbol: RNF19A
  Gene Name: ring finger protein 19A, RBR E3 ubiquitin protein ligase
  ENST ID: ENST00000517584
  CDS Start-End: 143-317
gacacattctcccctcaagccccagtgggagcacggcccagctggattttggacttctggcctccagaactaacatccatgatagcagtcttctgtaaatcgaacttttcaagaattctctgaaggaaccaacattttagacatgagtttacatcggcaaatgggttcagatcgagatcttcagtcctctgcttcatctgtgagcttgccttcagtcaaaaaggcacccaaaaaaagaagaatttcaataggctccctgtttcggaggaaaaaagataacaaacgtaaatcaagggagctaaatggcggggtggatg

SEQ ID NO: 177371 - DNA, 792 bp, Homo sapiens
  Payload ID: 14805
  Gene Symbol: RNF19A
  Gene Name: ring finger protein 19A, RBR E3 ubiquitin protein ligase
  ENST ID: ENST00000523167
  CDS Start-End: 323-792
atgacgggccgaggcggcgctcccctcgagctgtctcctgcccctaaagcgggggagacccaagggcggttgccgcggggaggcggcgggggcggaacgcattcctgacgggtgaaatcggctctaacgggaccgatttccgggcctcgctgcaaatttggagccgggacatcgccccgcaagccgtgctgcctggggccttagggaggggagctgtgttcggaggaagaacatccatgatagcagtcttctgtaaatcgaacttttcaagaattctctgaaggaaccaagtaggatattcttacatcatgacttaatgtgaatgcaagaacaagaaataggttttatctctaaatataatgaagggctgtgtgtaaacactgaccctgtctcaattctaacaagcattttagacatgagtttacatcggcaaatgggttcagatcgagatcttcagtcctctgcttcatctgtgagcttgccttcagtcaaaaaggcacccaaaaaaagaagaatttcaataggctccctgtttcggaggaaaaaagataacaaacgtaaatcaagggagctaaatggcggggtggatggaattgcaagtattgaaagtatacattctgaaatgtgtactgataagaactccattttctctacaaatacctcttctgacaatggattaacttccatcagcaaacaaattggagacttcatagagtgccctttgtgccttttgcggcattctaaagacagatttcctgatataatgacttgtcatcacagatcttgtgtgga

SEQ ID NO: 177372 - DNA, 612 bp, Homo sapiens
  Payload ID: 14805
  Gene Symbol: RNF19A
  Gene Name: ring finger protein 19A, RBR E3 ubiquitin protein ligase
  ENST ID: ENST00000522369
  CDS Start-End: 273-612
ctcttctctcattggcactgcctgtctactgccgagggcatttgagtgtgggacccatgccctgcatttcttcgctaccccacagcttctgctcatgaatccagctcaaatgtcagaagaattgacgttagtttgagagaccaaactaagttacagcctctttggtttctgttactctgaacatccatgatagcagtcttctgtaaatcgaacttttcaagaattctctgaaggaaccaagtaggatattcttacatcatgacttaatgtgaatgcaagaacaagaaataggttttatctctaaatataatgaagggctgtgtgtaaacactgaccctgtctcaattctaacaagcattttagacatgagtttacatcggcaaatgggttcagatcgagatcttcagtcctctgcttcatctgtgagcttgccttcagtcaaaaaggcacccaaaaaaagaagaatttcaataggctccctgtttcggaggaaaaaagataacaaacgtaaatcaagggagctaaatggcggggtggatggaattgcaagtattgaaagtatacattctgaaatgtgtactgataagaactccattttctctacaaatacct

SEQ ID NO: 177373 - DNA, 547 bp, Homo sapiens
  Payload ID: 14805
  Gene Symbol: RNF19A
  Gene Name: ring finger protein 19A, RBR E3 ubiquitin protein ligase
  ENST ID: ENST00000523481
  CDS Start-End: 504-547
actcgcccgccaccctgcgctgccgccgctctgaggagttaaaggtagcctcaaaatcaagtgacaagtgtctttgtaagggacaagtagacccattacagagaagacgacgcgcagaaaaggaggaagcagtgtgctcatggaggcggagattggagtgatgtaaccgcaagccgaggaatgcttatagtcaccagaagctggaagagtcaaaggacacattctcccctcaagccccagtgggagcacggcccagctggattttggacttctggcctccagaactagacagggcctcactgtgtcacccagggtggaatacagtggtgtgatcatagctcactgcagcctggaattcctgggctcaagcaaccctgccacctcagccttccaagtagctaggactacagaacatccatgatagcagtcttctgtaaatcgaacttttcaagaattctctgaaggaaccaagtaggatattcttacatcatgacttaatgtgaatgcaagaacaagaaataggttttatctctaaatataatgaagg

SEQ ID NO: 177374 - DNA, 817 bp, Homo sapiens
  Payload ID: 14805
  Gene Symbol: RNF19A
  Gene Name: ring finger protein 19A, RBR E3 ubiquitin protein ligase
  ENST ID: ENST00000519527
  CDS Start-End: 321-817
gcctgtctactgccgagggcatttgagtgtgggacccatgccctgcatttcttcgctaccccacagcttctgctcatgaatccagctcaaatgtcagaagaattgacgttagtttgagagaccaaactaagttacagcctctttggtttctgttactctggctggtcttgaactcctggactcaagtgatccaaccacctctgcttctcaaagtgctaggactacagaacatccatgatagcagtcttctgtaaatcgaacttttcaagaattctctgaaggaaccaagtaggatattcttacatcatgacttaatgtgaatgcaagaacaagaaataggttttatctctaaatataatgaagggctgtgtgtaaacactgaccctgtctcaattctaacaagcattttagacatgagtttacatcggcaaatgggttcagatcgagatcttcagtcctctgcttcatctgtgagcttgccttcagtcaaaaaggcacccaaaaaaagaagaatttcaataggctccctgtttcggaggaaaaaagataacaaacgtaaatcaagggagctaaatggcggggtggatggaattgcaagtattgaaagtatacattctgaaatgtgtactgataagaactccattttctctacaaatacctcttctgacaatggattaacttccatcagcaaacaaattggagacttcatagagtgccctttgtgccttttgcggcattctaaagacagatttcctgatataatgacttgtcatcacagatcttgtgtggattgcttacgacaatatttaaggataga

SEQ ID NO: 177375 - DNA, 4124 bp, Homo sapiens
  Payload ID: 14805
  Gene Symbol: RNF19A
  Gene Name: ring finger protein 19A, RBR E3 ubiquitin protein ligase
  Uniprot ID: Q9NV58
  ENST ID: ENST00000616528
  CDS Start-End: 111-2627
tggtttctgttactcagaacatccatgatagcagtcttctgtaaatcgaacttttcaagaattctctgaaggaaccaagtaggatattcttacatcatgacttaatgtgaatgcaagaacaagaaataggttttatctctaaatataatgaagggctgtgtgtaaacactgaccctgtctcaattctaacaagcattttagacatgagtttacatcggcaaatgggttcagatcgagatcttcagtcctctgcttcatctgtgagcttgccttcagtcaaaaaggcacccaaaaaaagaagaatttcaataggctccctgtttcggaggaaaaaagataacaaacgtaaatcaagggagctaaatggcggggtggatggaattgcaagtattgaaagtatacattctgaaatgtgtactgataagaactccattttctctacaaatacctcttctgacaatggattaacttccatcagcaaacaaattggagacttcatagagtgccctttgtgccttttgcggcattctaaagacagatttcctgatataatgacttgtcatcacagatcttgtgtggattgcttacgacaatatttaaggatagaaatctctgaaagcagagttaatattagttgcccagaatgtactgaacggtttaatccccatgatattcgcttgatattaagtgatgatgtcttgatggaaaaatacgaagaatttatgcttagacggtggcttgttgcagatcctgattgtaggtggtgtccagctccagactgtggatatgctgtgatagcatttggatgtgccagctgtccaaaattaacttgtgggcgagagggctgtggaacagagttttgctaccactgtaaacagatttggcaccccaaccagacctgtgatgctgctcgacaagagagagcccagagcttacgtttgagaactatacgttcttcatccattagttatagtcaagagtctggagcagcagctgatgatataaagccatgtccacgatgtgctgcttatataataaagatgaatgatgggagctgcaatcacatgacatgtgctgtttgtggttgtgagttttgttggttgtgtatgaaagaaatctcagatttgcattatctaagtccatcaggatgtactttttgggggaagaaaccctggagccgaaagaagaaaatattgtggcaactgggaacactggttggtgctcctgtcggaatcgctttaatagctggcattgctattcctgcaatgattattggcattcctgtgtatgtgggccgcaagattcacaatcgctatgaaggcaaggatgtttcaaagcacaaacggaatttggccatagcaggtggtgtaacgttgtctgtaatcgtgtctccagtagtagctgcagtgactgtaggtatcggtgttcctattatgttagcttatgtctatggcgtagttccaatttctctttgtcgaagcggaggttgtggagtctcagcaggcaatggaaaaggagttaggattgaatttgatgatgaaaatgatataaatgttggtggaactaacacagctgtagacacaacatcagtagcagaagcaagacacaacccaagcataggggagggaagtgttggtgggctgactggcagtttgagtgcaagtggaagccacatggatcgaataggagccatccgagacaacctgagtgaaacggccagcaccatggcactagctggagccagtataacggggagtctgtcaggaagtgccatggtaaactgttttaacaggttggaagtacaagcagatgtacagaaagaacggtacagtctaagtggagaatctggcacagtcagcttgggaacagttagtgataatgccagcaccaaagcaatggcaggatccattctgaattcctacatcccattggacaaagaaggcaacagtatggaggtgcaagtagatattgagtcaaagccatccaaattcaggcacaacagtggaagcagtagtgtggatgatggcagtgccacccgaagtcatgctggcggttcatccagtggcttgcctgaaggtaaatctagtgccaccaagtggtccaaagaagcaacagcagggaaaaaatcaaaaagtggtaaactgaggaaaaagggtaacatgaagataaatgagacgagagaggacatggatgcacagttgttagaacaacaaagcacgaactcaagtgaatttgaggctccatccctcagtgacagtatgccttctgtagcagattctcactctagtcatttttctgaatttagttgttctgacctagaaagcatgaaaacttcttgtagtcatggttccagtgattatcacacccgctttgctactgttaacattcttcctgaggtagaaaatgaccgtctggaaaattccccacatcagtgtagcatttctgtggttacccaaactgcttcctgttcagaagtttcacagttgaatcatattgctgaagaacatggtaacaatggaataaaacctaatgttgatttatattttggcgatgcactaaaagaaacaaataacaaccactcacatcagacaatggaattaaaagttgcaattcagactgaaatttaggcccataaatgctgcagaataattaccactgtacaaccgtgtttggagctggttgaactacatgtgactacttaagtttcaggttaccagcaaaagccgggtttcattatcataatgcagatacattttctgtgttcagcaaggcattgtgtgtcatgtggatcttagttaccaaactatgaagtgaaggctttaaaagtgcattattttaaggataataaatttgaagagcaaagcatgttttgtgtgtttgccacaaaacattgcttgaagcacatacttagatagaaattggtcttaatttatataatcaatataaaatactaatgcaattctacagcattcaaatgaagaaaacttgaggctttagggataagtggttagtgatattttattgaaaccactaaagagataagtttaaaagaactgcataggttactctcagtatatgatactctgtaacatttctatttatatcggcataaatttcattttttttcttcatatgcaatgtggttatataaagcttaatgcagctcatttgctaccatttggatacttagacactttgagcaagattgtggcagtttttgcacaactttgaaatagaaatacctggtactctatcttgtttattgttgatgccatcttagaggaaaaaatgtaaaggtaagtaattaagcatatgacagcaacaaataagatacataaaactacaaaataaagtcccattaggttataagtattacaaaaaatccacctttctctaaggggaagtttgtaccccattgattcttggtgcctttgggatcgactgggttttaatggcctagttatttgaggattttgctgtgttgttttccatgtcttctctggtcaccttggattatatataaaaatacaggaaatagataaacatgaatgtgattaataatgctgaaaaagtattagcctaccaaagacacactcaggctttagtgaataactttacataacctcagtttttaacacatgcatatcttctccaaccatgaaatcaaagcacggtgcagaacttgtaccaagtacaaaaggtccatgtatgattagcattattttcttttgcttttgtttatggacaatgttcagctgacataagcagaagttggccaaaatactgcctgtactgttaatttcctgtataattcacttaaataaaagcaggttaacctcaatgatagcagttaaaatgttctatcttatgtatttcttttaagtattaccattatggtgctactgagcgttttcttttggtaaaaagaaaaatgccatgggctgcagtcttcttccatcacttttccctaccaggtccattaatatgcttataacactagtgccagttattttatttgataatgcttatggtatttgtatatttgtttgcattccaattttgtttaataatgagtgtgtaaactgcatacgttaaataaatgtaaatactaatgtactgctgcc

SEQ ID NO: 177376 - DNA, 2334 bp, Homo sapiens
  Payload ID: 14806
  Gene Symbol: RNF19B
  Gene Name: ring finger protein 19B
  Uniprot ID: Q6ZMZ0
  ENST ID: ENST00000235150
  CDS Start-End: 1-2196
atgggctccgagaaggactccgagtcgccgcgctccacatcgctacatgcggccgcacccgaccctaagtgccgcagcggcggccggcgccggcgcctcaccttgcacagcgtcttctctgcctcggcccgcggccgccgcgcccgggccaagccgcaggccgagccgccgcccccggctgcgcagccgccgcccgccccggcccctgccgcggcccagggcccgccgcccgaggcgctgcccgccgagccggccgccgaggccgaggcggaggccgcggcggcggcggcggagcctgggttcgacgatgaggaggcggcggagggcggtggcccgggcgcggaggaggtggagtgtccgctgtgcctggtgcggctgccgcctgagcgggccccgcgcctcctcagctgtccgcaccgctcgtgccgggactgcctccgccactacctgcgcctggagataagcgagagcagggtgcccatcagctgccccgagtgcagcgagcgactcaacccgcacgacatccgcttgctgctcgccgacccgccgcttatgcacaagtacgaggagttcatgctgcgccgctacctagcctcggaccccgactgccgctggtgcccggccccggactgcggttatgctgttattgcctatggctgtgccagctgcccgaagctaacttgtgagagggaaggttgccagactgagttctgctaccactgcaagcagatatggcatccaaatcagacatgcgatatggcccgtcaacagagggcccagactttacgagttcggaccaaacacacttcaggtctcagttatgggcaagaatctggaccagatgacatcaagccatgcccacgatgcagtgcatacattatcaagatgaatgatggaagctgtaatcacatgacctgtgcagtgtgtggctgtgaattctgttggctttgtatgaaagagatctcagacttgcattacctcagcccctctggctgtacattctggggcaagaagccatggagccgtaagaagaaaattctttggcagctgggcacgttgattggtgctccagtggggatttctctcattgctggcattgccattcctgccatggtcattggcattcctgtttatgttggaaggaagattcacagcaggtatgagggaaggaaaacctccaaacacaagaggaatttggctatcactggaggagtgactttgtcggtcattgcatccccagttattgctgcagttagtgttggtattggtgtccccattatgctggcatatgtttatggggttgtgcccatttctctttgtcgtggaggcggctgtggagttagcacagccaacggaaaaggagtgaaaattgaatttgatgaagatgatggtccaatcacagtggcagatgcctggagagccctcaagaatcccagcattggggaaagcagcattgaaggcctgactagtgtattgagcactagtggaagccctacagatggacttagtgttatgcaaggtccttacagcgaaacggccagctttgcagccctctcagggggcacgctgagtggcggcattctctccagtggcaagggaaaatatagcaggttagaagttcaagccgatgtccaaaaggaaattttccccaaagacacagccagtcttggtgcaattagtgacaacgcaagcactcgtgctatggccggttccataatcagttcctacaacccacaggacagagaatgcaacaatatggaaatccaagtggacattgaagccaaaccaagccactatcagctggtgagtggaagcagcacggaggactcgctccatgttcatgctcagatggcagagaatgaagaagaaggtagtggtggcggaggcagtgaagaggatcccccctgcagacaccaaagctgtgaacagaaagactgcctggccagcaaaccttgggacatcagcctggcccagcctgaaagcatccgcagtgacctagagagttctgatgcacagtcagacgatgtgccagacatcacctcagatgagtgtggctccccccgctcccatactgcagcctgcccctcgacccccagagcccaaggtgcaccgagcccaagtgcccatatgaacctctctgccctagccgagggacaaactgtcttgaagccagaaggtggagaagccagagtatgaagtggaatgaatgctcctgttctgagaagcacacttgtaactgcatcttttggaatttttttttttttttttccaaggggtagagatttatgtattttatttcacagattctctggtcacaggtttttgcccagggaa

SEQ ID NO: 177377 - DNA, 2598 bp, Homo sapiens
  Payload ID: 14806
  Gene Symbol: RNF19B
  Gene Name: ring finger protein 19B
  Uniprot ID: Q6ZMZ0
  ENST ID: ENST00000356990
  CDS Start-End: 1-1764
atgggctccgagaaggactccgagtcgccgcgctccacatcgctacatgcggccgcacccgaccctaagtgccgcagcggcggccggcgccggcgcctcaccttgcacagcgtcttctctgcctcggcccgcggccgccgcgcccgggccaagccgcaggccgagccgccgcccccggctgcgcagccgccgcccgccccggcccctgccgcggcccagggcccgccgcccgaggcgctgcccgccgagccggccgccgaggccgaggcggaggccgcggcggcggcggcggagcctgggttcgacgatgaggaggcggcggagggcggtggcccgggcgcggaggaggtggagtgtccgctgtgcctggtgcggctgccgcctgagcgggccccgcgcctcctcagctgtccgcaccgctcgtgccgggactgcctccgccactacctgcgcctggagataagcgagagcagggtgcccatcagctgccccgagtgcagcgagcgactcaacccgcacgacatccgcttgctgctcgccgacccgccgcttatgcacaagtacgaggagttcatgctgcgccgctacctagcctcggaccccgactgccgctggtgcccggccccggactgcggttatgctgttattgcctatggctgtgccagctgcccgaagctaacttgtgagagggaaggttgccagactgagttctgctaccactgcaagcagatatggcatccaaatcagacatgcgatatggcccgtcaacagagggcccagactttacgagttcggaccaaacacacttcaggtctcagttatgggcaagaatctggaccagatgacatcaagccatgcccacgatgcagtgcatacattatcaagatgaatgatggaagctgtaatcacatgacctgtgcagtgtgtggctgtgaattctgttggctttgtatgaaagagatctcagacttgcattacctcagcccctctggctgtacattctggggcaagaagccatggagccgtaagaagaaaattctttggcagctgggcacgttgattggtgctccagtggggatttctctcattgctggcattgccattcctgccatggtcattggcattcctgtttatgttggaaggaagattcacagcaggtatgagggaaggaaaacctccaaacacaagaggaatttggctatcactggaggagtgactttgtcggtcattgcatccccagttattgctgcagttagtgttggtattggtgtccccattatgctggcatatgtttatggggttgtgcccatttctctttgtcgtggaggcggctgtggagttagcacagccaacggaaaaggagtgaaaattgaatttgatgaagatgatggtccaatcacagtggcagatgcctggagagccctcaagaatcccagcattggggaaagcagcattgaaggcctgactagtgtattgagcactagtggaagccctacagatggacttagtgttatgcaaggtccttacagcgaaacggccagctttgcagccctctcagggggcacgctgagtggcggcattctctccagtggcaagggaaaatatagcaggttagaagttcaagccgatgtccaaaaggaaattttccccaaagacacagccagtcttggtgcaattagtgacaacgcaagcactcgtgctatggccggttccataatcagttcctacaacccacaggacaggtttagcatgatccatgcatgactcagcaaagtggattttgtctccacagagaatgcaacaatatggaaatccaagtggacattgaagccaaaccaagccactatcagctggtgagtggaagcagcacggaggactcgctccatgttcatgctcagatggcagagaatgaagaagaaggtagtggtggcggaggcagtgaagaggatcccccctgcagacaccaaagctgtgaacagaaagactgcctggccagcaaaccttgggacatcagcctggcccagcctgaaagcatccgcagtgacctagagagttctgatgcacagtcagacgatgtgccagacatcacctcagatgagtgtggctccccccgctcccatactgcagcctgcccctcgacccccagagcccaaggtgcaccgagcccaagtgcccatatgaacctctctgccctagccgagggacaaactgtcttgaagccagaaggtggagaagccagagtatgaagtggaatgaatgctcctgttctgagaagcacacttgtaactgcatcttttggaatttttttttttttttttccaaggggtagagatttatgtattttatttcacagattctctggtcacaggtttttgcccagggaaattctgagaaattcacaatttcttaccagataaaacatgaaaagtttgccgttagttcccctcccctcccctccctctttttagttttaatttattggttaaactgatggcagcaatccatgaggtgtgtcaaagagtgtacatatgtatgtgtgtatattgaatgctaaacatattactgaaagacacattttaataaagatttctgtcataa

SEQ ID NO: 177378 - DNA, 2560 bp, Homo sapiens
  Payload ID: 14806
  Gene Symbol: RNF19B
  Gene Name: ring finger protein 19B
  Uniprot ID: Q6ZMZ0
  ENST ID: ENST00000373456
  CDS Start-End: 1-2199
atgggctccgagaaggactccgagtcgccgcgctccacatcgctacatgcggccgcacccgaccctaagtgccgcagcggcggccggcgccggcgcctcaccttgcacagcgtcttctctgcctcggcccgcggccgccgcgcccgggccaagccgcaggccgagccgccgcccccggctgcgcagccgccgcccgccccggcccctgccgcggcccagggcccgccgcccgaggcgctgcccgccgagccggccgccgaggccgaggcggaggccgcggcggcggcggcggagcctgggttcgacgatgaggaggcggcggagggcggtggcccgggcgcggaggaggtggagtgtccgctgtgcctggtgcggctgccgcctgagcgggccccgcgcctcctcagctgtccgcaccgctcgtgccgggactgcctccgccactacctgcgcctggagataagcgagagcagggtgcccatcagctgccccgagtgcagcgagcgactcaacccgcacgacatccgcttgctgctcgccgacccgccgcttatgcacaagtacgaggagttcatgctgcgccgctacctagcctcggaccccgactgccgctggtgcccggccccggactgcggttatgctgttattgcctatggctgtgccagctgcccgaagctaacttgtgagagggaaggttgccagactgagttctgctaccactgcaagcagatatggcatccaaatcagacatgcgatatggcccgtcaacagagggcccagactttacgagttcggaccaaacacacttcaggtctcagttatgggcaagaatctggaccagcagatgacatcaagccatgcccacgatgcagtgcatacattatcaagatgaatgatggaagctgtaatcacatgacctgtgcagtgtgtggctgtgaattctgttggctttgtatgaaagagatctcagacttgcattacctcagcccctctggctgtacattctggggcaagaagccatggagccgtaagaagaaaattctttggcagctgggcacgttgattggtgctccagtggggatttctctcattgctggcattgccattcctgccatggtcattggcattcctgtttatgttggaaggaagattcacagcaggtatgagggaaggaaaacctccaaacacaagaggaatttggctatcactggaggagtgactttgtcggtcattgcatccccagttattgctgcagttagtgttggtattggtgtccccattatgctggcatatgtttatggggttgtgcccatttctctttgtcgtggaggcggctgtggagttagcacagccaacggaaaaggagtgaaaattgaatttgatgaagatgatggtccaatcacagtggcagatgcctggagagccctcaagaatcccagcattggggaaagcagcattgaaggcctgactagtgtattgagcactagtggaagccctacagatggacttagtgttatgcaaggtccttacagcgaaacggccagctttgcagccctctcagggggcacgctgagtggcggcattctctccagtggcaagggaaaatatagcaggttagaagttcaagccgatgtccaaaaggaaattttccccaaagacacagccagtcttggtgcaattagtgacaacgcaagcactcgtgctatggccggttccataatcagttcctacaacccacaggacagagaatgcaacaatatggaaatccaagtggacattgaagccaaaccaagccactatcagctggtgagtggaagcagcacggaggactcgctccatgttcatgctcagatggcagagaatgaagaagaaggtagtggtggcggaggcagtgaagaggatcccccctgcagacaccaaagctgtgaacagaaagactgcctggccagcaaaccttgggacatcagcctggcccagcctgaaagcatccgcagtgacctagagagttctgatgcacagtcagacgatgtgccagacatcacctcagatgagtgtggctccccccgctcccatactgcagcctgcccctcgacccccagagcccaaggtgcaccgagcccaagtgcccatatgaacctctctgccctagccgagggacaaactgtcttgaagccagaaggtggagaagccagagtatgaagtggaatgaatgctcctgttctgagaagcacacttgtaactgcatcttttggaatttttttttttttttttccaaggggtagagatttatgtattttatttcacagattctctggtcacaggtttttgcccagggaaattctgagaaattcacaatttcttaccagataaaacatgaaaagtttgccgttagttcccctcccctcccctccctctttttagttttaatttattggttaaactgatggcagcaatccatgaggtgtgtcaaagagtgtacatatgtatgtgtgtatattgaatgctaaacatattactgaaagacacattttaataaagatttctgtcataattcaactta

SEQ ID NO: 177379 - DNA, 1677 bp, Homo sapiens
  Payload ID: 14807
  Gene Symbol: RNF2
  Gene Name: ring finger protein 2
  Uniprot ID: Q99496
  ENST ID: ENST00000367509
  CDS Start-End: 127-921
cccgagctccattgcggaagctgaggctcgccatattgtgcggcggcgccggcgtccgcggcagctgataccagagtcttgctccggccgcggccagcggagccctgggctggggcaggagccgcaatgtctcaggctgtgcagacaaacggaactcaaccattaagcaaaacatgggaactcagtttatatgagttacaacgaacacctcaggaggcaataacagatggcttagaaattgtggtttcacctcgaagtctacacagtgaattaatgtgcccaatttgtttggatatgttgaagaacaccatgactacaaaggagtgtttacatcgtttttgtgcagactgcatcatcacagcccttagaagtggactgcagcgaggcaagaaacaacagattgaaaatggtagtggagcagaagataatggtgacagttcacactgcagtaatgcatccacacatagcaatcaggaagcaggccctagtaacaaacggaccaaaacatctgatgattctgggctagagcttgataataacaatgcagcaatggcaattgatccagtaatggatggtgctagtgaaattgaattagtattcaggcctcatcccacacttatggaaaaagatgacagtgcacagacgagatacataaagacttctggtaacgccactgttgatcacttatccaagtatctggctgtgaggttagctttagaagaacttcgaagcaaaggtgaatcaaaccagatgaaccttgatacagccagtgagaagcagtataccatttatatagcaacagccagtggccagttcactgtattaaatggctctttttctttggaattggtcagtgagaaatactggaaagtgaacaaacccatggaactttattacgcacctacaaaggagcacaaatgagcctttaaaaaccaattctgagactgaacttttttatagcctatttctttaatattaaagatgtactggcattacttttatggacagatcttggatatgttgttcaattttctttctgagccagactagtttacgctattcaaatcttttcccctttatttaagatttcctttttggaagggactgcaattattcagtatttttttctttcctttaaaaaaatatatctgaagtttcttgtgtttttttttttccccacaaagtgtgtttccacttggagcaccattttgacccaggaatttttcatagtttctgtattcttataagattcagttggctgtccttttcctgctcccctcaaaagatttttagtcatacagaatgttaaatattatgtattctgactttttttttcccccggagtcttgtatatttatagttttctatataaactgtagtatcttcatgaagacccaaggctcaaatttactgtccttaaaaacaattctcataggattattcttttcatggtattttcttccataatatctcattttaaaaagaagttctttatgaacttagtgtccattgtcatgcaatgtttttttttttccattctttttccctgtaattttggaatttctggtcctgggaagaatcaaacaaaatcttaagttctatgagaacttggttcattgacatattctgctgaagaaagaaaaattaaattggtagtaaaatatagtcttcaagtat

SEQ ID NO: 177380 - DNA, 3606 bp, Homo sapiens
  Payload ID: 14807
  Gene Symbol: RNF2
  Gene Name: ring finger protein 2
  Uniprot ID: Q99496
  ENST ID: ENST00000367510
  CDS Start-End: 289-1299
cggcgcaccctccctcgcgccgcgggcctccccgcgccgtgcacgtcctcgtcccgcgcctccgcccctcgctcgctcgctccttcccgccctccccgcagcgccggccgagccggcttcccctcagtctctcatgaatattgagcggcccctgttgtatttcccgagctccattgcggaagctgaggctcgccatattgtgcggcggcgccggcgtccgcggcagctgataccagagtcttgctccggccgcggccagcggagccctgggctggggcaggagccgcaatgtctcaggctgtgcagacaaacggaactcaaccattaagcaaaacatgggaactcagtttatatgagttacaacgaacacctcaggaggcaataacagatggcttagaaattgtggtttcacctcgaagtctacacagtgaattaatgtgcccaatttgtttggatatgttgaagaacaccatgactacaaaggagtgtttacatcgtttttgtgcagactgcatcatcacagcccttagaagtggcaacaaagaatgtcctacctgtcggaaaaaactagtttccaaaagatcactaaggccagacccaaactttgatgcactcatcagcaaaatttatccaagtcgtgatgagtatgaagctcatcaagagagagtattagccaggatcaacaagcacaataatcagcaagcactcagtcacagcattgaggaaggactgaagatacaggccatgaacagactgcagcgaggcaagaaacaacagattgaaaatggtagtggagcagaagataatggtgacagttcacactgcagtaatgcatccacacatagcaatcaggaagcaggccctagtaacaaacggaccaaaacatctgatgattctgggctagagcttgataataacaatgcagcaatggcaattgatccagtaatggatggtgctagtgaaattgaattagtattcaggcctcatcccacacttatggaaaaagatgacagtgcacagacgagatacataaagacttctggtaacgccactgttgatcacttatccaagtatctggctgtgaggttagctttagaagaacttcgaagcaaaggtgaatcaaaccagatgaaccttgatacagccagtgagaagcagtataccatttatatagcaacagccagtggccagttcactgtattaaatggctctttttctttggaattggtcagtgagaaatactggaaagtgaacaaacccatggaactttattacgcacctacaaaggagcacaaatgagcctttaaaaaccaattctgagactgaacttttttatagcctatttctttaatattaaagatgtactggcattacttttatggacagatcttggatatgttgttcaattttctttctgagccagactagtttacgctattcaaatcttttcccctttatttaagatttcctttttggaagggactgcaattattcagtatttttttctttcctttaaaaaaatatatctgaagtttcttgtgtttttttttttccccacaaagtgtgtttccacttggagcaccattttgacccaggaatttttcatagtttctgtattcttataagattcagttggctgtccttttcctgctcccctcaaaagatttttagtcatacagaatgttaaatattatgtattctgactttttttttcccccggagtcttgtatatttatagttttctatataaactgtagtatcttcatgaagacccaaggctcaaatttactgtccttaaaaacaattctcataggattattcttttcatggtattttcttccataatatctcattttaaaaagaagttctttatgaacttagtgtccattgtcatgcaatgtttttttttttccattctttttccctgtaattttggaatttctggtcctgggaagaatcaaacaaaatcttaagttctatgagaacttggttcattgacatattctgctgaagaaagaaaaattaaattggtagtaaaatatagtcttcaagtatacgtttgagagtgcttttttttgtattagttctgctgtcacttcatttcctgtattatatgtgatgtttttccccattaaaataccagagataatggagatattttgcactttagccttgatgaaaagtacaagatatgttcaaagcttccctaatttttttcttatttgtagccacataagtttcaagaataacatggcacacagaacaatggaaaaaagtttgtttccattggaaaattatatcattttgggttgccacatcagtttataaatttggcgctcttttaattacactctgtagaaggttaatagagcttgagccctgctttaatatgtagtgaaagataattctgtagaaaaacgtcagccagtagggtaaagtcattctactgttcttaatttttatattgaggaacaatattgggtgtttgggagccagaaagctttgttgacagatcagaaataagattgacttgggtgttatatttcatctctctccagactctaggtatatttccaactttatatatcacagtatttaaaaagacatgtttgcattgagaaattaaccctaaagggttttcaatagggtgtagacctccagtacctttgtaactaaagtctgtctagtcattgtaaatatttatctgtcagttttgacagattggggccagcttgatgttttaaatcttcagcccggtatgaaaacttaaaggtatatattcaattttttaccattttatggaaaatatttaaaatctgtttttacagggttttttttttttttttttttttgtaatctgtgccatgaaatttgaaaaccaccaaaaatcaagggaacttttatatattcaattccttttctggtgtaatgttaaagttgtatagattattaatgcatgcccactgaatataaccctggttttgtgataaaactgcttagattttgttgatgacattagattagtagttgcattaaataactaaattcccattgtgattaattgaaattttgtctttaagcagagagttatttgtgactataagctttgtgcttagagaatgtatgtgtttttatctgtcagtatgggaggatataaactgcatcattagtgaaattattggttgtgtaatcctttgtgaaatataattctaggtatttgatagggtattgagtgtattttgtgtgtgtgtggatgtgtgttttggggtacggggagaggcgatgctattggccatcactaccaaccagggtttcaaaaagtattacctaagtaatttcttttatcactatctcaactgaggaagaaaaggctcaccacaagtggtgtgaaggctttgggtacttagttctaaatttttttatggtaacatatacatagccacatttacagttttaaccattttaaggcatgtaattcagtggggttaggtacattcacaatgttgtgtaatgatcaccgctgtctacttgtaaaactttttcatcaccccaaacagaaactctgtgtgcaattaaagtaatgcatttctcttcttcttaacccct

SEQ ID NO: 177381 - DNA, 939 bp, Homo sapiens
  Payload ID: 14807
  Gene Symbol: RNF2
  Gene Name: ring finger protein 2
  ENST ID: ENST00000453650
  CDS Start-End: 203-939
ggatgtgtgtctgcatcgtgggggtggggtagggggcactttgtgcagatatcgctccttccttctggggggtcggagtcggggttccagtgtagaggagctcctcgacctcggggttcctcggggagaccccttcagcttcacacattcctggagtgccgcctcctgctctggagtatctgttgctgctttctaaaacccaatgtctcaggctgtgcagacaaacggaactcaaccattaagcaaaacatgggaactcagtttatatgagttacaacgaacacctcaggaggcaataacagatggcttagaaattgtggtttcacctcgaagtctacacagtgaattaatgtgcccaatttgtttggatatgttgaagaacaccatgactacaaaggagtgtttacatcgtttttgtgcagactgcatcatcacagcccttagaagtggcaacaaagaatgtcctacctgtcggaaaaaactagtttccaaaagatcactaaggccagacccaaactttgatgcactcatcagcaaaatttatccaagtcgtgatgagtatgaagctcatcaagagagagtattagccaggatcaacaagcacaataatcagcaagcactcagtcacagcattgaggaaggactgaagatacaggccatgaacagactgcagcgaggcaagaaacaacagattgaaaatggtagtggagcagaagataatggtgacagttcacactgcagtaatgcatccacacatagcaatcaggaagcaggccctagtaacaaacggaccaaaacatctgatgattctgggctagagcttgataataacaatgcagcaatggcaattgatccagtaatggatggtgctagtgaaattgaattagtattcaggcctcatcccacacttatggaaaaagatgacagtgcacagacgag

SEQ ID NO: 177382 - DNA, 596 bp, Homo sapiens
  Payload ID: 14808
  Gene Symbol: RNF20
  Gene Name: ring finger protein 20, E3 ubiquitin protein ligase
  ENST ID: ENST00000374819
  CDS Start-End: 54-596
agagctggaatctctgcacgggccttggaaaacgactgtcttcttctgccaaaatgtcaggaattggaaataaaagagcagctggagaacctggcacctccatgcctcctgagaagaaggcagctgttgaagattcagggaccacagtggaaacaattaagctaggaggtgtctcttcaacggaggaactagacattagaacactgcaaaccaaaaatcgcaagctggcagaaatgttggatcagcggcaggccattgaagatgaacttcgtgagcacattgaaaaactggaacgacgacaggccactgatgatgcctcactattgattgtcaaccgatactggagtcagtttgatgaaaacatccgtatcatccttaaacgttatgatctggagcagggcttgggagacctactcacagaacgaaaagcccttgttgtgcctgaaccagaaccagactctgatagcaatcaggagcgtaaagatgaccgagagagaggggaagggcaagagccagctttctctttccttgctactttggccagcagttccagtgaagagatggagtctcagctgcaggaacgtgtggagtcttcc

SEQ ID NO: 177383 - DNA, 3940 bp, Homo sapiens
  Payload ID: 14808
  Gene Symbol: RNF20
  Gene Name: ring finger protein 20, E3 ubiquitin protein ligase
  Uniprot ID: Q5VTR2
  ENST ID: ENST00000389120
  CDS Start-End: 91-3018
ggaagttctgccttgtctccgccgcgggtcaggggtgagagctggaatctctgcacgggccttggaaaacgactgtcttcttctgccaaaatgtcaggaattggaaataaaagagcagctggagaacctggcacctccatgcctcctgagaagaaggcagctgttgaagattcagggaccacagtggaaacaattaagctaggaggtgtctcttcaacggaggaactagacattagaacactgcaaaccaaaaatcgcaagctggcagaaatgttggatcagcggcaggccattgaagatgaacttcgtgagcacattgaaaaactggaacgacgacaggccactgatgatgcctcactattgattgtcaaccgatactggagtcagtttgatgaaaacatccgtatcatccttaaacgttatgatctggagcagggcttgggagacctactcacagaacgaaaagcccttgttgtgcctgaaccagaaccagactctgatagcaatcaggagcgtaaagatgaccgagagagaggggaagggcaagagccagctttctctttccttgctactttggccagcagttccagtgaagagatggagtctcagctgcaggaacgtgtggagtcttcccgccgagccgtgtcccagattgtgactgtttatgataaattgcaagaaaaagtggagctcttatcccggaagctaaacagtggagataatctgatagtggaggaagcagtgcaggagctgaactctttcctcgcacaggagaatatgaggctacaggaattgacagatcttcttcaggaaaagcatcgcaccatgtctcaggagttctccaagttgcagagtaaagtggagacagccgaatcacgagtgtctgtcctggagtccatgattgatgacctgcagtgggatattgacaaaattcgaaagagggaacagcgactcaaccgacacttagcagaagtcctagaacgggtgaattccaaaggttataaggtgtatggagcggggagcagtctgtatggcggcacaatcactatcaatgctcggaagtttgaggaaatgaatgcagagcttgaggagaacaaagagttggctcagaaccgtctctgtgagctggagaaacttcggcaagactttgaggaggtcactacacaaaatgaaaagctgaaggtggaattgcggagtgcagtggagcaagtcgttaaggaaactccagaatatcgctgcatgcagtcacagttctccgtcttgtataatgagagcctacagttgaaagcacacttggatgaggctcggaccctgcttcatggcaccagaggaacccaccagcaccaggttgagcttattgagcgagatgaggttagtcttcataagaagctgaggactgaagtaattcagctagaagatacattggcccaggtccgcaaggagtatgaaatgctgaggatagaatttgagcagacccttgctgccaatgaacaagcaggccctataaacagggagatgcgccacctcatcagtagcctccagaatcacaatcaccagctgaaaggggaggtcctgagatataagcggaaattgagagaagcccagtctgacctgaacaagacacgcctgcgtagtggtagtgccctcctgcagtcccagtctagtactgaggacccgaaggatgagcctgcggagctaaaaccagattctgaggacttatcctcccagtcctcagcttcaaaggcatctcaggaggatgccaatgaaatcaagtctaaacgggatgaagaagaacgagaacgagaaaggagggagaaggagagggaacgagaaagagaacgggagaaggagaaggagagagaacgagagaagcagaagctaaaagagtcagaaaaagagagagattctgctaaggataaagagaaaggcaaacatgatgatggacggaaaaaggaagcagaaattatcaaacaattgaagattgaactcaagaaggcacaggagagccaaaaggagatgaaactattgctggatatgtaccgttctgccccaaaggaacagagagacaaagttcagctgatggcagctgagaagaagtctaaggcagagttggaagatctaaggcaaagactcaaggatctggaagataaagagaagaaagagaacaagaaaatggctgatgaggatgccttgaggaagatccgggcagtggaggagcagatagaatacctacagaagaagctagccatggccaagcaggaagaagaagcactcctctctgaaatggatgtcacaggccaggcctttgaagacatgcaggagcaaaatatccgtttgatgcagcaattgcgggagaaggatgatgcaaatttcaagctcatgtcagagcgtatcaagtccaatcagatccataagttgcttaaagaagagaaggaggagctggcagaccaggtgttgactctgaagactcaggttgatgcccagctacaggtagtaaggaaactggaagagaaggagcatctgttacagagcaacattggcacaggggagaaagagctgggtcttaggacccaagccttagagatgaataaacgcaaggcaatggaggcagcccagcttgcagatgacctcaaagcacaactggagttggctcagaagaagctacatgattttcaggatgagatcgtggagaacagtgttaccaaagaaaaggacatgttcaatttcaaacgagcccaggaggacatctctagacttcgcaggaagctggagaccacaaagaaaccagacaatgtacccaagtgtgatgagattctgatggaagagattaaggattacaaggcacgcttgacctgtccgtgctgtaacatgcgtaaaaaggatgctgttcttactaagtgttttcatgtcttctgctttgagtgtgtgaagacacgctatgacacccgccagcgcaaatgtcccaagtgtaatgctgcttttggtgccaatgattttcatcgcatctacattggttgatctaagtcaagagaagaagaggagctggctagtcaggaacttattcattaaccaccaaacctctacctcttctctccttgactgtcacctgtaggacagtttatcagtcaactacctttcctccagactttacttccaggctctcctcttcagtagctggatgactttagcagaaaggactggtaaatacaagccttgggtttcagaatgaattagaaacaaataactcttactgtcttccctcccagctttgtttattttgtgcttttagacttttcagtgttttctttttccagcccactgtataaacttggattgtccattcctcctgaagaaatcaagttggtatttttgatgtggaaaagggaacaaaagtggaaacatggctacttttggggagtgatattttaaaaaataagttgtctatgggcacaaagttttcttcatttgtgtagcaaacttcttgtgaatgtggattacaaaatggtataattgtgctactctcccctgggtggtttgcagccctaatgaaattatgtctaggatgattcagtctatttcccatttactagcagagtaacttgttaagatcagctggctttcttgttaaagttatttaagttttgaatgctctactacttcaagtctttaaatttcttgagactagaataattttaaataatatgaccctttgtcttctaatgaaataaagattgaagaggttgagtcaggactgagctggtgaagaaatcttgtgggtattctggaaatttgatacggagagaacttggtgagctatgaattactctcagtctcctttttacagggttgttgtgatccctcttttccagaaaattctgtggaatgtttctgtaggactttgttctccacaagcttgaattaaagcaggattcagtttgca

SEQ ID NO: 177384 - DNA, 784 bp, Homo sapiens
  Payload ID: 14808
  Gene Symbol: RNF20
  Gene Name: ring finger protein 20, E3 ubiquitin protein ligase
  ENST ID: ENST00000466817
  CDS Start-End: 349-784
gcttagggcccaacaggactgtgccaggcctcaggagtctccaccctctccagttttggggccgtcagtctcctgggcctgcaattatccacgctgaggctgaggtctttggcttttagcgagttggattgcagccttgttctgcttctgtgtcttctctctccaggcgaggtcctactgaggttgttgccagcgatagtcctctcctggagcttgaattggaagcagagtagtcttgttagtctcggtgatggctgcgttgtttcctgaagtagccaaagtgctttagcatccattccgcctcctttgagcaccctgggaggaaaacgactgtcttcttctgccaaaatgtcaggaattggaaataaaagagcagctggagaacctggcacctccatgcctcctgagaagaaggcagctgttgaagattcagggaccacagtggaaacaattaagctaggaggtgtctcttcaacggaggaactagacattagaacactgcaaaccaaaaatcgcaagctggcagaaatgttggatcagcggcaggccattgaagatgaacttcgtgagcacattgaaaaactggaacgacgacaggccactgatgatgcctcactattgattgtcaaccgatactggagtcagtttgatgaaaacatccgtatcatccttaaacgttatgatctggagcagggcttgggagacctactcacagaacgaaaagcccttgttgtgcctgaaccagaaccagactctgatagcaatcaggagcgtaaagatgacc

SEQ ID NO: 177385 - DNA, 387 bp, Homo sapiens
  Payload ID: 14808
  Gene Symbol: RNF20
  Gene Name: ring finger protein 20, E3 ubiquitin protein ligase
  ENST ID: ENST00000479306
  CDS Start-End: 91-387
acgggccttggtgagtaactgctgcgagttctgttcccgcgcggcgccagttcaaagaacttaggaaaacgactgtcttcttctgccaaaatgtcaggaattggaaataaaagagcagctggagaacctggcacctccatgcctcctgagaagaaggcagctgttgaagattcagggaccacagtggaaacaattaagctaggaggtgtctcttcaacggaggaactagacattagaacactgcaaaccaaaaatcgcaagctggcagaaatgttggatcagcggcaggccattgaagatgaacttcgtgagcacattgaaaaactggaacgacgacaggccactgatgatgcctcactattgattgtcaaccgatactggagtcag

SEQ ID NO: 177386 - DNA, 3924 bp, Homo sapiens
  Payload ID: 14809
  Gene Symbol: RNF207
  Gene Name: ring finger protein 207
  Uniprot ID: Q6ZRF8
  ENST ID: ENST00000377939
  CDS Start-End: 128-2032
ggccggctactcctcggcagagcgaccgcgcggtgtctcagagcgcggcccggagccgcactaagagcgctggacggcgggagagaggctcggaggaccggtagctcccagcaaagcggcccagcggatgtcgggagctatcttcgggcccctggagggcccgagctccctggatgccccgagcatccacccgctggtgtgcccgctgtgccacgtgcagtacgagcgcccgtgtcttctggactgtttccacgacttctgtgccggctgcctgcgtggccgcgcgaccgacggccgcctcacctgcccgctgtgccaacaccagacggtgctgaagggtcccagcgggctcccgccggtggaccggctgctgcagttcctggtggacagctcaggggatggcgtggaggcggtgcgctgtgccaactgtgacctggagtgcagcgagcaggacgtggagaccacgtacttctgcaacacgtgcggacagcccctatgcgcgcgctgccgcgacgagacgcaccgagcacgcatgttcgcgcgccacgacatcgtggccctgggtcagcgaagccgcgacgtgccccagaagtgcacgctgcacgcagagccctacctcttgttctccaccgacaagaagttgctgttgtgcatccgctgcttccgcgacatgcagaaggagagccgggcacactgcgtggacctggaatcggcttacgtgcagggctgcgagcggctggagcaggcggtgctggccgtgaaggccctgcagacggccacgcgggaggccatcgcgctgctgcaggccatggtggaggaggtgcggcacagcgccgccgaggaggaggacgctatccacgccctcttcggcagcatgcaggacaggctggcagagaggaaagcgctgctgctgcaggctgtgcagagccaatacgaagagaaggacaaggccttcaaggagcagctctctcacttggccaccttgctgcccaccctgcaggtccacctggtcatctgctcctccttcctcagcttggccaacaaggctgagttcctggacctgggctatgagctgatggagaggctgcagggcatcgtcacgcggccgcaccacctaaggcctattcagagcagcaagattgccagtgaccaccgagctgaattcgcgcgctgtctggagccactgctgctgctggggccacgtcgggtggcagctgctgcaagtggtgctaacacgctggcagggggcttaggccccaaggcgctgacggggccccactgcccctccccagtaggaaagatgtcggggtcacccgtccaaaagcccacgctgcaccggtccatcagcaccaaggtgctgctggcggagggcgagaacacgcccttcgcagagcactgccgccactatgaggactcctaccggcacctgcaggcagagatgcagagcctaaaggaccaggtacaggagctgcaccgagacctcaccaagcaccactcgctcatcaaggcggagatcatgggagacgtcctgcacaagtccctgcaactggacgtgcagatcgcctcggagcacgcctccttagagggcatgagggtcgtcttccaggagatttgggaggaagcctatcagcgagtggctaatgagcaggagatttatgaagcccagctccatgaccttctccagctgaggcaggagaatgcctacctgaccaccatcaccaagcagatcacgccctacgtccgctccattgccaaggtgaaggagcggctggagcccaggtttcaggcacccgtggatgagcagtcagagagtctacagaacacgcacgacgacagcaggaacaacgcggcctcagccaggaataatccaggaagtgtcccggaaaagagagagaagacatcagagcctaaaggaaacagctgggctccgaacggcctctcagaagagcctctactgaaaaatatggatcatcacagatccaaacagaaaaatgggggcgatgtccccacatggagggaacacccgacttagcaaatgggaccggtccccagggtcaggctcttagagcaggcacaagactgggacactggacagaaggttgttcccatgatggttttttttattttttatttttgagatggagtttcgctctgttgcccaggctggagtgtaatggtgcaatctcggctcactgcaacctctgcctcctgggttcaagcgattctcctgcctcagcctcccgagtagctgggattacaggcgcctgacaccacgccccgctaattttttgtatttttagtagagatggggtttcaccatgttggccaggctggtctcaaacgccagacctcaggtgatccacctgcctcagcctcccaaagtgctgagattacaggggtgagtcaccgcgcctggccaatgttgttgttgtttttaagacagaatttcactctttgttgcccaggctggagtgcaatggcgcaatctctggctcaccgcaacctccgcctcccaggttcaagcgattctcctacctcagcccccagagtagctgggattacaggcatgtaccatcacacccggctaattttttgtattttaagtagagagggggtttctccatgttggtcaggctggcctcgaactcccaacctcaggtgatccgcccacctcggcctcccaaaatgctgggattacaggggtaagccactgtgcccggccggttatttctttaaaaggtaatcatttgtcaagagtaaaacccagaagctctgacaggccataatttcagatcctttggcttgggcagttttgattttccccgtgtttgcatggcatgaagtcttcgtccttgtcacagtagcttgggatgactcccagtccacatggaaaacatcagggagtgacaatccagcaagaaatccctcgctagttccacacctacgcaccgagcgtcggtgtgccaggccctgtgctgggcagagtgtggtatgtcagggtgtgccggttttaggtaacaagactccaccactgagtggcacctgccctattgcaaaggaatccagttcctccggaataacagtcccactgttaacctggtgctactgggaagttccacacagtaatctgagcagtgactcatggaaggatgaggaacgtttgctccagcttctctccctttccagcaagggcagagctcctaaagccaggggttagcacctggccagcttatgtggcagatggtctcagttacaacttcgctgctttcccaaactcctgcagccctcctgagtccgacttccgttgatagcaaggcactgggtggcagcaaccttttttctagtagttttttcccagcagttttccatttctccacagtatccttttcatttagaggagcttaataaatgctttttaaaaagtaacccacgtgacgtaaaattttacaagtttttgtggcaaaatgatgcccagatagtcacatttaagcaaatattcagcttgattcagtgattaacagcaaatgggtctacgtgctaacatggcagcacattcaacacataacacatcactcacattgacgtccactgtccctgcacctgctacttcaggggcactgaggctcctgttccaaggccttacaaacctatgtggtggcctgcagggcaaaaggaattatcattacaactggttagaggtaggaattcagaaagaaattgaggaggccaaacacacgtcgtttgaggctaaaggcttaagacgcttcttacccaagagtgacctcagagtttcacatcccagacaatcacactgtggttgagtgaaatcaagtgcagttttatttaagaactggaaagaataatcagtatctgtgaaagaaaatccaatttagaatatttaaataaacatttatgtaaaaagaa

SEQ ID NO: 177387 - DNA, 1077 bp, Homo sapiens
  Payload ID: 14810
  Gene Symbol: RNF208
  Gene Name: ring finger protein 208
  Uniprot ID: Q9H0X6
  ENST ID: ENST00000391553
  CDS Start-End: 112-897
cggggccccccccaggcctggcgggaccaggatgctgccctgtcacctgccccccagccccacacaacgcccccacccacccgaacatccagtctgactggagacagccggatgccctctgaccccgggcccgaggcgggcagtggctggccgggcctcctcatgtcctgcctgaagggtccccatgtcatcctcaagatggaggccatgaagattgtccaccctgaaaagttccctgagctaccggctgccccctgcttcccgcctgctccccggcccaccccaactctggcacccaagcgtgcctggccctcagacacagagatcattgtcaaccaggcctgtgggggggacatgcctgccttggaaggggcaccccataccccgccactgccacggcggccccgtaagggaagctcggagctgggctttccccgcgtggccccagaggatgaggtcattgtgaatcagtacgtgattcggcctggcccctcggcctcggcggcttcttcggcggcggcaggcgagcccctggagtgccccacctgtgggcactcctacaatgtcacccagcggaggccccgcgtgctgtcctgcctgcactctgtgtgtgagcagtgcctgcagattctctacgagtcctgccccaagtacaagttcatctcctgccccacctgccgccgtgagactgtgctcttcaccgactacggcctggccgcgctggctgtcaacacgtccatcctgagccgcctgccgcctgaggcgctgacggccccatccgggggtcagtggggggctgagcccgagggcagctgctaccagaccttccggcagtactgtggggccgcgtgcacctgccacgtgcggaacccactgtccgcctgctccatcatgtagtagcgcctgcctgcccgccactgcccgctgagcctcgctcgctgcttcttcagggacccggccctgccctgccgcccgctgacccttccttccccaccatggcttccggccccaccccgagtggcattgtcgctgcagccaactttgccattaaaactctttgccaaagtttgcacctgt

SEQ ID NO: 177388 - DNA, 1135 bp, Homo sapiens
  Payload ID: 14810
  Gene Symbol: RNF208
  Gene Name: ring finger protein 208
  Uniprot ID: Q9H0X6
  ENST ID: ENST00000392827
  CDS Start-End: 170-955
ggcctgctgacctcggctgcagggggagccccccccgcgccccctcgccagcctcagcagccagagaccctgggcctggcgggaccaggatgctgccctgtcacctgccccccagccccacacaacgcccccacccacccgaacatccagtctgactggagacagccggatgccctctgaccccgggcccgaggcgggcagtggctggccgggcctcctcatgtcctgcctgaagggtccccatgtcatcctcaagatggaggccatgaagattgtccaccctgaaaagttccctgagctaccggctgccccctgcttcccgcctgctccccggcccaccccaactctggcacccaagcgtgcctggccctcagacacagagatcattgtcaaccaggcctgtgggggggacatgcctgccttggaaggggcaccccataccccgccactgccacggcggccccgtaagggaagctcggagctgggctttccccgcgtggccccagaggatgaggtcattgtgaatcagtacgtgattcggcctggcccctcggcctcggcggcttcttcggcggcggcaggcgagcccctggagtgccccacctgtgggcactcctacaatgtcacccagcggaggccccgcgtgctgtcctgcctgcactctgtgtgtgagcagtgcctgcagattctctacgagtcctgccccaagtacaagttcatctcctgccccacctgccgccgtgagactgtgctcttcaccgactacggcctggccgcgctggctgtcaacacgtccatcctgagccgcctgccgcctgaggcgctgacggccccatccgggggtcagtggggggctgagcccgagggcagctgctaccagaccttccggcagtactgtggggccgcgtgcacctgccacgtgcggaacccactgtccgcctgctccatcatgtagtagcgcctgcctgcccgccactgcccgctgagcctcgctcgctgcttcttcagggacccggccctgccctgccgcccgctgacccttccttccccaccatggcttccggccccaccccgagtggcattgtcgctgcagccaactttgccattaaaactctttgccaaagtttgcacctgt

SEQ ID NO: 177389 - DNA, 1019 bp, Homo sapiens
  Payload ID: 14811
  Gene Symbol: RNF212
  Gene Name: ring finger protein 212
  Uniprot ID: Q495C1
  ENST ID: ENST00000333673
  CDS Start-End: 67-888
ggctggtcccaaccttgcgtgggcttcgcgtgggcccggcctcgccgctgcggtcgcccgcctggcatggccaactgggtgttctgtaatcgctgcttccagccgccccacaggacgtcgtgcttcagcctcaccaactgcgggcacgtgtactgcgacgcctgcctcggcaaaggtaaaaagaatgaatgcttgatttgtaaagctccttgtcgtacagttttgctttcaaagcataccgacgcagatatccaggcattcttcatgagcatagacagtctgtgtaagaagtactccagggaaacctcccagtatctcaggctttcccgaggctgttgccgtctcaagttatgcccagccacatcctccaaggaggtgcccagaggctcgacccatggaagccaagcagcagccagagatccccaagaacactgggtcagcacaacacgggcacccagaccaggatgccggcggtcccagagccagccagaggcccagggaaacaccatccaggacgcacctcaccccctcaccctgctccatcccagcaggaccctcattcacaccaagtccccttggggccagaagttgcttgagttcataaaacatgtctgttatcacagacatcagagccacaggccgtgcgctccagggtggttttgccaagtgctgcagaggccaggtgctgtctcaggagagaagacccagcagacccggccagcccctccagccacctgtctgctctgcctctcgtgcctctcaggcttccggcatgggccgtggaggtcacaggctctgcccagtgacctcgtggccccactgtttgtcagttacactgtggaggtgagcatcacaaacgcagggtggagttttcccgcagctgtgtgacgtgaggtggtattgtaacatttatgctctaatatcaacgtaacataaatattggcatttgttacaatatgttaacacatcatggatttattgttatttttaaatgaattaataaatacttttagatttgt

SEQ ID NO: 177390 - DNA, 2335 bp, Homo sapiens
  Payload ID: 14811
  Gene Symbol: RNF212
  Gene Name: ring finger protein 212
  Uniprot ID: Q495C1
  ENST ID: ENST00000382968
  CDS Start-End: 99-797
agagctgcccgccttcgggccctgcgcggggaggctggtcccaaccttgcgtgggcttcgcgtgggcccggcctcgccgctgcggtcgcccgcctggcatggccaactgggtgttctgtaatcgctgcttccagccgccccacaggacgtcgtgcttcagcctcaccaactgcgggcacgtgtactgcgacgcctgcctcggcaaaggtaaaaagaatgaatgcttgatttgtaaagctccttgtcgtacagttttgctttcaaagcataccgacgcagatatccaggcattcttcatgagcatagacagtctgtgtaagaagtactccagggaaacctcccagattttagaatttcaagaaaaacacaggaagagattgttagccttctatagagaaaagatttctaggttggaagaatcccttaggaagtcagtgctgcagatagaacaactacaaagtatgagatcatcacaacaaacagctttcagcacaataaaaagttcagtttcaacaaaaccacacggatgcctgctgccacctcactcatcagcccccgacagactggagtcgatggaagttgatctctctccttctccgattagaaaatctgagatagcagccggccctgcgagaatctccatgattagtccacctcaagatggacgaatggccccctgtgcccggagagtgtgtcatttccagaggttcaccatgtttctgcatagacgtctgtcctcactggctgctcctcctagcgttcagttctggaaggcacggggaactcaccaactctaaaacacttccaatatatgctgaggtacaaagggccgtcttgtttccgttccagcaggctgagggcaccctggacacgttcagaacacccgctgtgtctgttgtgtttcctctttgccaatttgaaaggaaaaagtcattttgatttgcatttatgtgactattaatgattctgagtgttttcaatttattcctctgtgttttttctacaaattatctgctttattcctttgtcatttatgtggaagccctcagtgtgcaggatattaaccttttacccaatttgctttgtaattttatatttgacctttgaattttagagacaatatttttatgtactcatatatattgttattatcccttttattttataggttctcatgcttagggagtttttttttcacatacttaaatcatttttttctaactgggtggtttttaaaactttttcttagagcagttttaggttcacagaaaaattgaaaggaaggtacagatttcccatatacaccatgactccacacacgcacagctcccccatcatcctcatcctccaccagagcagtccatgtgttaaaactgatgatcctacttgaatacatcattatcacccaacgtccatggtttacattagggttcactctaggtgtcgaatgttctatgggtttgaacaaatatctagtgacatgtgtccccatcgtagcagcatatggaatagtgccacaccctaaaaatcctctgtgcgccacctgttcatccttcccccacctcccaccaacccttgacagccactgatctttttacggtccctttttcagactctcctggagttggaattgtacagtatgtggcttctcagattgactcctttcacttagcaatacacacttatggttcccccatctcttctcatggtttgctagctcattttttcagtcactgaataatattccattatctggatgtatcatagttcatccattcacctactgaagggcatcttggttgcttccaagttttggcaattatgaattaagctgctatagatgtccatgtgccagggttttgtgtagacatgttttcagctcctttgggtaaatactaaggagtgtgaatgctggatcagatggtgagagggtgtttagttttgaaagaaattgccaaactaccttccaaagtggcagcagcttttcgcattcccactagcaacgaatgagagttcctgttgctccacgtcctcacatttgatgatgtcagtgttctggattttggccagctgataggtatgtagtggtatcttgctgttttattttgcatttcattgataacatatgactaggagcatcttatgctgatttttcatctgcatatcttctttgctgaagtgtctgttaaggtatttggcccattttttaattggattgttttcttattgttgagttttaagagtcctgtgtatattttggatgacatttcttttttgtgtgtcttttttttggatgacatttccttatcagataaatatgtatcttgaaaatata

SEQ ID NO: 177391 - DNA, 1074 bp, Homo sapiens
  Payload ID: 14811
  Gene Symbol: RNF212
  Gene Name: ring finger protein 212
  Uniprot ID: Q495C1
  ENST ID: ENST00000433731
  CDS Start-End: 63-956
ggtcccaaccttgcgtgggcttcgcgtgggcccggcctcgccgctgcggtcgcccgcctggcatggccaactgggtgttctgtaatcgctgcttccagccgccccacaggacgtcgtgcttcagcctcaccaactgcgggcacgtgtactgcgacgcctgcctcggcaaaggtaaaaagaatgaatgcttgatttgtaaagctccttgtcgtacagttttgctttcaaagcataccgacgcagatatccaggcattcttcatgagcatagacagtctgtgtaagaagtactccagggaaacctcccagattttagaatttcaagaaaaacacaggaagagattgttagccttctatagagaaaagatttctaggttggaagaatcccttaggaagtcagtgctgcagatagaacaactacaaagtatgagatcatcacaacaaacagctttcagcacaataaaaagttcagtttcaacaaaaccacacggatgcctgctgccacctcactcatcagcccccgacagactggagtcgatggaagttgatctctctccttctccgattagaaaatctgagatagcagccggccctgcgagaatctccatgattagtccacctcaagatggacgaatggggccacatctaacagcttctttctgtttcatcccatggttgaccttgtctaagccccctgtgcccggagagtgtgtcatttccagaggttcaccatgtttctgcatagacgtctgtcctcactggctgctcctcctagcgttcagttctggaaggcacggggaactcaccaactctaaaacacttccaatatatgctgaggtacaaagggccgtcttgtttccgttccagcaggctgagggcaccctggacacgttcagaacacccgctgtgtctgttgtgtttcctctttgccaatttgaaaggaaaaagtcattttgatttgcatttatgtgactattaatgattctgagtgttttcaatttattcctctgtgttttttctacaaattatctgctttattcctttgtcatttatgtggaagccctcagtgtgcagg

SEQ ID NO: 177392 - DNA, 804 bp, Homo sapiens
  Payload ID: 14811
  Gene Symbol: RNF212
  Gene Name: ring finger protein 212
  ENST ID: ENST00000508428
  CDS Start-End: 52-210
tgcgtgggcttcgcgtgggcccggcctcgccgctgcggtcgcccgcctggcatggccaactgggtgttctgtaatcgctgcttccagccgccccacaggacgtcgtgcttcagcctcaccaactgcgggcacgtgtactgcgacgcctgcctcggcaaagaccgacgcagatatccaggcattcttcatgagcatagacagtctgtgtaagaagtactccagggaaacctcccagattttagaatttcaagaaaaacacaggaagagattgttagccttctatagagaaaagatttctaggttggaagaatcccttaggaagtcagtgctgcagatagaacaactacaaagtatgagatcatcacaacaaacagctttcagcacaataaaaagttcagtttcaaactggagtcgatggaagttgatctctctccttctccgattagaaaatctgagatagcagccggccctgcgagaatctccatgattagtccacctcaagatggacgaatggccccctgtgcccggagagtgtgtcatttccagaggttcaccatgtttctgcatagacgtctgtcctcactggctgctcctcctagcgttcagttctggaaggcacggggaactcaccaactctaaaacacttccaatatatgctgaggtacaaagggccgtcttgtttccgttccagcaggctgagggcaccctggacacgttcagaacacccgctgtgtctgttgtgtttcctctttgccaatttgaaaggaaaaagtcattttgatttgcatttatgtgactattaat

SEQ ID NO: 177393 - DNA, 934 bp, Homo sapiens
  Payload ID: 14811
  Gene Symbol: RNF212
  Gene Name: ring finger protein 212
  ENST ID: ENST00000510715
  CDS Start-End: 78-425
ctgcgcggggaggctggtcccaaccttgcgtgggcttcgcgtgggcccggcctcgccgctgcggtcgcccgcctggcatggccaactgggtgttctgtaatcgctgcttccagccgccccacaggacgtcgtgcttcagcctcaccaactgcgggcacgtgtactgcgacgcctgcctcggcaaaggtaaaaagaatgaatgcttgatttgtaaagctccttgtcgtacagttttgctttcaaagcatcgcccctttcctgtgtctgacagcgagtcaccaacagcacgcctttacagctgcgtgaggagagccccgtggatcccgcacaggggtacccgtgtccgcttgcgccgtcggaccttgtggactcgattgctctgcaccagggttgatttcctccattccttacgccctctgccatgatgacgtcagacgcagcaaaggccttcagtcacgctaccgacgcagatatccaggcattcttcatgagcatagacagtctgtgtaagaagtactccagggaaacctcccagattttagaatttcaagaaaaacacaggaagagattgttagccttctatagagaaaagatttctaggttggaagaatcccttaggaagtcagtgctgcagatagaacaactacaaagtctgagatagcagccggccctgcgagaatctccatgattagtccacctcaagatggacgaatggccccctgtgcccggagagtgtgtcatttccagaggttcaccatgtttctgcatagacgtctgtcctcactggctgctcctcctagcgttcagttctggaaggcacggggaactcaccaactctaaaacacttccaatatatgctgaggtacaaagggccgtcttgtttccgttccagcaggctgagggcaccctggacacgttcagaacacccgctgtg

SEQ ID NO: 177394 - DNA, 753 bp, Homo sapiens
  Payload ID: 14811
  Gene Symbol: RNF212
  Gene Name: ring finger protein 212
  ENST ID: ENST00000506730
  CDS Start-End: 77-235
tgcgcggggaggctggtcccaaccttgcgtgggcttcgcgtgggcccggcctcgccgctgcggtcgcccgcctggcatggccaactgggtgttctgtaatcgctgcttccagccgccccacaggacgtcgtgcttcagcctcaccaactgcgggcacgtgtactgcgacgcctgcctcggcaaagaccgacgcagatatccaggcattcttcatgagcatagacagtctgtgtaagaagtactccagggaaacctcccagattttagaatttcaagaaaaacacaggaagagattgttagccttctatagagaaaagatttctaggttggaagaatcccttaggaagtcagtgctgcagatagaacaactacaaagtatgagatcatcacaacaaacagctttcagcacaataaaaagttcagtttcaacaaaaccacacggatgcctgctgccacctcactcatcagcccccgacagactggagtcgatggaagttgatctctctccttctccgattagaaaatctgagatagcagccggccctgcgagaatctccatgattagtccacctcaagatggacgaatgggcagcgtctcctccctgggccccgagcatcccggcctgacaacgagtcagaggagcatgggaaagcctctcaggattccacctctgcaaattccctacaagggacccccactaacgccaacaccacagttaccagggagagcaggaagaggggactctccaagct

SEQ ID NO: 177395 - DNA, 926 bp, Homo sapiens
  Payload ID: 14811
  Gene Symbol: RNF212
  Gene Name: ring finger protein 212
  Uniprot ID: Q495C1
  ENST ID: ENST00000511620
  CDS Start-End: 63-434
ggtcccaaccttgcgtgggcttcgcgtgggcccggcctcgccgctgcggtcgcccgcctggcatggccaactgggtgttctgtaatcgctgcttccagccgccccacaggacgtcgtgcttcagcctcaccaactgcgggcacgtgtactgcgacgcctgcctcggcaaaggtaaaaagaatgaatgcttgatttgtaaagctccttgtcgtacagttttgctttcaaagcataccgacgcagatatccaggcattcttcatgagcatagacagtctgtgtaagaagtactccagggaaacctcccagattttagaatttcaagaaaaacacaggaagagattgttagccttctatagagaaaagatttctaggttggaagaatcccttaggaagtcagtgctgcagatagaacaactacaaagtctgagatagcagccggccctgcgagaatctccatgattagtccacctcaagatggacgaatggggccacatctaacagcttctttctgtttcatcccatggttgaccttgtctaagccccctgtgcccggagagtgtgtcatttccagaggttcaccatgtttctgcatagacgtctgtcctcactggctgctcctcctagcgttcagttctggaaggcacggggaactcaccaactctaaaacacttccaatatatgctgaggtacaaagggccgtcttgtttccgttccagcaggctgagggcaccctggacacgttcagaacacccgctgtgtctgttgtgtttcctctttgccaatttgaaaggaaaaagtcattttgatttgcatttatgtgactattaatgattctgagtgttttcaatttattcctctgtgttttttctacaaattatctgctttattcctttgtcatttatgtggaagccctcagtgtgcagg

SEQ ID NO: 177396 - DNA, 1071 bp, Homo sapiens
  Payload ID: 14812
  Gene Symbol: RNF212B
  Gene Name: ring finger protein 212B
  ENST ID: ENST00000399905
  CDS Start-End: 143-394
ttgccagaagtgaagggaaaggagttatgggagagtatgtcaaaggcttgtttttccctagtaggtgtggagtttccagaagaaacaaacagatctcctcatcgccttttataagcatagaattacaaagttagaaacagccatgcaggaggcacagcaagcactggtgagccaggacaatcggtcctcctcagcggaatctattccttatagagaggctggctttggtagcttgggacaaaaaccccttcaccggcttcaactcatagcctatcttataggggattttttctttcagaccatccccaaatgggcattcaggccacacaagagtcctcacccccaacaattttgctcagagggagagcacaactacactagagagtcttcctagtttccagctaccagtcctgcagactctctaccaacaacggaggcatatgggattacccagtgggagagaagcatggaccacttctagatagatcatcttcaagatctgatctatacatgctgctgaaggatggactgtagcttccagtacgcattaggggtgatggccctggaaaatgtatccctgcattgtttcctagtttcactctgtaccttatgctccccccatctttaccctattcacccttatcacctcccaggacagtggtcaggtcttacaaaaggctagtgcttcaggaagatgtttatatctcttccagaagacactggtagctcccctcatttcctacaatttggaacaaaggtcaaaaaaataattcttggcatcatgcttggttgggagttgggaatggggattgtgatggatcatatactcatcactgtttcatttctggatttcatttttagctttggatatactgtcccattgccaatgttaacgagcaatatctctgttcttttccttattatacttttttatttgtctattatttcctctatgcttagttactattaaatgttaattttcctttctattgaaaacaactgttggagacactgattttcagcttagtatatagatagtaaaataaagacgatgcccttttattgctacaa

SEQ ID NO: 177397 - DNA, 1670 bp, Homo sapiens
  Payload ID: 14812
  Gene Symbol: RNF212B
  Gene Name: ring finger protein 212B
  Uniprot ID: A8MTL3
  ENST ID: ENST00000399910
  CDS Start-End: 254-1156
ggaatgagtcatgggaaatgaaaaaatgtcgaatttgcctctagcctttcctgacaaccttagaaagcactgaggaaaaatttgatagattcatttgtatacattcagatttgaagacttctgctccgatttcaacatcaccatataaaacaaataatgtttctgcttcttaaacaaagctgttggagaatgtgcaccaccaaaataagggaataagtaaaggaggaagaagaccctgagttcaggaataagaatggattggtttcattgcaaccagtgcttccgaaaagatggggcccatttctttgtcaccagctgtggccatattttctgtaaaaagtgtgtgactctggaaaaatgtgctgtttgtggaactgcctgcaagcatctggctctttctgataatctgaagcctcaggagaagatgtttttcaaaagtcctgtggagacagctttgcagtattttagtcacatctctcaggtgtggagtttccagaagaaacaaacagatctcctcatcgccttttataagcatagaattacaaagttagaaacagccatgcaggaggcacagcaagcactggtgagccaggacaaagaattgtcagtcttaaggaaggagaatggagaactgaagaaatttctagccattctaaaggaatctccaagtcggtaccaaggaagcaggtcaatcacacctcgaccagtgggcattacttccccatcacagtcagttaccccacgacccagtttccagcatagcagtcaagtggtcagtcggtcctcctcagcggaatctattccttatagagaggctggctttggtagcttgggacaaggaggcagaggtctgcagggaaggagaactcccagagactcttataatgaaaccccttcaccggcttcaactcatagcctatcttatagaacttcatctgcctcctctggacaggggattttttctttcagaccatccccaaatgggcattcaggccacacaagagtcctcacccccaacaattttgctcagagggagagcacaactacactagagagtcttcctagtttccagctaccagtcctgcagactctctaccaacaacggaggcatatgggattacccagtgggagagaagcatggaccacttctagatagatcatcttcaagatctgatctatacatgctgctgaaggatggactgtagcttccagtacgcattaggggtgatggccctggaaaatgtatccctgcattgtttcctagtttcactctgtaccttatgctccccccatctttaccctattcacccttatcacctcccaggacagtggtcaggtcttacaaaaggctagtgcttcaggaagatgtttatatctcttccagaagacactggtagctcccctcatttcctacaatttggaacaaaggtcaaaaaaataattcttggcatcatgcttggttgggagttgggaatggggattgtgatggatcatatactcatcactgtttcatttctggatttcatttttagctttggatatactgtcccattgccaatgttaacgagcaatatctctgttcttttccttattatacttttttatttgtctattatttcctctatgcttagttactattaaatgttaattttcctttctattgaaaacaa

SEQ ID NO: 177398 - DNA, 903 bp, Homo sapiens
  Payload ID: 14812
  Gene Symbol: RNF212B
  Gene Name: ring finger protein 212B
  Uniprot ID: A8MTL3
  ENST ID: ENST00000430154
  CDS Start-End: 1-903
atggattggtttcattgcaaccagtgcttccgaaaagatggggcccatttctttgtcaccagctgtggccatattttctgtaaaaagtgtgtgactctggaaaaatgtgctgtttgtggaactgcctgcaagcatctggctctttctgataatctgaagcctcaggagaagatgtttttcaaaagtcctgtggagacagctttgcagtattttagtcacatctctcaggtgtggagtttccagaagaaacaaacagatctcctcatcgccttttataagcatagaattacaaagttagaaacagccatgcaggaggcacagcaagcactggtgagccaggacaaagaattgtcagtcttaaggaaggagaatggagaactgaagaaatttctagccattctaaaggaatctccaagtcggtaccaaggaagcaggtcaatcacacctcgaccagtgggcattacttccccatcacagtcagttaccccacgacccagtttccagcatagcagtcaagtggtcagtcggtcctcctcagcggaatctattccttatagagaggctggctttggtagcttgggacaaggaggcagaggtctgcagggaaggagaactcccagagactcttataatgaaaccccttcaccggcttcaactcatagcctatcttatagaacttcatctgcctcctctggacaggggattttttctttcagaccatccccaaatgggcattcaggccacacaagagtcctcacccccaacaattttgctcagagggagagcacaactacactagagagtcttcctagtttccagctaccagtcctgcagactctctaccaacaacggaggcatatgggattacccagtgggagagaagcatggaccacttctagatag

SEQ ID NO: 177399 - DNA, 484 bp, Homo sapiens
  Payload ID: 14812
  Gene Symbol: RNF212B
  Gene Name: ring finger protein 212B
  ENST ID: ENST00000492621
  CDS Start-End: 234-484
aaaaaatgtcgaatttgcctctagcctttcctgacaaccttagaaagcactgaggaaaaatttgatagattcatttgtatacattcagatttgaagacttctgctccgatttcaacatcaccatataaaacaaataatgtttctgcttcttaaacaaagctgttggagaatgtgcaccaccaaaataagggaataagtaaaggaggaagaagaccctgagttcaggaataagaatggattggtttcattgcaaccagtgcttccgaaaagatggggcccatttctttgtcaccagctgtggccatattttctgtaaaaagtgtgtgactctggaaaaatgtgctgtttgtggaactgcctgcaagcatctggctctttctgataatctgaagcctcaggagaagatgtttttcaaaagtcctgtggagacagctttgcagtattttagtcacatctctcagactctctaccaacaacggaggca

SEQ ID NO: 177400 - DNA, 226 bp, Homo sapiens
  Payload ID: 14812
  Gene Symbol: RNF212B
  Gene Name: ring finger protein 212B
  ENST ID: ENST00000470456
  CDS Start-End: 1-226
gtgtggagtttccagaagaaacaaacagatctcctcatcgccttttataagcatagaattacaaagttagaaacagccatgcaggaggcacagcaagcactggtgagccaggacaatcggtcctcctcagcggaatctattccttatagagaggctggctttggtagcttgggacaaggaggcagaggtctgcagggaaggagaactcccagagactcttataatg

SEQ ID NO: 177401 - DNA, 5316 bp, Homo sapiens
  Payload ID: 14813
  Gene Symbol: RNF213
  Gene Name: ring finger protein 213
  Uniprot ID: Q63HN8
  ENST ID: ENST00000319921
  CDS Start-End: 142-3333
gcgcgcggcaggcggcgagctcgggggccgcagaaaatgaaactgaagccgtggtcacgtgacaggacatgtagtatatagcaggctgccagcgactcctgctcttgcttctggatctgcagggcagtcccagcaggacccatggagtgtccttcgtgccagcatgtctccaaggaggaaacccccaagttctgcagccagtgcggagagaggctgcctcctgcagcccccatagcagattctgagaacaataactccacaatggcgtcggcctcggagggtgaaatggagtgtgggcaggagctgaaggaggaagggggcccgtgcttgttcccgggctcagacagttggcaagaaaaccccgaggagccctgttccaaagcctcctggaccgtccaagaaagcaaaaagaagaaaaggaagaagaaaaagaaggggaacaagtccgcttcctcagagctggcttccttgcccctttctcctgccagcccctgtcacctgactttgctttcaaacccgtggcctcaggacacagccctgccccacagccaagcccagcagagtggccccactggccagccgagccagcccccaggcacagccaccacgccactggagggtgacggcctctccgcgcccaccgaggttggcgacagccccctgcaggcccaggctttgggagaggcaggagtggccacaggaagtgaggctcagagcagcccgcaattccaggaccacacggaaggggaggaccaggacgcttccatcccctctgggggcagaggcctgtcccaggaggggaccggtccccccacctctgctggtgaaggccattctaggactgaagatgctgcccaggagctcctgttgcctgagtcaaaaggaggcagctctgagcccgggacagaactgcagaccaccgagcaacaggcaggggcctcagcctctatggcagttgatgctgtagctgagccagccaatgcagttaaaggggccgggaaggaaatgaaagagaagacccagagaatgaaacagccaccagcaaccactcctcctttcaaaacacactgccaggaagctgagaccaagaccaaggacgagatggctgctgctgaagaaaaagtcggtaagaatgaacaaggggagcctgaagacctcaagaagccagaggggaagaacagaagtgcagctgctgtgaaaaacgagaaggagcaaaaaaaccaggaagcagatgtccaggaagtgaaggcaagcacgctgagcccgggtggaggagtcaccgtgttcttccacgccatcatctctcttcatttcccattcaatcctgacctccataaagtcttcatcagaggaggagaagaatttggggagtcaaaatgggacagcaatatctgtgagctgcactacaccagagacttgggtcatgaccgcgttcttgttgaaggcattgtctgcatttccaagaagcacctagataaatacattccttacaagtacgtcatttataatggggaatcttttgagtatgagttcatttacaagcaccagcagaagaagggcgagtacgtcaaccgctgtctgttcataaaatcttcacttctgggctcaggagactggcatcagtactatgacatagtttatatgaagcctcatgggagactccagaaagtcatgaaccacatcacagacgggccgaggaaggacctggtgaaggggaagcagattgccgctgcgctcatgctggacagcaccttcagcatcctgcagacctgggacaccatcaacctgaacagcttcttcacccagttcgagcagttttgctttgtcctgcaacagcctatgatttatgaaggacaggcacagctgtggaccgatttgcagtacagggagaaagaggtgaagagatacctgtggcaacatctgaaaaaacacgtggtaccattgccggacggaaaaagcacggactttttgcctgtggactgcccagtgaggagtaaactgaaaacaggcctgattgtcctttttgtagtggaaaaaattgagcttttattagaaggcagcctggactggttgtgtcacctcctaacctcagatgccagctcaccagatgagtttcaccgtgacctaagccacatccttgggatacctcagagctggcggctgtacctggtgaacctgtgccaaagatgcatggacacaaggacgtacacctggctgggcgccctgcctgtcctgcactgctgtatggagctggccccgcggcacaaggatgcctggagacagcctgaggacacctgggccgctctggagggactctccttctcaccgttccgggaacaaatgctagatacgagttccctacttcagtttatgagagagaagcagcatttgctgagcatagacgagcctctcttccggtcctggtttagtctgctacctctgagtcacctggttatgtatatggaaaacttcattgagcacctgggtcgttttcctgctcatatcctggactgtctttcagggatttactaccggcttccgggacttgagcaagtcttgaatacgcaggatgttcaggatgttcagaacgttcagaacattttagaaatgctgttgcgactcctggacacttaccgggacaagattcccgaggaggccttgtcaccatcctacctgactgtgtgtctgaaactgcatgaagccatctgcagcagcacaaagctacttaagttttacgagctgccagccttatctgccgagattgtctgcagaatgattagacttctatctctggtggattctgcaggacagagagatgaaactggaaataattcagtccaaacagtcttccaagggacccttgctgctacgaaaaggtggctccgagaagtttttacaaagaacatgctcacatcttcaggtgcctcattcacatacgtcaaggaaattgaggtctggaggcggctggtggaaatccaattccccgcggagcatggctggaaggagtcgttgctgggagacatggaatggaggctcacaaaggaggaacccctctcccagatcactgcctactgcaatagttgctgggacaccaaaggcttagaggacagtgtggccaagaccttcgagaaatgcatcattgaagccgtgagctcagcctgccaggtgaacaatctctcctcctgggaaacggattcgggctcacagctgtgttctgccatgacccagctaagggctatgaagcacccgctgggtctcagctcctccgctaactcagagattgggaagtgggcaccctcctccctcgccaagggcaatggcgctgaaatctagttctctccggattcctcagtgtgctgcacagtccctgctgctcgcaccatcctgcatgtgttccatatggaatcacggccgtgcgcgtgtggcacaagtcacacgggcttgcaggccgttcctcagatggccctgtcatcactgtggctgctggtttgattgattgttaacacttgctcagtaggtgtgcgggaagagactccaaaggttgacagaacatttatggaagcaaaatatgtgaaatggaaaattgtatcaatttatttagctcttttcggcaaaggggaagagattgtgcccccctgtctcccaggaacagtctcgcaggcaatgccacatgaggaagctccctgctggccacggctgccctgctcacatttcctaattggacacttaacccctgtacaagcacagccttgcggccacaggggaagtccagaaacattgaggtcattgaattccggggaccaaggggttctaattttttaagtgactgatacctttgataaggttttcctttccctttttcgttaactctttgttgagatattgttcgtatgccatacggtacatctgtcaaaagttccagttcagcaggttttggggtagtcacagatatgtacagtcatcaccacagttaatgacagagcattttcatcacttcaaagagaaacccggcccctttagccatcatcctcctcccctctagtcacccactcccctctgcaggcataaacaattgctgaacataaacaactgcttctgtggctttctctgttctgactgtcatatgaatggaatcatatcatatgtggccttttgggtatggcttatttcactgagcataatgtttttttgttgttggtggtggtggttgtttgttgtttttgagacagagtttcactctttttgcccaggctggagtgcaatggtgcgatcctggctcaccgcaaccgctgcctcccgggttcaagtgattctcctgcctcagcctcccaagtgctggaattacagctactttttgtttaaagagtcttttaattgtttaaagaacaatgtgccgccacactcggttccttttgtatttttagaagagacagggtttctccatgttggtcaggctggtctcgaactcccgacctcaggtgatccacccaccttggcctcccgaagtgccgagattacaggtgtgagccaccgcgcccggccgagcataatgttttgaaagaccgctcaggctggacacggttgctcacgcctgtaatcacggcactttgggagcccaggagttcaagacaagcctgggtaacagagtaagaccctgtctctataaaaactaaaaaataaacaaaaaaaattagccaggcatggccgggcacacctgtggtcccagctacttgggaggctgaggtgggaggctcccttgggcccagaaggtcaaggcagcagtgagccatgatcacaccactgcacttcaacctgggggacagagcaagaccctgtctcaaaaagcaataacaacaaaagtccatccatattgtagcttgtgtccgtttacgttaagtattccttacccaaaatgcttgagaccagaagtgttttggatttcagatgttttcaaattttggaatatttgcatttacataatgagatgtcttccagatgggacccagagtctaaccacaaaattcacttgtttcatatacatcttatacacatagcctgaaggtaattttatacaatatttttaacaattttgtgcatgagacaaagtttgtattaagtatttgtatgttgaatttttcacttgtggcatcattatactcaaaaagtttggattttgtagtattttggatttggggattaggaatgctcaacctatatttcatttttttccatggccaaatattccccgtttatccatgtgtccattgacggccatctatgttgcttcttcggctattataaatctgctgatacaaa

SEQ ID NO: 177402 - DNA, 17730 bp, Homo sapiens
  Payload ID: 14813
  Gene Symbol: RNF213
  Gene Name: ring finger protein 213
  ENST ID: ENST00000508628
  CDS Start-End: 146-15916
gacagcgcgcggcaggcggcgagctcgggggccgcagaaaatgaaactgaagccgtggtcacgtgacaggacatgtagtatatagcaggctgccagcgactcctgctcttgcttctggatctgcagggcagtcccagcaggacccatggagtgtccttcgtgccagcatgtctccaaggaggaaacccccaagttctgcagccagtgcggagagaggctgcctcctgcagcccccatagcagattctgagaacaataactccacaatggcgtcggcctcggagggtgaaatggagtgtgggcaggagctgaaggaggaagggggcccgtgcttgttcccgggctcagacagttggcaagaaaaccccgaggagccctgttccaaagcctcctggaccgtccaagaaggagctacatcagaggttttggtagatgctgctgtagacctcatatccgatgaatgggaagctgctaatgccatacccagcaagagaaggaagcaggatgcagccccgcttgaggccgccagcgtgccttctgcagactgtgagcagagcaaaaagaagaaaaggaagaagaaaaagaaggggaacaagtccgcttcctcagagctggcttccttgcccctttctcctgccagcccctgtcacctgactttgctttcaaacccgtggcctcaggacacagccctgccccacagccaagcccagcagagtggccccactggccagccgagccagcccccaggcacagccaccacgccactggagggtgacggcctctccgcgcccaccgaggttggcgacagccccctgcaggcccaggctttgggagaggcaggagtggccacaggaagtgaggctcagagcagcccgcaattccaggaccacacggaaggggaggaccaggacgcttccatcccctctgggggcagaggcctgtcccaggaggggaccggtccccccacctctgctggtgaaggccattctaggactgaagatgctgcccaggagctcctgttgcctgagtcaaaaggaggcagctctgagcccgggacagaactgcagaccaccgagcaacaggcaggggcctcagcctctatggcagttgatgctgtagctgagccagccaatgcagttaaaggggccgggaaggaaatgaaagagaagacccagagaatgaaacagccaccagcaaccactcctcctttcaaaacacactgccaggaagctgagaccaagaccaaggacgagatggctgctgctgaagaaaaagtcggtaagaatgaacaaggggagcctgaagacctcaagaagccagaggggaagaacagaagtgcagctgctgtgaaaaacgagaaggagcaaaaaaaccaggaagcagatgtccaggaagtgaaggcaagcacgctgagcccgggtggaggagtcaccgtgttcttccacgccatcatctctcttcatttcccattcaatcctgacctccataaagtcttcatcagaggaggagaagaatttggggagtcaaaatgggacagcaatatctgtgagctgcactacaccagagacttgggtcatgaccgcgttcttgttgaaggcattgtctgcatttccaagaagcacctagataaatacattccttacaagtacgtcatttataatggggaatcttttgagtatgagttcatttacaagcaccagcagaagaagggcgagtacgtcaaccgctgtctgttcataaaatcttcacttctgggctcaggagactggcatcagtactatgacatagtttatatgaagcctcatgggagactccagaaagtcatgaaccacatcacagacgggccgaggaaggacctggtgaaggggaagcagattgccgctgcgctcatgctggacagcaccttcagcatcctgcagacctgggacaccatcaacctgaacagcttcttcacccagttcgagcagttttgctttgtcctgcaacagcctatgatttatgaaggacaggcacagctgtggaccgatttgcagtacagggagaaagaggtgaagagatacctgtggcaacatctgaaaaaacacgtggtaccattgccggacggaaaaagcacggactttttgcctgtggactgcccagtgaggagtaaactgaaaacaggcctgattgtcctttttgtagtggaaaaaattgagcttttattagaaggcagcctggactggttgtgtcacctcctaacctcagatgccagctcaccagatgagtttcaccgtgacctaagccacatccttgggatacctcagagctggcggctgtacctggtgaacctgtgccaaagatgcatggacacaaggacgtacacctggctgggcgccctgcctgtcctgcactgctgtatggagctggccccgcggcacaaggatgcctggagacagcctgaggacacctgggccgctctggagggactctccttctcaccgttccgggaacaaatgctagatacgagttccctacttcagtttatgagagagaagcagcatttgctgagcatagacgagcctctcttccggtcctggtttagtctgctacctctgagtcacctggttatgtatatggaaaacttcattgagcacctgggtcgttttcctgctcatatcctggactgtctttcagggatttactaccggcttccgggacttgagcaagtcttgaatacgcaggatgttcaggatgttcagaacgttcagaacattttagaaatgctgttgcgactcctggacacttaccgggacaagattcccgaggaggccttgtcaccatcctacctgactgtgtgtctgaaactgcatgaagccatctgcagcagcacaaagctacttaagttttacgagctgccagccttatctgccgagattgtctgcagaatgattagacttctatctctggtggattctgcaggacagagagatgaaactggaaataattcagtccaaacagtcttccaagggacccttgctgctacgaaaaggtggctccgagaagtttttacaaagaacatgctcacatcttcaggtgcctcattcacatacgtcaaggaaattgaggtctggaggcggctggtggaaatccaattccccgcggagcatggctggaaggagtcgttgctgggagacatggaatggaggctcacaaaggaggaacccctctcccagatcactgcctactgcaatagttgctgggacaccaaaggcttagaggacagtgtggccaagaccttcgagaaatgcatcattgaagccgtgagctcagcctgccagtctcagaccagtatccttcaggggttctcttactctgatttgcggaaatttggcatcgtcttgtctgctgtgatcactaagtcctggcctaggaccgcggacaacttcgatgacattttaaagcatctgctcacgttggcagatgtcaagcacgtcttcagattgtgtggaaccgacgagaaaatactagcaaatgtcacagaggatgccaagaggctgatagctgttgccgactctgtgttgacgaaagttgttggtgacctcctaagtggcacgattttagttggacaactggagctgattataaagcacaagaatcagtttcttgacatctggcaactgagggaaaaaagtctttcaccccaggatgaacaatgtgctgtggaggaagcactggattggagaagggaggaactgttacttctaaagaaagagaaaagatgtgttgatagtctcctgaagatgtgtgggaacgtgaaacatctgatacaagtggactttggagtgcttgcagtaagacactcacaagacctcagcagtaaaagattaaatgacaccgtgacagtgagactgtccacctcctcgaactcgcagagggcaacgcattaccacctgagctcccaggtccaagaaatggctgggaagatagacttgctcagagacagccacatcttccagctcttctggcgggaagccgcagagccgctgagtgagcctaaggaggaccaggaagccgcagagttgctgagtgagcccgaagaagaatcagaaaggcacatccttgagcttgaagaggtgtatgactatttgtatcagccttcttacagaaagttcattaagttgcaccaggatctaaagtcaggagaggtcacccttgcagagattgatgtcatcttcaaggactttgtgaataaatacacggacctggattcagaacttaagatcatgtgcaccgtggaccaccaggaccaaagagattggatcaaggaccgagtcgaacagatcaaggaataccatcacctgcaccaggctgtccacgcagccaaggtcatcttgcaggtcaaagagagcctgggactgaacggtgacttcagtgttctcaacactttactaaattttactgataacttcgacgactttcgccgtgaaacactggaccagatcaaccaggagctcatccaggccaaaaagctgctccaggacatcagcgaggcccggtgcaaggggctgcaggctctgtccctgagaaaggagttcatctgctgggtccgggaggctcttggaggcatcaatgagctgaaggtgtttgtggacctggcctccatctcagcgggggagaatgacattgatgtggaccgggtggcctgcttccatgacgctgtgcagggctacgcatccctgctatttaagctggaccccagcgtggacttcagtgcattcatgaagcatctgaaaaagctgtggaaggctctggataaggaccagtacctgcccaggaaactgtgtgactccgccaggaacttggaatggctgaagactgtgaatgagagtcatgggtctgtggaacgctcatccctgaccctggccacggccatcaaccaaagaggcatctatgtgatccaggcgcccaaaggtggccaaaagatttccccagacacggttctgcacttgatccttcctgagagccctggcagccacgaggagtcacgagagtactctttagaggaggtgaaggagcttttgaacaagttgatgctgatgtctggcaagaaggatcgtaacaacacggaagtggagaggttttcagaggtcttctgcagtgtgcagaggctcagccaggccttcatcgacctgcactctgctgggaatatgctgttcaggacgtggatcgccatggcctactgctcccccaagcagggtgtgtccctccaaatggactttggcttggacctggtgacggagcttaaagaaggtggagatgtcactgagctgctggcagccctctgcaggcagatggagcacttccttgacagctggaagagatttgtgacccagaagcgaatggagcacttttacctgaacttctacacggcagagcagctggtttacctgagcactgagctcaggaagcagcccccgagtgatgccgccctaacgatgctatccttcatcaaaagcaactgcaccctgagggatgtcttaagggcctctgtggggtgtgggagtgaggccgccaggtaccgcatgaggagagtcatggaagagctcccgctgatgctcttatcagagttcagcctggtggacaagctgaggatcatcatggagcagtccatgaggtgccttcctgccttcctgcccgactgcctcgacctagagacccttggccactgtctggctcacctggcagggatgggtgggtctcccgtggagcgttgtctcccgagaggtctgcaggtcggccagcccaacctcgtcgtctgtggccactccgaggtgttgccagccgccctggctgtctacatgcaaaccccaagccagcccctgcccacttacgatgaggtgctgctctgcaccccggcaaccacctttgaggaggtggcactgttgctgcgccgctgcctgaccctgggctccctggggcacaaggtctacagcctgctgttcgcagatcagctgagctacgaggtggcacgccaagcggaggagcttttccacaatctgtgcacgcagcagcaccgagaagactaccagctcgtcatggtctgtgatggggactgggagcactgctacctcccctctgccttcagccagcacaaggtcttcgtcaccccccaggcacccctcgaggccatccaagcctacctggcaggtcactaccgggtcccgaagcagaccctgtcggcggcagccgtgttcaatgaccggctgtgtgttgggatcgtggcctcggagcgagcaggtgttggaaagtctctgtacgtgaagaggttgcacgacaaaatgaagatgcagttaaacgtgaaaaatgtgcctctgaaaacaattcgactgatcgaccctcaggtggatgagagccgagtcctgggcgccctgctgcccttcctggatgcgcagtatcagaaggtccccgtgctctttcacctggacgtgacctcctcagtgcagactggaatttgggtgtttcttttcaagctcctcattttacaatacttaatggatataaatgggaaaatgtggcttcggaacccctgccatttgtatatcgttgaaatcctggaaaggaggacgtcagtgccgtcgaggagctcttcagcgctgcgtacacgtgtaccccagttcagttttcttgacatcttcccaaaagtcacctgcaggcctcccaaagaggtgatagacatggagctgagtgccctgaggagtgacacagagcctgggatggatctgtgggagttctgcagcgaaactttccaaagaccttaccagtatttaagacgattcaatcaaaaccaagacctagacacgtttcagtatcaagaaggctctgtcgaaggcaccccggaggaatgcctccagcatttcctgtttcactgcggggtaataaacccatcctggtcagagcttcggaactttgctcggttcctgaattatcagctcagagattgtgaggcctctctcttctgcaatccgagttttattggcgacacactgaggggcttcaagaagttcgtggtgaccttcatgatctttatggcaagagattttgccacaccatcactccacacctctgaccaaagcccggggaagcacatggtcaccatggatggggttagggaagaagatctagcgcccttctccctccggaagaggtgggagtcggagcctcacccatacgttttcttcaatgacgaccacacaaccatgacattcatcggcttccatctgcagcccaacatcaacggcagtgtcgatgccatcagtcacttgactgggaaggtcatcaagagagacgtcatgaccagggacctgtaccagggcctgctgctccagagggtgcccttcaatgtcgactttgataaactgcccagacacaagaaacttgagaggctctgcctgaccttagggatcccccaggccaccgaccccgacaaaacgtatgagctcacaaccgacaatatgcttaaaatccttgccatcgagatgcggttccggtgtgggatcccggttatcatcatgggagaaactggctgtgggaaaaccaggcttattaaattccttagcgacctgcggcgtggtggtaccaatgctgacaccataaagctggtcaaggtgcacggaggaacaactgcagacatgatctactccagagtcagggaggctgaaaatgtggccttcgccaataaggaccaacatcagttggacaccatcttgttttttgatgaagccaacacaacggaagctataagctgtatcaaagaagtcctgtgtgatcatatggtggatggccagcctctggctgaggactctggcctgcatattatagctgcctgcaatccataccggaagcactctgaggagatgatctgccgtttggagtcagctggtttgggctacagggttagtatggaggagacggccgacaggctgggctccattcctctgaggcagctggtataccgggtccatgctctgcccccgagcctgattcctctggtgtgggactttggacaactgagtgacgttgctgaaaagctctacatccagcagattgtccagagactggttgagtccatcagcctagatgaaaacgggactcgcgtgatcacagaagtcctctgcgcctctcagggtttcatgaggaaaacagaagatgagtgcagctttgtcagcctcagggacgtggagcgctgtgtgaaagttttcaggtggttccacgagcacagcgcgatgctcttagcgcagctgaatgcctttctctccaagtccagcgtcagcaaaaatcacaccgagagagatcccgtcctctggtcgttgatgctggccatcggggtgtgttaccatgcctctttagaaaagaaagactcatatcggaaagccatcgccaggttctttccgaaaccgtatgacgacagcaggctgcttctggatgaaataacacgggcacaggatctttttctggacggcgtacctctgaggaaaaccatcgccaagaacttggccttgaaggagaacgtcttcatgatggtcgtctgcatcgagctgaagattcccctcttcctggtggggaagcccggcagctccaagtctctcgccaagaccatcgtggcagacgccatgcagggcccggctgcctactcagatctcttccgcagcctgaagcaggtccacctggtgtccttccagtgcagcccgcactccaccccacagggcatcatcagcaccttccggcagtgcgcccgctttcagcaggggaaggacctgcagcagtacgtctctgtggtggtgttagatgaggtggggctggcggaagactcacccaaaatgcccctgaagactctgcacccgctgctggaagacggatgcattgaagacgatcccgccccccacaaaaaggtcggcttcgtgggcatctccaactgggcccttgaccctgccaagatgaaccggggcatttttgtgtcacgtggcagccccaacgagacagagctcatagagagcgccaagggcatctgctcctcagacatcctcgtccaggaccgagtccaagggtactttgcgtcctttgccaaagcctacgaaacggtgtgtaagcgccaggacaaggaattcttcgggcttcgtgactactacagcctcatcaaaatggtctttgctgcagcaaaggcttcaaatagaaagccttccccgcaagacattgcacaggctgtccttaggaacttcagtggcaaggatgacatccaagctttggacatctttctggccaatttgcccgaggccaagtgctcagaggaagtcagccccatgcagctgatcaaacagaacatctttgggccttctcagaaggtgccgggtggagagcaggaagatgctgagtcccgctacttactcgtgctgaccaaaaactacgtggcactgcagatcctgcagcagacattcttcgagggggaccagcagccggagattatttttggttctggtttccccaaggaccaagagtacacccagctctgcagaaacatcaatcgtgtgaagatctgcatggaaacaggcaagatggtgttgcttctcaacctgcagaacctctacgagagcctctacgacgcactcaaccagtactacgtccacctcggcggccagaagtacgtggacctcggtctggggacccaccgcgtcaaatgtcgggttcaccccaacttccgcctgattgtcattgaagagaaagacgtcgtgtacaaacactttcccatccccctcattaaccggctggagaagcactatctggatatcaacacggtgctggagaaatggcagaagagcatcgtggaggagctctgtgcgtgggtggagaagttcatcaatgtcaaagcacatcatttccagaagaggcacaaatacagcccctctgacgtcttcatcggctaccactcggacgcctgcgcgtctgtggtgctgcaggtcatagagaggcagggtccccgggccttgacggaggaacttcaccagaaggtgtctgaggaggccaaatcgatcctgctgaactgcgctacgcccgatgccgtggtccggctgagcgcctactcgctgggcgggttcgcagcggagtggctgtcgcaggagtactttcacagacagaggcacaactcctttgcagatttccttcaggcacacctgcacacggcagacctggagcgccacgccatcttcacagagatcaccactttctccaggctgctaacaagtcacgactgtgaaattttagaatcagaggtcacaggcagggctccgaaacccacactcctgtggctgcagcagtttgacaccgagtactcattcctcaaagaagtccgaaactgtttaacgaatacagccaaatgtaaaatcctcatttttcagacagattttgaagatggaatccgtagcgcccagctcattgcctcagctaagtattctgttataaatgaaatcaacaaaatacgagaaaatgaggaccgtatcttcgtctatttcatcacaaaactgtcccgggtgggaagaggaacagcctatgtgggcttccacggagggctgtggcagtctgtccacatcgatgacctccggagatccaccctcatggtttctgatgtgaccaggctgcagcatgtcaccatcagccagctgttcgcgcccggagacttgcctgagctgggcttggaacaccgggcggaagacggccatgaggaggcgatggagacggaggccagcacatcaggggaggtggcagaggtggcagaggaggccatggaaacagaaagttctgagaaggtgggaaaggaaacctctgaactcggaggcagtgatgtgtcgatcctggacaccaccaggctgctgagaagctgtgtgcagagcgccgtgggcatgctcagagaccagaacgagagctgcacgcgcaatatgcggagggtggtgctcctcctgggcctcttgaatgaggatgacgcgtgccacgcctctttcttgcgggtatccaagatgcgcctcagtgtctttttaaagaagcaagaagagagccagtttcaccctctggagtggttggcaagggaagcctgcaaccaggacgctctccaggaggcgggcacattcaggcacaccctctggaagcgggtccaaggtgctgtcacccctctgctggcgagcatgatatcattcatcgacagagacggcaacctagagttactgaccaggccagatactccgccctgggcaagagatctttggatgtttattttcagtgacacgatgcttctgaacattcctcttgtgatgaataatgaaagacataaaggtgagatggcctacatcgtggtgcagaaccacatgaacctttccgagaacgcttccaacaacgtccctttcagctggaaaatcaaggactatctggaggagctgtgggtccaggctcagtacatcacagacgcagaaggactgcccaagaagttcgtggacatctttcagcagactcctctgggcaggtttcttgcccagctccatggagagccgcagcaggaacttcttcagtgttacttgaaggatttcattctcttgaccatgcgtgtgtcaacggaggaggaattaaagtttctgcagatggctctgtggtcctgcactaggaaactgaaagcggcgtcagaagcgcccgaggaagaggtttccttaccgtgggtgcaccttgcctaccagcgtttcagaagccgtctgcagaacttttccagaatcctgaccatctaccctcaggttctccacagcctgatggaagcccgttggaaccatgagctggctggatgtgagatgaccctggacgcatttgccgcaatggcctgcacggagatgctgacaagaaacaccctgaagcccagtccccaggcgtggctacagttggtgaagaatctttccatgccgctggagctcatctgctccgatgagcacatgcaaggcagcgggagcctggcccaggctgtcatcagggaagtcagagcccagtggagtcggattttctccaccgcactcttcgtggagcacgtgctcctaggaaccgagagccgcgtccccgagttacaggggctggtgaccgagcacgtcttcttactagacaagtgtcttcgagagaactctgacgtgaagacgcacgggccttttgaggccgtgatgcgcactctctgtgaatgcaaggagacagccagcaagaccctcagcaggtttgggattcagccgtgctccatctgcctgggagatgcaaaggaccccgtctgtctgccctgcgaccacgtgcactgcctgcgctgcctcagggcctggtttgcctcagagcagatgatatgcccctactgtttaactgccttgccagacgaattctctccagctgtttcccaagcgcacagggaagccattgaaaagcatgcccgcttccggcagatgtgcaacagtttcttcgtagacctggtgtccaccatttgcttcaaggacaacgctccgcctgagaaggaagtgattgagagcctgctctctctcctcttcgtccaaaaggggcgcttaagagatgctgcccagagacactgtgaacacacaaaatctctctctccattcaatgatgttgtggataagactcctgtcatccgctcagtgatactgaaactgcttttgaagtacagctttcatgatgtaaaagattatattcaggaatatttgaccctgttaaaaaagaaagcattcataactgaagataaaactgaactgtacatgctcttcatcaactgcctggaggattcaatacttgagaagaccagtgcttactccagaaatgatgaactgaaccacctagaagaggaaggtcgtttccttaaggcatattctccagcaagccggggccgagagcctgccaacgaggcctcggttgaatacctgcaagaggtggcccggatccgcctctgcctcgacagagctgcagatttcctctcggagcctgagggaggcccagagatggccaaggagaagcagtgctacctgcagcaagtcaagcagttctgtatccgggtggagaacgactggcaccgggtgtacctggtgcggaagctcagcagccagcgggggatggagttcgtgcagggcctctccaagcccggccgcccgcaccagtgggtgtttcccaaggacgttgtcaagcagcaggggctgcggcaggaccacccaggccagatggataggtacctggtgtacggcgatgaatacaaggctctccgtgatgctgtggccaaagctgtcctcgagtgcaagccactgggcattaagactgctctgaaggcctgcaagaccccccaaagccagcagtcagcctacttcctgttaacactgtttagagaggtggctattttgtacagatcccacaatgcaagcctccaccccacgccagagcaatgtgaagctgtgagcaaattcattggcgaatgcaagatcctttcacctcctgatatcagccgttttgcaacatcgctcgtggacaattctgtgccattgttgagggcggggcctagtgacagcaaccttgatggaacggtgacagaaatggccattcatgctgcagccgtccttctgtgtggacagaatgaactcttggagcccctaaagaatctggccttctccccagccaccatggcgcatgcttttcttccaaccatgcctgaagacttgctggctcaagctcggaggtggaagggtctggagcgagtccactggtacacttgtcccaacggccatccttgctccgtgggagagtgtggcaggccgatggaacagagcatctgcattgactgccatgcgccgattggaggcattgaccacaaacctcgggacggctttcatctggtcaaagacaaggcagacagaacgcagaccggccacgtgctgggcaacccgcagcggagagacgtggtgacatgtgaccgagggctgcccccagtggtcttcctccttatccggctactcactcacttggctctgcttctgggagcgtcccagagttcccaggctctgataaacatcattaagcctccagtgagggatccaaaaggctttctgcagcagcacatcctgaaggacctggagcagttggccaagatgctgggacacagtgccgacgagaccatcggcgtggtccacctcgtcctgcgcaggcttctccaagagcagcaccagctctctagcagaaggcttttaaattttgacacagaattgtcaactaaagaaatgaggaacaactgggaaaaggaaatcgcagctgtgatttctcctgaactggagcatctagataaaacccttcccaccatgaataatctcatcagccaagataagcgtatcagctctaaccctgtggccaaaataatatatggtgacccagtgaccttcctgccccacctgccccggaaaagtgtggtccattgctctaagatttggagctgcaggaaaagaattacagttgagtacctccagcacattgtggaacagaaaaatggcaaagaaagagtgcccatcctctggcatttcctgcagaaggaagcagagctgaggctggtaaagttcctgcctgagattttggccttgcaaagggatctagtgaagcagttccagaacgtccagcaagttgaatacagctccatcagaggcttcctcagcaagcacagctcagatgggttgaggcagctgcttcacaacaggatcacagtctttctgtccacatggaacaaactgaggagatcgcttgagacgaacggtgagatcaacctacccaaagactactgcagcactgacttggatctggacactgagtttgagatcctcttgccacgccgacggggcctgggcctctgtgctaccgctctcgtcagctacttgattcgcctacacaatgaaattgtctacgccgtggaaaaactctccaaggaaaacaacagctattccgtggatgccgccgaggtcactgaactgcatgtcatcagttatgaagtggagcgggacctgactccactgattctctccaactgccagtaccaggtggaggagggcagagagaccgtgcaggagttcgatctggagaagattcagcggcagatcgtcagccgcttcctccagggcaagccccggctgagcctcaagggaatacccactctggtgtacagacacgactggaactatgaacatctctttatggacatcaagaacaaaatggcacaggactccctccccagctcggtcattagtgccatcagtggacagctgcagtcctacagcgatgcctgtgaagtgctgtctgtcgtagaagtcactctggggtttctgagcacagctggtggggatccaaacatgcagctgaatgtgtatactcaagacatcctgcaaatgggtgatcagacgattcacgtgttaaaggccttaaacagatgccagttaaaacacaccattgccctctggcagttcctgtctgctcataagtctgaacagctgctgcggctgcacaaagagccatttggggaaatcagttcaaggtacaaagcggatctgagcccggaaaatgctaagctcctcagcacattcctaaatcagactggcctagacgccttcctgctagagctgcacgaaatgataatcttgaaactaaagaacccccaaacccaaaccgaggagcgcttccgccctcagtggagcctgagagacactctcgtaagttacatgcaaactaaagaaagtgaaattcttcctgaaatggcatctcagttcccagaagagatactgctcgccagctgtgtctcagtgtggaaaacagctgctgtgctgaaatggaatcgagaaatgagatagaattatttcctcagctatctttggatgactttggagagaagactcctctctcctcgtctgcggcgtggacttgatcatggactggtgcctttgcattcagaaggagagctgtcagcgtagcaccgaattcaagaccaaggcgtgctacctgagctgacagctttttgaaagccgagctgtttctgaaccatgtacatacatgttctgaaactttctcatcattttatgagtactgttcattgagagatgacaatgaagattagatgaaattggaaataaaccaacattgtttacattccaggagacttgtagctcagccacacacgcagtaatgacctgtgcccgttcgcctctggcactgcccacccctctttttttttttcttctaattctgtactcacaaaagagaatctcattttcttctttcttccattcccttaaattctgagtactgtacatatatttctgggttcccacgatgatgtgaaaaactaccagactgttttttgtcttctcacaaagacaagaaaaatcagggcattttgtgagtgccttaagatcaaactaacaagatctgaccctctcccctcacagtgagccactgccccacttcagagggtaagagccaaaagcctcattgtgaaaggcactggacttggaccagggacaccatcagggccttggttttctcacgcataaaatggagagtggattaatcgccaaagattcttctgatctgacattttgaaattgtgagagaaactagatgactgtaaacttggtcacaggcctggttctggcagttctttgcggacttttttctagcattatgccaaataaacatgcagtctcagtgtgctctcgcatgtatgaatatctagtcctttctgtggttctcagccaagacataaaaactaggactcagagcacatacaaaaccagttatgtttcggaaagagggaaaagagtccccgagcccggatcttgtgctgcttttctcactgacgtgttgccttttttctttacaaaatctgctttgatacttaggacctctctggactaatttctcttcctagacagctcagcacagctattgatatgttagaggcagtatccttaatattcattctaaatgagttaacgacttaacttgaaattgggcctaaggagtgagaactacaaaaatacaaaatgcttgtccaggactcagccatgcacaccttgagcagcgccggcaggaggcacggaaggaactgtgctccgttctcctcactgtcatggtgccaccagtgtctgatgaagggcagagtgacccagactgcaggcagtaactgacttcacacagtccctggcatttagtcatctgtgattgttttatcactctggactgtgcagagccacctgccaccgagatctgcattccgactgcctatgaacgggtgtgggggccgggggctggcttgctgaagtcttcaacttgcactcggagctcctttgatacctcagagctggctgtcaggtggcagctcacacccagactcactggccacacctcagcagggggggagtcgagtgtcagtctctttctgtgaaggctttttttttcctttggcctgggaatttttcccatttttatgaaggggttttaaattgtttcattttgtgtgctgtgcttcaaagccttaactgtcaaatcttgcattatcttgtttgtacagaaatatactggcctagcagaggcaaaaaaaaaaaaaatgaattttattttacttgtcacacctgtcttaataaactggagttttgctgctaaagaa

SEQ ID NO: 177403 - DNA, 699 bp, Homo sapiens
  Payload ID: 14813
  Gene Symbol: RNF213
  Gene Name: ring finger protein 213
  ENST ID: ENST00000573038
  CDS Start-End: 1-319
gctcagcagccagcgggggatggagttcgtgcagggcctctccaagcccggccgcccgcaccagtgggtgtttcccaaggacgttgtcaagcagcaggggctgcggcaggaccacccaggccagatggataggtacctggtgtacggcgatgaatacaaggctctccgtgatgctgtggccaaagctgtcctcgagtgcaagccactgggcattaagactgctctgaaggtaggatgggcccgtggcttctctctgataccaggtggcatcccttggagcctgcatgttccctggtttatgtcaaatgatgcagggtgatggaccactgatgcagcccatcacgtgacactgtattggaagtcacgtgcccacagcctccagggcgcacctggctagtgtgcgtgaaccagtggctggaacaggacagctatgacagttgagctgggttgacagatttgctgtgtcttgctgatctgccaagtccatcagcagcgccttttgatttatgcccattacttcctttgagaccctgctggaaaacagtctaagaaagatgctgacacaactattaatagcaaaattcatacctagatgtattcataattcagatatgcatgtgtgtttaataaaaatacatatgttggtgtagtgtgggaagttaaaaaatataaagatgtttttagaatctaacctttaaa

SEQ ID NO: 177404 - DNA, 21055 bp, Homo sapiens
  Payload ID: 14813
  Gene Symbol: RNF213
  Gene Name: ring finger protein 213
  ENST ID: ENST00000582970
  CDS Start-End: 144-15767
cagcgcgcggcaggcggcgagctcgggggccgcagaaaatgaaactgaagccgtggtcacgtgacaggacatgtagtatatagcaggctgccagcgactcctgctcttgcttctggatctgcagggcagtcccagcaggacccatggagtgtccttcgtgccagcatgtctccaaggaggaaacccccaagttctgcagccagtgcggagagaggctgcctcctgcagcccccatagcagattctgagaacaataactccacaatggcgtcggcctcggagggtgaaatggagtgtgggcaggagctgaaggaggaagggggcccgtgcttgttcccgggctcagacagttggcaagaaaaccccgaggagccctgttccaaagcctcctggaccgtccaagaaagcaaaaagaagaaaaggaagaagaaaaagaaggggaacaagtccgcttcctcagagctggcttccttgcccctttctcctgccagcccctgtcacctgactttgctttcaaacccgtggcctcaggacacagccctgccccacagccaagcccagcagagtggccccactggccagccgagccagcccccaggcacagccaccacgccactggagggtgacggcctctccgcgcccaccgaggttggcgacagccccctgcaggcccaggctttgggagaggcaggagtggccacaggaagtgaggctcagagcagcccgcaattccaggaccacacggaaggggaggaccaggacgcttccatcccctctgggggcagaggcctgtcccaggaggggaccggtccccccacctctgctggtgaaggccattctaggactgaagatgctgcccaggagctcctgttgcctgagtcaaaaggaggcagctctgagcccgggacagaactgcagaccaccgagcaacaggcaggggcctcagcctctatggcagttgatgctgtagctgagccagccaatgcagttaaaggggccgggaaggaaatgaaagagaagacccagagaatgaaacagccaccagcaaccactcctcctttcaaaacacactgccaggaagctgagaccaagaccaaggacgagatggctgctgctgaagaaaaagtcggtaagaatgaacaaggggagcctgaagacctcaagaagccagaggggaagaacagaagtgcagctgctgtgaaaaacgagaaggagcaaaaaaaccaggaagcagatgtccaggaagtgaaggcaagcacgctgagcccgggtggaggagtcaccgtgttcttccacgccatcatctctcttcatttcccattcaatcctgacctccataaagtcttcatcagaggaggagaagaatttggggagtcaaaatgggacagcaatatctgtgagctgcactacaccagagacttgggtcatgaccgcgttcttgttgaaggcattgtctgcatttccaagaagcacctagataaatacattccttacaagtacgtcatttataatggggaatcttttgagtatgagttcatttacaagcaccagcagaagaagggcgagtacgtcaaccgctgtctgttcataaaatcttcacttctgggctcaggagactggcatcagtactatgacatagtttatatgaagcctcatgggagactccagaaagtcatgaaccacatcacagacgggccgaggaaggacctggtgaaggggaagcagattgccgctgcgctcatgctggacagcaccttcagcatcctgcagacctgggacaccatcaacctgaacagcttcttcacccagttcgagcagttttgctttgtcctgcaacagcctatgatttatgaaggacaggcacagctgtggaccgatttgcagtacagggagaaagaggtgaagagatacctgtggcaacatctgaaaaaacacgtggtaccattgccggacggaaaaagcacggactttttgcctgtggactgcccagtgaggagtaaactgaaaacaggcctgattgtcctttttgtagtggaaaaaattgagcttttattagaaggcagcctggactggttgtgtcacctcctaacctcagatgccagctcaccagatgagtttcaccgtgacctaagccacatccttgggatacctcagagctggcggctgtacctggtgaacctgtgccaaagatgcatggacacaaggacgtacacctggctgggcgccctgcctgtcctgcactgctgtatggagctggccccgcggcacaaggatgcctggagacagcctgaggacacctgggccgctctggagggactctccttctcaccgttccgggaacaaatgctagatacgagttccctacttcagtttatgagagagaagcagcatttgctgagcatagacgagcctctcttccggtcctggtttagtctgctacctctgagtcacctggttatgtatatggaaaacttcattgagcacctgggtcgttttcctgctcatatcctggactgtctttcagggatttactaccggcttccgggacttgagcaagtcttgaatacgcaggatgttcaggatgttcagaacgttcagaacattttagaaatgctgttgcgactcctggacacttaccgggacaagattcccgaggaggccttgtcaccatcctacctgactgtgtgtctgaaactgcatgaagccatctgcagcagcacaaagctacttaagttttacgagctgccagccttatctgccgagattgtctgcagaatgattagacttctatctctggtggattctgcaggacagagagatgaaactggaaataattcagtccaaacagtcttccaagggacccttgctgctacgaaaaggtggctccgagaagtttttacaaagaacatgctcacatcttcaggtgcctcattcacatacgtcaaggaaattgaggtctggaggcggctggtggaaatccaattccccgcggagcatggctggaaggagtcgttgctgggagacatggaatggaggctcacaaaggaggaacccctctcccagatcactgcctactgcaatagttgctgggacaccaaaggcttagaggacagtgtggccaagaccttcgagaaatgcatcattgaagccgtgagctcagcctgccagtctcagaccagtatccttcaggggttctcttactctgatttgcggaaatttggcatcgtcttgtctgctgtgatcactaagtcctggcctaggaccgcggacaacttcgatgacattttaaagcatctgctcacgttggcagatgtcaagcacgtcttcagattgtgtggaaccgacgagaaaatactagcaaatgtcacagaggatgccaagaggctgatagctgttgccgactctgtgttgacgaaagttgttggtgacctcctaagtggcacgattttagttggacaactggagctgattataaagcacaagaatcagtttcttgacatctggcaactgagggaaaaaagtctttcaccccaggatgaacaatgtgctgtggaggaagcactggattggagaagggaggaactgttacttctaaagaaagagaaaagatgtgttgatagtctcctgaagatgtgtgggaacgtgaaacatctgatacaagtggactttggagtgcttgcagtaagacactcacaagacctcagcagtaaaagattaaatgacaccgtgacagtgagactgtccacctcctcgaactcgcagagggcaacgcattaccacctgagctcccaggtccaagaaatggctgggaagatagacttgctcagagacagccacatcttccagctcttctggcgggaagccgcagagccgctgagtgagcctaaggaggaccaggaagccgcagagttgctgagtgagcccgaagaagaatcagaaaggcacatccttgagcttgaagaggtgtatgactatttgtatcagccttcttacagaaagttcattaagttgcaccaggatctaaagtcaggagaggtcacccttgcagagattgatgtcatcttcaaggactttgtgaataaatacacggacctggattcagaacttaagatcatgtgcaccgtggaccaccaggaccaaagagattggatcaaggaccgagtcgaacagatcaaggaataccatcacctgcaccaggctgtccacgcagccaaggtcatcttgcaggtcaaagagagcctgggactgaacggtgacttcagtgttctcaacactttactaaattttactgataacttcgacgactttcgccgtgaaacactggaccagatcaaccaggagctcatccaggccaaaaagctgctccaggacatcagcgaggcccggtgcaaggggctgcaggctctgtccctgagaaaggagttcatctgctgggtccgggaggctcttggaggcatcaatgagctgaaggtgtttgtggacctggcctccatctcagcgggggagaatgacattgatgtggaccgggtggcctgcttccatgacgctgtgcagggctacgcatccctgctatttaagctggaccccagcgtggacttcagtgcattcatgaagcatctgaaaaagctgtggaaggctctggataaggaccagtacctgcccaggaaactgtgtgactccgccaggaacttggaatggctgaagactgtgaatgagagtcatgggtctgtggaacgctcatccctgaccctggccacggccatcaaccaaagaggcatctatgtgatccaggcgcccaaaggtggccaaaagatttccccagacacggttctgcacttgatccttcctgagagccctggcagccacgaggagtcacgagagtactctttagaggaggtgaaggagcttttgaacaagttgatgctgatgtctggcaagaaggatcgtaacaacacggaagtggagaggttttcagaggtcttctgcagtgtgcagaggctcagccaggccttcatcgacctgcactctgctgggaatatgctgttcaggacgtggatcgccatggcctactgctcccccaagcagggtgtgtccctccaaatggactttggcttggacctggtgacggagcttaaagaaggtggagatgtcactgagctgctggcagccctctgcaggcagatggagcacttccttgacagctggaagagatttgtgacccagaagcgaatggagcacttttacctgaacttctacacggcagagcagctggtttacctgagcactgagctcaggaagcagcccccgagtgatgccgccctaacgatgctatccttcatcaaaagcaactgcaccctgagggatgtcttaagggcctctgtggggtgtgggagtgaggccgccaggtaccgcatgaggagagtcatggaagagctcccgctgatgctcttatcagagttcagcctggtggacaagctgaggatcatcatggagcagtccatgaggtgccttcctgccttcctgcccgactgcctcgacctagagacccttggccactgtctggctcacctggcagggatgggtgggtctcccgtggagcgttgtctcccgagaggtctgcaggtcggccagcccaacctcgtcgtctgtggccactccgaggtgttgccagccgccctggctgtctacatgcaaaccccaagccagcccctgcccacttacgatgaggtgctgctctgcaccccggcaaccacctttgaggaggtggcactgttgctgcgccgctgcctgaccctgggctccctggggcacaaggtctacagcctgctgttcgcagatcagctgagctacgaggtggcacgccaagcggaggagcttttccacaatctgtgcacgcagcagcaccgagaagactaccagctcgtcatggtctgtgatggggactgggagcactgctacctcccctctgccttcagccagcacaaggtcttcgtcaccccccaggcacccctcgaggccatccaagcctacctggcaggtcactaccgggtcccgaagcagaccctgtcggcggcagccgtgttcaatgaccggctgtgtgttgggatcgtggcctcggagcgagcaggtgttggaaagtctctgtacgtgaagaggttgcacgacaaaatgaagatgcagttaaacgtgaaaaatgtgcctctgaaaacaattcgactgatcgaccctcaggtggatgagagccgagtcctgggcgccctgctgcccttcctggatgcgcagtatcagaaggtccccgtgctctttcacctggacgtgacctcctcagtgcagactggaatttgggtgtttcttttcaagctcctcattttacaatacttaatggatataaatgggaaaatgtggcttcggaacccctgccatttgtatatcgttgaaatcctggaaaggaggacgtcagtgccgtcgaggagctcttcagcgctgcgtacacgtgtaccccagttcagttttcttgacatcttcccaaaagtcacctgcaggcctcccaaagaggtgatagacatggagctgagtgccctgaggagtgacacagagcctgggatggatctgtgggagttctgcagcgaaactttccaaagaccttaccagtatttaagacgattcaatcaaaaccaagacctagacacgtttcagtatcaagaaggctctgtcgaaggcaccccggaggaatgcctccagcatttcctgtttcactgcggggtaataaacccatcctggtcagagcttcggaactttgctcggttcctgaattatcagctcagagattgtgaggcctctctcttctgcaatccgagttttattggcgacacactgaggggcttcaagaagttcgtggtgaccttcatgatctttatggcaagagattttgccacaccatcactccacacctctgaccaaagcccggggaagcacatggtcaccatggatggggttagggaagaagatctagcgcccttctccctccggaagaggtgggagtcggagcctcacccatacgttttcttcaatgacgaccacacaaccatgacattcatcggcttccatctgcagcccaacatcaacggcagtgtcgatgccatcagtcacttgactgggaaggtcatcaagagagacgtcatgaccagggacctgtaccagggcctgctgctccagagggtgcccttcaatgtcgactttgataaactgcccagacacaagaaacttgagaggctctgcctgaccttagggatcccccaggccaccgaccccgacaaaacgtatgagctcacaaccgacaatatgcttaaaatccttgccatcgagatgcggttccggtgtgggatcccggttatcatcatgggagaaactggctgtgggaaaaccaggcttattaaattccttagcgacctgcggcgtggtggtaccaatgctgacaccataaagctggtcaaggtgcacggaggaacaactgcagacatgatctactccagagtcagggaggctgaaaatgtggccttcgccaataaggaccaacatcagttggacaccatcttgttttttgatgaagccaacacaacggaagctataagctgtatcaaagaagtcctgtgtgatcatatggtggatggccagcctctggctgaggactctggcctgcatattatagctgcctgcaatccataccggaagcactctgaggagatgatctgccgtttggagtcagctggtttgggctacagggttagtatggaggagacggccgacaggctgggctccattcctctgaggcagctggtataccgggtccatgctctgcccccgagcctgattcctctggtgtgggactttggacaactgagtgacgttgctgaaaagctctacatccagcagattgtccagagactggttgagtccatcagcctagatgaaaacgggactcgcgtgatcacagaagtcctctgcgcctctcagggtttcatgaggaaaacagaagatgagtgcagctttgtcagcctcagggacgtggagcgctgtgtgaaagttttcaggtggttccacgagcacagcgcgatgctcttagcgcagctgaatgcctttctctccaagtccagcgtcagcaaaaatcacaccgagagagatcccgtcctctggtcgttgatgctggccatcggggtgtgttaccatgcctctttagaaaagaaagactcatatcggaaagccatcgccaggttctttccgaaaccgtatgacgacagcaggctgcttctggatgaaataacacgggcacaggatctttttctggacggcgtacctctgaggaaaaccatcgccaagaacttggccttgaaggagaacgtcttcatgatggtcgtctgcatcgagctgaagattcccctcttcctggtggggaagcccggcagctccaagtctctcgccaagaccatcgtggcagacgccatgcagggcccggctgcctactcagatctcttccgcagcctgaagcaggtccacctggtgtccttccagtgcagcccgcactccaccccacagggcatcatcagcaccttccggcagtgcgcccgctttcagcaggggaaggacctgcagcagtacgtctctgtggtggtgttagatgaggtggggctggcggaagactcacccaaaatgcccctgaagactctgcacccgctgctggaagacggatgcattgaagacgatcccgccccccacaaaaaggtcggcttcgtgggcatctccaactgggcccttgaccctgccaagatgaaccggggcatttttgtgtcacgtggcagccccaacgagacagagctcatagagagcgccaagggcatctgctcctcagacatcctcgtccaggaccgagtccaagggtactttgcgtcctttgccaaagcctacgaaacggtgtgtaagcgccaggacaaggaattcttcgggcttcgtgactactacagcctcatcaaaatggtctttgctgcagcaaaggcttcaaatagaaagccttccccgcaagacattgcacaggctgtccttaggaacttcagtggcaaggatgacatccaagctttggacatctttctggccaatttgcccgaggccaagtgctcagaggaagtcagccccatgcagctgatcaaacagaacatctttgggccttctcagaaggtgccgggtggagagcaggaagatgctgagtcccgctacttactcgtgctgaccaaaaactacgtggcactgcagatcctgcagcagacattcttcgagggggaccagcagccggagattatttttggttctggtttccccaaggaccaagagtacacccagctctgcagaaacatcaatcgtgtgaagatctgcatggaaacaggcaagatggtgttgcttctcaacctgcagaacctctacgagagcctctacgacgcactcaaccagtactacgtccacctcggcggccagaagtacgtggacctcggtctggggacccaccgcgtcaaatgtcgggttcaccccaacttccgcctgattgtcattgaagagaaagacgtcgtgtacaaacactttcccatccccctcattaaccggctggagaagcactatctggatatcaacacggtgctggagaaatggcagaagagcatcgtggaggagctctgtgcgtgggtggagaagttcatcaatgtcaaagcacatcatttccagaagaggcacaaatacagcccctctgacgtcttcatcggctaccactcggacgcctgcgcgtctgtggtgctgcaggtcatagagaggcagggtccccgggccttgacggaggaacttcaccagaaggtgtctgaggaggccaaatcgatcctgctgaactgcgctacgcccgatgccgtggtccggctgagcgcctactcgctgggcgggttcgcagcggagtggctgtcgcaggagtactttcacagacagaggcacaactcctttgcagatttccttcaggcacacctgcacacggcagacctggagcgccacgccatcttcacagagatcaccactttctccaggctgctaacaagtcacgactgtgaaattttagaatcagaggtcacaggcagggctccgaaacccacactcctgtggctgcagcagtttgacaccgagtactcattcctcaaagaagtccgaaactgtttaacgaatacagccaaatgtaaaatcctcatttttcagacagattttgaagatggaatccgtagcgcccagctcattgcctcagctaagtattctgttataaatgaaatcaacaaaatacgagaaaatgaggaccgtatcttcgtctatttcatcacaaaactgtcccgggtgggaagaggaacagcctatgtgggcttccacggagggctgtggcagtctgtccacatcgatgacctccggagatccaccctcatggtttctgatgtgaccaggctgcagcatgtcaccatcagccagctgttcgcgcccggagacttgcctgagctgggcttggaacaccgggcggaagacggccatgaggaggcgatggagacggaggccagcacatcaggggaggtggcagaggtggcagaggaggccatggaaacagaaagttctgagaaggtgggaaaggaaacctctgaactcggaggcagtgatgtgtcgatcctggacaccaccaggctgctgagaagctgtgtgcagagcgccgtgggcatgctcagagaccagaacgagagctgcacgcgcaatatgcggagggtggtgctcctcctgggcctcttgaatgaggatgacgcgtgccacgcctctttcttgcgggtatccaagatgcgcctcagtgtctttttaaagaagcaagaagagagccagtttcaccctctggagtggttggcaagggaagcctgcaaccaggacgctctccaggaggcgggcacattcaggcacaccctctggaagcgggtccaaggtgctgtcacccctctgctggcgagcatgatatcattcatcgacagagacggcaacctagagttactgaccaggccagatactccgccctgggcaagagatctttggatgtttattttcagtgacacgatgcttctgaacattcctcttgtgatgaataatgaaagacataaaggtgagatggcctacatcgtggtgcagaaccacatgaacctttccgagaacgcttccaacaacgtccctttcagctggaaaatcaaggactatctggaggagctgtgggtccaggctcagtacatcacagacgcagaaggactgcccaagaagttcgtggacatctttcagcagactcctctgggcaggtttcttgcccagctccatggagagccgcagcaggaacttcttcagtgttacttgaaggatttcattctcttgaccatgcgtgtgtcaacggaggaggaattaaagtttctgcagatggctctgtggtcctgcactaggaaactgaaagcggcgtcagaagcgcccgaggaagaggtttccttaccgtgggtgcaccttgcctaccagcgtttcagaagccgtctgcagaacttttccagaatcctgaccatctaccctcaggttctccacagcctgatggaagcccgttggaaccatgagctggctggatgtgagatgaccctggacgcatttgccgcaatggcctgcacggagatgctgacaagaaacaccctgaagcccagtccccaggcgtggctacagttggtgaagaatctttccatgccgctggagctcatctgctccgatgagcacatgcaaggcagcgggagcctggcccaggctgtcatcagggaagtcagagcccagtggagtcggattttctccaccgcactcttcgtggagcacgtgctcctaggaaccgagagccgcgtccccgagttacaggggctggtgaccgagcacgtcttcttactagacaagtgtcttcgagagaactctgacgtgaagacgcacgggccttttgaggccgtgatgcgcactctctgtgaatgcaaggagacagccagcaagaccctcagcaggtttgggattcagccgtgctccatctgcctgggagatgcaaaggaccccgtctgtctgccctgcgaccacgtgcactgcctgcgctgcctcagggcctggtttgcctcagagcagatgatatgcccctactgtttaactgccttgccagacgaattctctccagctgtttcccaagcgcacagggaagccattgaaaagcatgcccgcttccggcagatgtgcaacagtttcttcgtagacctggtgtccaccatttgcttcaaggacaacgctccgcctgagaaggaagtgattgagagcctgctctctctcctcttcgtccaaaaggggcgcttaagagatgctgcccagagacactgtgaacacacaaaatctctctctccattcaatgatgttgtggataagactcctgtcatccgctcagtgatactgaaactgcttttgaagtacagctttcatgatgtaaaagattatattcaggaatatttgaccctgttaaaaaagaaagcattcataactgaagataaaactgaactgtacatgctcttcatcaactgcctggaggattcaatacttgagaagaccagtgcttactccagaaatgatgaactgaaccacctagaagaggaaggtcgtttccttaaggcatattctccagcaagccggggccgagagcctgccaacgaggcctcggttgaatacctgcaagaggtggcccggatccgcctctgcctcgacagagctgcagatttcctctcggagcctgagggaggcccagagatggccaaggagaagcagtgctacctgcagcaagtcaagcagttctgtatccgggtggagaacgactggcaccgggtgtacctggtgcggaagctcagcagccagcgggggatggagttcgtgcagggcctctccaagcccggccgcccgcaccagtgggtgtttcccaaggacgttgtcaagcagcaggggctgcggcaggaccacccaggccagatggataggtacctggtgtacggcgatgaatacaaggctctccgtgatgctgtggccaaagctgtcctcgagtgcaagccactgggcattaagactgctctgaaggcctgcaagaccccccaaagccagcagtcagcctacttcctgttaacactgtttagagaggtggctattttgtacagatcccacaatgcaagcctccaccccacgccagagcaatgtgaagctgtgagcaaattcattggcgaatgcaagatcctttcacctcctgatatcagccgttttgcaacatcgctcgtggacaattctgtgccattgttgagggcggggcctagtgacagcaaccttgatggaacggtgacagaaatggccattcatgctgcagccgtccttctgtgtggacagaatgaactcttggagcccctaaagaatctggccttctccccagccaccatggcgcatgcttttcttccaaccatgcctgaagacttgctggctcaagctcggaggtggaagggtctggagcgagtccactggtacacttgtcccaacggccatccttgctccgtgggagagtgtggcaggccgatggaacagagcatctgcattgactgccatgcgccgattggaggcattgaccacaaacctcgggacggctttcatctggtcaaagacaaggcagacagaacgcagaccggccacgtgctgggcaacccgcagcggagagacgtggtgacatgtgaccgagggctgcccccagtggtcttcctccttatccggctactcactcacttggctctgcttctgggagcgtcccagagttcccaggctctgataaacatcattaagcctccagtgagggatccaaaaggctttctgcagcagcacatcctgaaggacctggagcagttggccaagatgctgggacacagtgccgacgagaccatcggcgtggtccacctcgtcctgcgcaggcttctccaagagcagcaccagctctctagcagaaggcttttaaattttgacacagaattgtcaactaaagaaatgaggaacaactgggaaaaggaaatcgcagctgtgatttctcctgaactggagcatctagataaaacccttcccaccatgaataatctcatcagccaagataagcgtatcagctctaaccctgtggccaaaataatatatggtgacccagtgaccttcctgccccacctgccccggaaaagtgtggtccattgctctaagatttggagctgcaggaaaagaattacagttgagtacctccagcacattgtggaacagaaaaatggcaaagaaagagtgcccatcctctggcatttcctgcagaaggaagcagagctgaggctggtaaagttcctgcctgagattttggccttgcaaagggatctagtgaagcagttccagaacgtccagcaagttgaatacagctccatcagaggcttcctcagcaagcacagctcagatgggttgaggcagctgcttcacaacaggatcacagtctttctgtccacatggaacaaactgaggagatcgcttgagacgaacggtgagatcaacctacccaaagactactgcagcactgacttggatctggacactgagtttgagatcctcttgccacgccgacggggcctgggcctctgtgctaccgctctcgtcagctacttgattcgcctacacaatgaaattgtctacgccgtggaaaaactctccaaggaaaacaacagctattccgtggatgccgccgaggtcactgaactgcatgtcatcagttatgaagtggagcgggacctgactccactgattctctccaactgccagtaccaggtggaggagggcagagagaccgtgcaggagttcgatctggagaagattcagcggcagatcgtcagccgcttcctccagggcaagccccggctgagcctcaagggaatacccactctggtgtacagacacgactggaactatgaacatctctttatggacatcaagaacaaaatggcacaggactccctccccagctcggtcattagtgccatcagtggacagctgcagtcctacagcgatgcctgtgaagtgctgtctgtcgtagaagtcactctggggtttctgagcacagctggtggggatccaaacatgcagctgaatgtgtatactcaagacatcctgcaaatgggtgatcagacgattcacgtgttaaaggccttaaacagatgccagttaaaacacaccattgccctctggcagttcctgtctgctcataagtctgaacagctgctgcggctgcacaaagagccatttggggaaatcagttcaaggtacaaagcggatctgagcccggaaaatgctaagctcctcagcacattcctaaatcagactggcctagacgccttcctgctagagctgcacgaaatgataatcttgaaactaaagaacccccaaacccaaaccgaggagcgcttccgccctcagtggagcctgagagacactctcgtaagttacatgcaaactaaagaaagtgaaattcttcctgaaatggcatctcagttcccagaagagatactgctcgccagctgtgtctcagtgtggaaaacagctgctgtgctgaaatggaatcgagaaatgagatagaattatttcctcagctatctttggatgactttggagagaagactcctctctcctcgtctgcggcgtggacttgatcatggactggtgcctttgcattcagaaggagagctgtcagcgtagcaccgaattcaagaccaaggcgtgctacctgagctgacagctttttgaaagccgagctgtttctgaaccatgtacatacatgttctgaaactttctcatcattttatgagtactgttcattgagagatgacaatgaagattagatgaaattggaaataaaccaacattgtttacattccaggagacttgtagctcagccacacacgcagtaatgacctgtgcccgttcgcctctggcactgcccacccctctttttttttttcttctaattctgtactcacaaaagagaatctcattttcttctttcttccattcccttaaattctgagtactgtacatatatttctgggttcccacgatgatgtgaaaaactaccagactgttttttgtcttctcacaaagacaagaaaaatcagggcattttgtgagtgccttaagatcaaactaacaagatctgaccctctcccctcacagtgagccactgccccacttcagagggtaagagccaaaagcctcattgtgaaaggcactggacttggaccagggacaccatcagggccttggttttctcacgcataaaatggagagtggattaatcgccaaagattcttctgatctgacattttgaaattgtgagagaaactagatgactgtaaacttggtcacaggcctggttctggcagttctttgcggacttttttctagcattatgccaaataaacatgcagtctcagtgtgctctcgcatgtatgaatatctagtcctttctgtggttctcagccaagacataaaaactaggactcagagcacatacaaaaccagttatgtttcggaaagagggaaaagagtccccgagcccggatcttgtgctgcttttctcactgacgtgttgccttttttctttacaaaatctgctttgatacttaggacctctctggactaatttctcttcctagacagctcagcacagctattgatatgttagaggcagtatccttaatattcattctaaatgagttaacgacttaacttgaaattgggcctaaggagtgagaactacaaaaatacaaaatgcttgtccaggactcagccatgcacaccttgagcagcgccggcaggaggcacggaaggaactgtgctccgttctcctcactgtcatggtgccaccagtgtctgatgaagggcagagtgacccagactgcaggcagtaactgacttcacacagtccctggcatttagtcatctgtgattgttttatcactctggactgtgcagagccacctgccaccgagatctgcattccgactgcctatgaacgggtgtgggggccgggggctggcttgctgaagtcttcaacttgcactcggagctcctttgatacctcagagctggctgtcaggtggcagctcacacccagactcactggccacacctcagcagggggggagtcgagtgtcagtctctttctgtgaaggctttttttttcctttggcctgggaatttttcccatttttatgaaggggttttaaattgtttcattttgtgtgctgtgcttcaaagccttaactgtcaaatcttgcattatcttgtttgtacagaaatatactggcctagcagaggcaaaaaaaaaaaaaatgaattttattttacttgtcacacctgtcttaataaactggagttttgctgctaaagaactcttctctctgggggcagagcttctatttatggcacatagacatcagctaggcttttgggaatcgtttgtgttctttgtggaaatgtcctttagaagcacccatgaagtagtgtgttcagactgtgcacacagaaaacaggctctgccttcacatgtgagacggtggacttttcctctggacaaaatgacagcatcctggcgactccacagtggagctgagcgccactccctgtagccgatctgggactgaaacgcttacacctctgcctcagaaggagtcccccatgccctgcctgaaatgacttcactggacacagcggggctgcagctaacggggtacaggtaggagctaactaacttcacccctgagtccacttgcggggtaagagataaacagtaacccttccaggagcccactgacgttggagtgctaaaaatgccccttcagggggaaaactgcattttctcttccaaaaaggaaaggttcttccaggcgagaaacctgtggtctagaaccacagcaagaagaggaggcatgctggcctgcaccggaagactcactttgtctgccctgcgccagcctcacctcaccctgcagttcccgtttccgccatggatgcctcatcaccaaccctgaccttccccctcccaaccctttattcatcctcactcccactcatacccgcctccctggacagttccctgctgcagagttctttctgctttcagccctaccttggtggtgatttacctgaaaatcttcacaactgatcattatctccttctctttgagacctgactgaaaaaattaggtgtgcacacctgtaatcccagctacctgggaggctgaggtatgaggattgcttgagcctgggagtttgaggctgcagtgagctatgattgcaccactgcactccaacctgggtgacagagtgagaccctgtctcaaaaaaaaataaaataaggaccttattgtgtgtgcaaattatttgcctttcatgaatagttatgagactttgtgcatgtgttaaccgagacggccctgagctatttcagttactcctgtatgttcaggcaattccaatttagaaacaaacttccagtgataaatattgggaagaaaatgtcagctcagggccaagtaggtaaagccacccaagtctagccatgcacacaggcactagtgtgctgaaggaaaacacctctgatttgatacataaagtgtgaaggttgcataactggggaggtggctggagaaaacctgagcctcgagctgagtaacaatccaagccatgattagcatttatattgcattctgcattattctcatcctatcacgttcattaagttcaaccattaccattacgaatcccgtttccagctggaaaaacaagcgccaggaaagtgcatttcccccccaccccccccccccaaccagagcaactttggtcagaagtcacacctaatcaccctctctgcaggatatgctggggatagcccttttgaggaggtgggggtgtatgcgaaagcaacctggggccaaagcagggggaagcaggagagactggaggggccctgggtccagcaagtgctccaccaggctgcccctgctcaggtgctccacagcccataaaaaacgccttcagccctgctgtgcttcccctcacacctaaacttactataagggtcctaccttccccagtattccttcatgatcactgctacctgtgccctgaagcgcaacagaacctcaacccagaggacagccacttcctcagaacccacgatctttgccccatcgccacaggtccatgagtgactcctaattaccaaatccaagggctccttcaccctgaccactctggaacccaacaaagctgacacacagcccagcccagacaggcctgaatgtgggtcctggctctcccatttgccagttctacagccatgggcaagtggctcgacctctctaagcttcagtttcctcgtctgtgaaatatctgtcagtgctcttaagggaggagaccaccccacatattgtcttacgcccaatttctgcctccaaagagagaagtaaaaactaaaaggcagaaatgaaatccacaagcagacagcctgcaccacaccctgggcctggtagttaaagatcgacgcctgacctaatcagtgatgctatctatagattacagacattatatagaaaagcaccgtgaaaatccctgtcctgttctgttccgttctaattacgggtgcatgcagcccccagtcacgtaccccctgcttgctcaatcaatcacgaccctctcacgcagaccccttaagagttgtgagcccttaaaagggacaggaattgctcactcggggagctcagttgttggagacatgagtcttgccgaagcgcccggctgaataaagcccttctttaactcgtgtctgaggggttttctctgcagcttgtcctgctacatttcttggttccctgaccaggaatctaggtgattaatggatggttgaggcagcccctcagacggcttaggcctgccctgtggagcatccctgtggaggactccagccagcttgagcgacatggatcctgagagcgctctcaggcaggcaattgccccagtggaatgcctggccagagcagtgtgtagcaggcccccgaggaggatcaacgcagtggctgaacaccgggaaggaactgccacttggagtccagacatctgaaacttggtaagactggtctttggaacttgcccactccatttgaggggaagcgtggcctgatcacccacggcgtgcctgtactggcactctggtttttgtttttgacttgacttggattgcttgatactttggttttggttttgacctgacttggatatcctgatactctgattttggttttgattttggtttggtgtaaactgtaaaagtgtgtgtgtgccctttttacctgttctttgttttgtggtatgcgtgtagggtgagcgtaatgttttgtcttgaagaagcatgggtcaagcacaaagtaagaccaccccactaggaactatgctgaaaaatttcaggaaaggatttaagggagactatggagtactatgacaccaggaaaacttaaaactttgtgtaagatagactggccagcattagaggtaggttggccatcagagtgaagcctggacaggtcccttgtttcaaaggtatggcacaaggtaacctgtaagccagggtacccacaccagttcccgtacacagacacttggttacagctggttttagactccccacccgcccgccccaacagtggttgagagaacagcagcataagtggctggcagaggcaaggaaagaccagcagagagagaaagaggaagagacagacaaagagggagtcagagagagagagagaaagagacagaggcaaaaggaaagtcaaagagaaagagacagaaaatcaagaggaaaaaaa

SEQ ID NO: 177405 - DNA, 2755 bp, Homo sapiens
  Payload ID: 14814
  Gene Symbol: RNF214
  Gene Name: ring finger protein 214
  Uniprot ID: Q8ND24
  ENST ID: ENST00000300650
  CDS Start-End: 109-2220
ctccgctcgtgccgccggaagtgggaggtgccgcgcgcgggccggcgctcgacccctccccccgtggctcggccgccccctccccccgctccgcccgctcagagcataatggcagcgtctgaggttgctggtgttgtggccaatgcccccagtcctccggaatcttctagtttatgtgcttccaaatcagacgaaggtctcccagatggtctaagcaccaaagactctgcacagaagcagaagaactcgcctctgttgagtgtaagtagccaaacaataaccaaggagaataacagaaatgtccatttggagcactcagagcagaatcctggttcatcagcaggtgacacctcagcagcgcaccaggtggttttaggagaaaacttgatagccacagccctttgtctttctggcagtgggtctcagtctgatttgaaggatgtggccagcacagcaggagaggagggggacacaagccttcgggagagcctccatccagtcactcggtctcttaaggcagggtgccatactaagcagcttgcctccaggaattgctctgaagagaaatccccacaaacctccatcctaaaggaaggtaacagggacacaagcttggatttccgacctgtagtgtctccagcaaatggggttgaaggagtccgagtggatcaggatgatgatcaagatagctcttccctgaagctttctcagaacattgctgtacagactgactttaagacagctgattcagaggtaaacacagatcaagatattgaaaagaatttggataaaatgatgacagagagaaccctgttgaaagagcgttaccaggaggtcctggacaaacagaggcaagtggagaatcagctccaagtgcaattaaagcagcttcagcaaaggagagaagaggaaatgaagaatcaccaggagatattaaaggctattcaggatgtgacaataaagcgggaagaaacaaagaagaagatagagaaagagaagaaggagtttttgcagaaggagcaggatctgaaagctgaaattgagaagctttgtgagaagggcagaagagaggtgtgggaaatggaactggatagactcaagaatcaggatggcgaaataaataggaacattatggaagagactgaacgggcctggaaggcagagatcttatcactagagagccggaaagagttactggtactgaaactagaagaagcagaaaaagaggcagaattgcaccttacttacctcaagtcaactcccccaacactggagacagttcgttccaaacaggagtgggagacgagactgaatggagttcggataatgaaaaagaatgttcgtgaccaatttaatagtcatatccagttagtgaggaacggagccaagctgagcagccttcctcaaatccctactcccactttacctccacccccatcagagacagacttcatgcttcaggtgtttcaacccagtccctctctggctcctcggatgcccttctccattgggcaggtcacaatgcccatggttatgcccagtgcagatccccgctccttgtctttcccaatcctgaaccctgccctttcccagcccagccagccttcctcaccccttcctggctcccatggcagaaatagccctggcttgggttcccttgtcagcccccacggtccacacatgccccctgccgcctccatcccacctcccccaggcttgggcggtgttaaggcttctgctgaaactccccggccccaaccagtagacaaactggagaagatcctggagaagctgctgacccggttcccacagtgcaataaggcccagatgaccaacattcttcagcagatcaagacagcacgtaccaccatggcaggcctgaccatggaggaacttatccagttggttgctgcacgactggcagaacatgagcgggtggcagcaagtactcagccacttggtcgcatccgggccttgttccctgctccactggcccaaatcagtaccccaatgttcttgccttctgcccaagtttcatatcctggaaggtcttcacatgctccagccacctgtaagctatgtctaatgtgccagaaactcgtccagcccagtgagctgcatccaatggcgtgtacccatgtattgcacaaggagtgtatcaaattctgggcccagaccaacacaaatgacacttgtcccttttgtccaactcttaaatgacggacctgactggggaggaagaagaagagaaactgatgtgaacaggaagcgcgggttcaagatttctaaaactctatatttatacagtgacatatactcatgccatgtacatttttattatataggtaatgtgtgtatagaaagtctgtattccaatgttcgtaaatgaaactatgtatattatgcagaaacagtctgttccccctcatcttgcaattcctttgggggatgcagattgtagggaagatgatgtttagtttggccttgaaattatgatatccctgcccagggctgttttcaaatacaatataaaaaccacctaggaacctgctgttgctctaaggccattctgctttggtttggctcagcctctagtccatttccttaaggctcatgtatgcagatttaaagcctggtgctcacccactgtccaaccagatgccttgcttaccgaaagcctccagaagcctcagtattgttttagccactctactccaaatggataaaatgagactctgattgaggaaaaaaaagt

SEQ ID NO: 177406 - DNA, 2695 bp, Homo sapiens
  Payload ID: 14814
  Gene Symbol: RNF214
  Gene Name: ring finger protein 214
  Uniprot ID: Q8ND24
  ENST ID: ENST00000531452
  CDS Start-End: 47-2158
gtccctcccccactttcctcccgggggcgcggcgcgggagagcataatggcagcgtctgaggttgctggtgttgtggccaatgcccccagtcctccggaatcttctagtttatgtgcttccaaatcagacgaaggtctcccagatggtctaagcaccaaagactctgcacagaagcagaagaactcgcctctgttgagtgtaagtagccaaacaataaccaaggagaataacagaaatgtccatttggagcactcagagcagaatcctggttcatcagcaggtgacacctcagcagcgcaccaggtggttttaggagaaaacttgatagccacagccctttgtctttctggcagtgggtctcagtctgatttgaaggatgtggccagcacagcaggagaggagggggacacaagccttcgggagagcctccatccagtcactcggtctcttaaggcagggtgccatactaagcagcttgcctccaggaattgctctgaagagaaatccccacaaacctccatcctaaaggaaggtaacagggacacaagcttggatttccgacctgtagtgtctccagcaaatggggttgaaggagtccgagtggatcaggatgatgatcaagatagctcttccctgaagctttctcagaacattgctgtacagactgactttaagacagctgattcagaggtaaacacagatcaagatattgaaaagaatttggataaaatgatgacagagagaaccctgttgaaagagcgttaccaggaggtcctggacaaacagaggcaagtggagaatcagctccaagtgcaattaaagcagcttcagcaaaggagagaagaggaaatgaagaatcaccaggagatattaaaggctattcaggatgtgacaataaagcgggaagaaacaaagaagaagatagagaaagagaagaaggagtttttgcagaaggagcaggatctgaaagctgaaattgagaagctttgtgagaagggcagaagagaggtgtgggaaatggaactggatagactcaagaatcaggatggcgaaataaataggaacattatggaagagactgaacgggcctggaaggcagagatcttatcactagagagccggaaagagttactggtactgaaactagaagaagcagaaaaagaggcagaattgcaccttacttacctcaagtcaactcccccaacactggagacagttcgttccaaacaggagtgggagacgagactgaatggagttcggataatgaaaaagaatgttcgtgaccaatttaatagtcatatccagttagtgaggaacggagccaagctgagcagccttcctcaaatccctactcccactttacctccacccccatcagagacagacttcatgcttcaggtgtttcaacccagtccctctctggctcctcggatgcccttctccattgggcaggtcacaatgcccatggttatgcccagtgcagatccccgctccttgtctttcccaatcctgaaccctgccctttcccagcccagccagccttcctcaccccttcctggctcccatggcagaaatagccctggcttgggttcccttgtcagcccccacggtccacacatgccccctgccgcctccatcccacctcccccaggcttgggcggtgttaaggcttctgctgaaactccccggccccaaccagtagacaaactggagaagatcctggagaagctgctgacccggttcccacagtgcaataaggcccagatgaccaacattcttcagcagatcaagacagcacgtaccaccatggcaggcctgaccatggaggaacttatccagttggttgctgcacgactggcagaacatgagcgggtggcagcaagtactcagccacttggtcgcatccgggccttgttccctgctccactggcccaaatcagtaccccaatgttcttgccttctgcccaagtttcatatcctggaaggtcttcacatgctccagccacctgtaagctatgtctaatgtgccagaaactcgtccagcccagtgagctgcatccaatggcgtgtacccatgtattgcacaaggagtgtatcaaattctgggcccagaccaacacaaatgacacttgtcccttttgtccaactcttaaatgacggacctgactggggaggaagaagaagagaaactgatgtgaacaggaagcgcgggttcaagatttctaaaactctatatttatacagtgacatatactcatgccatgtacatttttattatataggtaatgtgtgtatagaaagtctgtattccaatgttcgtaaatgaaactatgtatattatgcagaaacagtctgttccccctcatcttgcaattcctttgggggatgcagattgtagggaagatgatgtttagtttggccttgaaattatgatatccctgcccagggctgttttcaaatacaatataaaaaccacctaggaacctgctgttgctctaaggccattctgctttggtttggctcagcctctagtccatttccttaaggctcatgtatgcagatttaaagcctggtgctcacccactgtccaaccagatgccttgcttaccgaaagcctccagaagcctcagtattgttttagccactctactccaaatggataaaatgagactctgattgaggaaaaaaaagtaa

SEQ ID NO: 177407 - DNA, 2846 bp, Homo sapiens
  Payload ID: 14814
  Gene Symbol: RNF214
  Gene Name: ring finger protein 214
  ENST ID: ENST00000530849
  CDS Start-End: 11-1552
acagagcataatggcagcgtctgaggttgctggtgttgtggccaatgcccccagtcctccggaatcttctagtttatgtgcttccaaatcagacgaaggtctcccagatggtctaagcaccaaagactctgcacagaagcagaagaactcgcctctgttgagtactgactttaagacagctgattcagaggtaaacacagatcaagatattgaaaagaatttggataaaatgatgacagagagaaccctgttgaaagagcgttaccaggaggtcctggacaaacagaggcaagtggagaatcagctccaagtgcaattaaagcagcttcagcaaaggagagaagaggaaatgaagaatcaccaggagatattaaaggctattcaggatgtgacaataaagcgggaagaaacaaagaagaagatagagaaagagaagaaggagtttttgcagaaggagcaggatctgaaagctgaaattgagaagctttgtgagaagggcagaagagaggtgtgggaaatggaactggatagactcaagaatcaggatggcgaaataaataggaacattatggaagagactgaacgggcctggaaggcagagatcttatcactagagagccggaaagagttactggtactgaaactagaagaagcagaaaaagaggcagaattgcaccttacttacctcaagtcaactcccccaacactggagacagttcgttccaaacaggagtgggagacgagactgaatggagttcggataatgaaaaagaatgttcgtgaccaatttaatagtcatatccagttagtgaggaacggagccaagctgagcagccttcctcaaatccctactcccactttacctccacccccatcagagacagacttcatgcttcaggtgtttcaacccagtccctctctggctcctcggatgcccttctccattgggcaggtcacaatgcccatggttatgcccagtgcagatccccgctccttgtctttcccaatcctgaaccctgccctttcccagcccagccagccttcctcaccccttcctggctcccatggcagaaatagccctggcttgggttcccttgtcagcccccacggtccacacatgccccctgccgcctccatcccacctcccccaggcttgggcggtgttaaggcttctgctgaaactccccggccccaaccagtagacaaactggagaagatcctggagaagctgctgacccggttcccacagtgcaataaggcccagatgaccaacattcttcagcagatcaagacagcacgtaccaccatggcaggcctgaccatggaggaacttatccagttggttgctgcacgactggcagaacatgagcgggtggcagcaagtactcaggctccagccacctgtaagctatgtctaatgtgccagaaactcgtccagcccagtgagctgcatccaatggcgtgtacccatgtattgcacaaggagtgtatcaaattctgggcccagaccaacacaaatgacacttgtcccttttgtccaactcttaaatgacggacctgactggggaggaagaagaagagaaactgatgtgaacaggaagcgcgggttcaagatttctaaaactctatatttatacagtgacatatactcatgccatgtacatttttattatataggtaatgtgtgtatagaaagtctgtattccaatgttcgtaaatgaaactatgtatattatgcagaaacagtctgttccccctcatcttgcaattcctttgggggatgcagattgtagggaagatgatgtttagtttggccttgaaattatgatatccctgcccagggctgttttcaaatacaatataaaaaccacctaggaacctgctgttgctctaaggccattctgctttggtttggctcagcctctagtccatttccttaaggctcatgtatgcagatttaaagcctggtgctcacccactgtccaaccagatgccttgcttaccgaaagcctccagaagcctcagtattgttttagccactctactccaaatggataaaatgagactctgattgaggaaaaaaaagtaaccctagtagtttgacttcttattgaatattttactgtgttaacgctcattatttatacagacattaggtttacagaatattctgttttacatcaccaaaattcacagtccgagaataacaacataaccaggtcccaattcctccatgtaccccacaagcttctgtccaccctattttctggacagaaattagcacaacccacaggtttttcctgggccaagtcttcctttgctgccactgtcttggcttctaatcaagctctgacaggccaacattgtgaagtcctcaccctttcccattcacttctggtctcctagtctagctaatccccctcccccagaaggttaaggcagttggttcacaaccaagttgtttggtgaccttgggtgagctccagacaggcactggggtgaggagatgtctgtgcaaaattacttgtagaatgatcttgggatgctggattttaatttttgaagcaagaaagttagggggggacatatttcctgtcctgggaaaaatggagaccaaagtgatattaagaaagtagtttggatttcaaatttataaatcacttgctctgtgggtagctatcaggaactagatcattttccacctctgcttattgtacttcttaattttaggttttatacctgggaaagctgtgactctattagagctttgaatcttttcctatccttttatctttactcctacagggaatggcctcagctcccttctcttttagaattaaacaagt

SEQ ID NO: 177408 - DNA, 548 bp, Homo sapiens
  Payload ID: 14814
  Gene Symbol: RNF214
  Gene Name: ring finger protein 214
  ENST ID: ENST00000534428
  CDS Start-End: 109-548
ctccgctcgtgccgccggaagtgggaggtgccgcgcgcgggccggcgctcgacccctccccccgtggctcggccgccccctccccccgctccgcccgctcagagcataatggcagcgtctgaggttgctggtgttgtggccaatgcccccagtcctccggaatcttctagtttatgtgcttccaaatcagacgaaggtctcccagatggtctaagcaccaaagactctgcacagaagcagaagaactcgcctctgttgagtgtaagtagccaaacaataaccaaggagaataacagaaatgtccatttggagcactcagagcagaatcctggttcatcagcaggtgacacctcagcagcgcaccaggtggttttaggagaaaacttgatagccacagccctttgtctttctggcagtgggtctcagtctgatttgaaggatgtggccagcacagcaggagaggagggggacacaagccttcgggagagcctccatccagtcactcggtctcttaaggcagggtgccatactaagcagcttgcctccag

SEQ ID NO: 177409 - DNA, 1706 bp, Homo sapiens
  Payload ID: 14814
  Gene Symbol: RNF214
  Gene Name: ring finger protein 214
  Uniprot ID: Q8ND24
  ENST ID: ENST00000531287
  CDS Start-End: 47-1693
gtccctcccccactttcctcccgggggcgcggcgcgggagagcataatggcagcgtctgaggttgctggtgttgtggccaatgcccccagtcctccggaatcttctagtttatgtgcttccaaatcagacgaaggtctcccagatggtctaagcaccaaagactctgcacagaagcagaagaactcgcctctgttgagtactgactttaagacagctgattcagaggtaaacacagatcaagatattgaaaagaatttggataaaatgatgacagagagaaccctgttgaaagagcgttaccaggaggtcctggacaaacagaggcaagtggagaatcagctccaagtgcaattaaagcagcttcagcaaaggagagaagaggaaatgaagaatcaccaggagatattaaaggctattcaggatgtgacaataaagcgggaagaaacaaagaagaagatagagaaagagaagaaggagtttttgcagaaggagcaggatctgaaagctgaaattgagaagctttgtgagaagggcagaagagaggtgtgggaaatggaactggatagactcaagaatcaggatggcgaaataaataggaacattatggaagagactgaacgggcctggaaggcagagatcttatcactagagagccggaaagagttactggtactgaaactagaagaagcagaaaaagaggcagaattgcaccttacttacctcaagtcaactcccccaacactggagacagttcgttccaaacaggagtgggagacgagactgaatggagttcggataatgaaaaagaatgttcgtgaccaatttaatagtcatatccagttagtgaggaacggagccaagctgagcagccttcctcaaatccctactcccactttacctccacccccatcagagacagacttcatgcttcaggtgtttcaacccagtccctctctggctcctcggatgcccttctccattgggcaggtcacaatgcccatggttatgcccagtgcagatccccgctccttgtctttcccaatcctgaaccctgccctttcccagcccagccagccttcctcaccccttcctggctcccatggcagaaatagccctggcttgggttcccttgtcagcccccacggtccacacatgccccctgccgcctccatcccacctcccccaggcttgggcggtgttaaggcttctgctgaaactccccggccccaaccagtagacaaactggagaagatcctggagaagctgctgacccggttcccacagtgcaataaggcccagatgaccaacattcttcagcagatcaagacagcacgtaccaccatggcaggcctgaccatggaggaacttatccagttggttgctgcacgactggcagaacatgagcgggtggcagcaagtactcagccacttggtcgcatccgggccttgttccctgctccactggcccaaatcagtaccccaatgttcttgccttctgcccaagtttcatatcctggaaggtcttcacatgctccagccacctgtaagctatgtctaatgtgccagaaactcgtccagcccagtgagctgcatccaatggcgtgtacccatgtattgcacaaggagtgtatcaaattctgggcccagaccaacacaaatgacacttgtcccttttgtccaactcttaaatgacggacctgactgg

SEQ ID NO: 177410 - DNA, 1651 bp, Homo sapiens
  Payload ID: 14815
  Gene Symbol: RNF215
  Gene Name: ring finger protein 215
  ENST ID: ENST00000215798
  CDS Start-End: 1-1030
cgtgagactgccgcgccaggacgctctggtcctggagggcgtcaggatcggctccgaagccgacccggcgcccctgctgggcggtcgtctgctgctgatggacatcgtggatgccgagcaggaggcaccagtggaaggctggattgcagtggcatacgtgggcaaggagcaggcggcccagttccaccaggagaataagggcagtggcccgcaggcctatcccaaggccctggtccagcagatgcggcgggccctcttcctgggtgcctctgccctgcttcttctcatcctgaaccacaacgtggtccgagagctggacatatcccagcttctgctcaggccagtgatcgtcctccattattcctccaatgtcaccaagctgttggatgcattgctgcagaggacccaggccacggctgagatcaccagcggagagtccctgtctgccaatatcgagtggaagttgaccttgtggaccacctgtggcctctccaaggatggctatggaggatggcaggacttggtctgccttggaggcagtcgtgcccaggagcagaaacccctgcagcagctgtggaacgccatcctgctggtggccatgctcctgtgcacaggcctcgtggtccaggcccagcggcaggcgtcgcggcagagccagcgggagctcggaggccaggtggacctgtttaagcgccgcgtggtgcggagactggcatccctcaagacacggcgctgccggctgagcagggcagcgcagggcctcccagatccgggtgctgagacctgtgcggtgtgcctggactacttctgcaacaaacagtggctccgggtgctgccctgtaagcacgagtttcaccgagactgtgtggacccctggctgatgctccagcagacctgcccactgtgcaaattcaacgtcctgggtgagcaccaggggtggggtccctcggcctactctgcctgctcctcacctgatgcctctctccctgttcttcttcccctcccctgcagggaaccgctactccgatgattagctgcccagctggactctgcacatggggatggacccttcctgcctgcaccccggtcctcagcctgggctcccaggacaggacaggatgggacagcaggatagacaggacagcaagcccagtgggtgggaggaaggatgagggccccaccatgtccacactgggaaggagggccccacagcttcagactgaggatctagggctgggacctgtcagtcaaggaagagaggtcactttgggaccttctctgcaatcctgtgacgtgagtctgccctccttacaggcagctcccaggtcaataaggaaagagaatatggggccagtgtagctgtcgccagggttctgggagctccctgtggcctgtctgggaattcctgggggctgagactacagtggccaggttttgtgcttatttattggggggtgggttgagggaagagctatctggccttggggtaccctggcctgaccgtctttcaggatacttcttgtcaaggctgtctgcctgttgcctttggtcctcaagcactgggagccatgggtcccactgcctgtccagcctggctcccttcctgggcctggctaggaccagaggtcttagaaaccgtcctgttctggaa

SEQ ID NO: 177411 - DNA, 1992 bp, Homo sapiens
  Payload ID: 14815
  Gene Symbol: RNF215
  Gene Name: ring finger protein 215
  Uniprot ID: Q9Y6U7
  ENST ID: ENST00000382363
  CDS Start-End: 76-1209
ggcctcgctccctccgatcccccccgcgcccgggacccctggccccactgttgggccagctcgccgggtccggccatgggccccgccgctcgccccgcgctgagatcgccgccgccgcctccgccgccgcctccgtctccgctgctgctgctgctgcccctgctgccgctgtggctgggcctggcggggcccggggccgcggcggacggcagcgagccggcggccggggcggggcggggcggagcccgcgccgtgcgggtggacgtgagactgccgcgccaggacgctctggtcctggagggcgtcaggatcggctccgaagccgacccggcgcccctgctgggcggtcgtctgctgctgatggacatcgtggatgccgagcaggaggcaccagtggaaggctggattgcagtggcatacgtgggcaaggagcaggcggcccagttccaccaggagaataagggcagtggcccgcaggcctatcccaaggccctggtccagcagatgcggcgggccctcttcctgggtgcctctgccctgcttcttctcatcctgaaccacaacgtggtccgagagctggacatatcccagcttctgctcaggccagtgatcgtcctccattattcctccaatgtcaccaagctgttggatgcattgctgcagaggacccaggccacggctgagatcaccagcggagagtccctgtctgccaatatcgagtggaagttgaccttgtggaccacctgtggcctctccaaggatggctatggaggatggcaggacttggtctgccttggaggcagtcgtgcccaggagcagaaacccctgcagcagctgtggaacgccatcctgctggtggccatgctcctgtgcacaggcctcgtggtccaggcccagcggcaggcgtcgcggcagagccagcgggagctcggaggccaggtggacctgtttaagcgccgcgtggtgcggagactggcatccctcaagacacggcgctgccggctgagcagggcagcgcagggcctcccagatccgggtgctgagacctgtgcggtgtgcctggactacttctgcaacaaacagtggctccgggtgctgccctgtaagcacgagtttcaccgagactgtgtggacccctggctgatgctccagcagacctgcccactgtgcaaattcaacgtcctggggaaccgctactccgatgattagctgcccagctggactctgcacatggggatggacccttcctgcctgcaccccggtcctcagcctgggctcccaggacaggacaggatgggacagcaggatagacaggacagcaagcccagtgggtgggaggaaggatgagggccccaccatgtccacactgggaaggagggccccacagcttcagactgaggatctagggctgggacctgtcagtcaaggaagagaggtcactttgggaccttctctgcaatcctgtgacgtgagtctgccctccttacaggcagctcccaggtcaataaggaaagagaatatggggccagtgtagctgtcgccagggttctgggagctccctgtggcctgtctgggaattcctgggggctgagactacagtggccaggttttgtgcttatttattggggggtgggttgagggaagagctatctggccttggggtaccctggcctgaccgtctttcaggatacttcttgtcaaggctgtctgcctgttgcctttggtcctcaagcactgggagccatgggtcccactgcctgtccagcctggctcccttcctgggcctggctaggaccagaggtcttagaaaccgtcctgttctggaatccttggctgcggctttgtgttgctgaccgggatactcgaagccacaggatcaatgtggtgcctcatccaggggcatccttttttttttttttttttttttttaaagagttggagtagggaaggtttaatagtaaaataaacgtggctatattttaacataagatg

SEQ ID NO: 177412 - DNA, 361 bp, Homo sapiens
  Payload ID: 14815
  Gene Symbol: RNF215
  Gene Name: ring finger protein 215
  ENST ID: ENST00000421022
  CDS Start-End: 1-105
gactgtgtggacccctggctgatgctccagcagacctgcccactgtgcaaattcaacgtcctggatggagggagccccatggcaaggaaggtggacggcctctaggagccgtgagaggacctggcttacagccagccagcgaggacatggggacctcagtcccacagccgcaaggatcggaattctgccaacaagtggagcttggaagccaattcttccccagaaccggcagaaaggaacgcaacctggtagatgcctcaatttcagccctctgggacccggagcaaaaaaacccagccacacagaacctggacttctgactgccagaactgggagctaatgaatacatggcacggagttg

SEQ ID NO: 177413 - DNA, 535 bp, Homo sapiens
  Payload ID: 14815
  Gene Symbol: RNF215
  Gene Name: ring finger protein 215
  ENST ID: ENST00000431544
  CDS Start-End: 237-535
acacagtgaggaaatgacagagctggagtttccgtctgttccacattgctgcatttgttctgcctgacttggaccctggaaaacctggccctcttcaatttctgacaaaagagacggagtttcactcttgtcgcccaggctggattccaatggcgcgatctcggctcgccgcaacctccgcctcccgggttcaagcgattctcctgcctcagcctcctgagtagctggaattacagatggacatcgtggatgccgagcaggaggcaccagtggaaggctggattgcagtggcatacgtgggcaaggagcaggcggcccagttccaccaggagaataagggcagtggcccgcaggcctatcccaaggccctggtccagcagatgcggcgggccctcttcctgggtgcctctgccctgcttcttctcatcctgaaccacaacgtggtccgagagctggacatatcccagcttctgctcaggccagtgatcgtcctccattattcctccaatgtcaccaagctgttggatgcattgct

SEQ ID NO: 177414 - DNA, 468 bp, Homo sapiens
  Payload ID: 14815
  Gene Symbol: RNF215
  Gene Name: ring finger protein 215
  ENST ID: ENST00000631046
  CDS Start-End: 1-93
caccgagactgtgtggacccctggctgatgctccagcagacctgcccactgtgcaaattcaacgtcctggggaaccgctactccgatgattagctgcccagctggactctgcacatggggatggacccttcctgcctgcaccccgatggagggagccccatggcaaggaaggtggacggcctctaggagccgtgagaggacctggcttacagccagccagcgaggacatggggacctcagtcccacagccgcaaggatcggaattctgccaacaagtggagcttggaagccaattcttccccagaaccggcagaaaggaacgcaacctggtagatgcctcaatttcagccctctgggacccggagcaaaaaaacccagccacacagaacctggacttctgactgccagaactgggagctaatgaatacatggcacggagttggtgggcgcctgagagagctactcagc

SEQ ID NO: 177415 - DNA, 555 bp, Homo sapiens
  Payload ID: 14815
  Gene Symbol: RNF215
  Gene Name: ring finger protein 215
  ENST ID: ENST00000619645
  CDS Start-End: 85-492
gagctgtccaaggtcacacggccagctcaagcttgggaacggcaggaattccgccaggctgctcttcccctgcttttgtgatggatgcttccttctggctccaggagcccgggagaattgctgccccttctggttcagtttcctgctatgggaaatagctatggggctatgacctgcctcacaaggtggttgagaaggggacagaagggcctggatgatgtctcacgagcagctaactgcacatcttcctgccagctctgcaaaaggatttgccctagtgctttaggggtctggaggggctgggagaacccaggtcacctgatatccaatcctgtgccaagatgggtacctagcactcctatgccatggggtccaggacagtgggcagctggaggctgtgtccttgggactagtcccatggtgtggtttggggacccattccaagaaccaagaagggggacacacagaagtcgagcaagaattagcatgtgacgtagtgaagagcacaggctgtggggacaaccagacctgtgtctgcgtttggctgttgtgact

SEQ ID NO: 177416 - DNA, 534 bp, Homo sapiens
  Payload ID: 14815
  Gene Symbol: RNF215
  Gene Name: ring finger protein 215
  ENST ID: ENST00000630264
  CDS Start-End: 1-93
caccgagactgtgtggacccctggctgatgctccagcagacctgcccactgtgcaaattcaacgtcctggggaaccgctactccgatgattagctgcccagctggactctgcacatggggatggacccttcctgcctgcaccccggtcctcagcctgggctcccaggacaggacaggatgggacagcaggatagacaggacagcaagcccaatggagggagccccatggcaaggaaggtggacggcctctaggagccgtgagaggacctggcttacagccagccagcgaggacatggggacctcagtcccacagccgcaaggatcggaattctgccaacaagtggagcttggaagccaattcttccccagaaccggcagaaaggaacgcaacctggtagatgcctcaatttcagccctctgggacccggagcaaaaaaacccagccacacagaacctggacttctgactgccagaactgggagctaatgaatacatggcacggagttggtgggcgcctgagagagctactcagc

SEQ ID NO: 177417 - DNA, 8141 bp, Homo sapiens
  Payload ID: 14815
  Gene Symbol: RNF215
  Gene Name: ring finger protein 215
  ENST ID: ENST00000332468
  CDS Start-End: 1-177
caccgagactgtgtggacccctggctgatgctccagcagacctgcccactgtgcaaattcaacgtcctgggtgagcaccaggggtggggtccctcggcctactctgcctgctcctcacctgatgcctctctccctgttcttcttcccctcccctgcagggaaccgctactccgatgattagctgcccagctggactctgcacatggggatggacccttcctgcctgcaccccggtcctcagcctgggctcccaggacaggacaggatgggacagcaggatagacaggacagcaagcccaatggagggagccccatggcaaggaaggtggacggcctctaggagccgtgagaggacctggcttacagccagccagcgaggacatggggacctcagtcccacagccgcaaggatcggaattctgccaacaagtggagcttggaagccaattcttccccagaaccggcagaaaggaacgcaacctggtagatgcctcaatttcagccctctgggacccggagcaaaaaaacccagccacacagaacctggacttctgactgccagaactgggagctaatgaatacatggcacggagttggtgggcgcctgagagagctactcagctgtgaggtccttcccctggacttgagcacaggccttctggctcagggtgctgagggatggtgctcccctgtgaggggggtgcccggggcaccccagcctccctcaggaactcccaggcccctcagaagcaggaagttgggctgaccaaagctgtggtagctcagctatatacatggcccctcttgacccttctctgtgaactgaggtgctctacctgacggcctcttcaccaagggaaaatgcttcaggcatttgggagcgtgcgccctgagaaggcctcagcaagtttttggagattgtccttcacagaaacggggtcccattatattgtccaggctggtctcaaactcctgggctcgagtgatctgcccgcctcagcctctcaaattgttgggattacaggcatgagccgccgcacccggcctgacgaggcttcttgctgcacttaaaggaatgacagctatagagggcatatgggactggaaggcatcggatccataacatcctcacgccttctggaaatgtgaaaaatgtttcacaaaagcacagcctaaggcctcatgtgatgaggtgggctctccacaagttcccggggcagagtctgaagacctgctgctggataggggcttcctcctggtccccaagggcccgccctctcaggcccaccttgaggccaccctgctgggccacttcccggattttggacagcattgattggagccgcccgttctcctcctgtaggacccggatgcggatgtcgttggactgcacttgcctctccatgtgatctgtgacgttgccagagtctgtgggacatgttatctgggattccacgctgctggatctgcctcctgtgcccaatgggacaggaccttagaagggaggcacaccagcttgggcaggtggcctggaggcacaaaggagctgtgtagtgcaccaggcctcctagctcatcttccttctcccgaggccttattcccccttccctgtcccccaacctgcagggaagatgaccatagtattataaaatctgagagctgggtgggacctagagctctcaaaagacttagcaaggccgggcgcggtggctcacgcctgtaatcccagcactttgggaggcccaggtcaggggatcattaagtcaagagatcaagaccatcctggccaacatggtgaaaccccgtctctactaaaaatagaaaaatgagctgggtgtggtggcgggcccccgtagtcccagctactcaggaggctgaggcaggagaatcacttgaacccaggaggtggaggttgcagtgagcagagattgtgccactgcactccagcctggcaacagagtgagactctgtctcaaaaaaaaaaaaaaaaaaaaaaagacttagcaaataagcatgagaggagagtgaatctctgacaaggcccccccgttttggacaggctacagccaaagtgagctgtccaaggtcacacggccagctcaagcttgggaacggcaggaattccgccaggctgctcttcccctgcttttgtgatggatgcttccttctggctccaggagcccgggagaattgctgccccttctggttcagtttcctgctatgggaaatagctatggggctatgacctgcctcacaaggtggttgagaaggggacagaagggcctggatgatgtctcacgagcagctaactgcacatcttcctgccagctctgcaaaaggatttgccctagtgctttaggggtctggaggggctgggagaacccaggtcacctgatatccaatcctgtgccaagatgggtacctagcactcctatgccatggggtccaggacagtgggcagctggaggctgtgtccttgggactagtcccatggtgtggtttggggacccattccaagaaccaagaagggggacacacagaagtcgagcaagaattagcatgtgacgtagtgaagagcacaggctgtggggacaaccagacctgtgtctgcgtttggctgttgtgactagaggcagtcacatcactgttgggctttcacgtccctgtctatgcagagtggatgacgcatgaagcacttgcgtgctgtggtgggtccacaggggctgcgctgctggccgcctggctttaacacccttgctgcaggctagggagctgcagtccccagtgtcctgcccacacgagccctcagctgctggccctgagccccagcatgcccttggcaccatccccagtcccctaccatggatctgggtctcggtgggcctgtgcaggtctgggaaggccaccagcagccgctcccgctccttcagctcctccagctcccgttctagctccaggatggttagccgcaggtccgtagtcgcctgctccaggccttgcttctccctctgcaggctctgcagcagctcctgggacagacggaggctcaggcctggctcctgagtgagctacatggtactcagcgccctggggcaccgtccctacccaagaaaagacatgggacaggcctgcaggcactcagttggccggagacttctctggcaaaaaggaagacccccaccctcacctgctgggccctgagctggcattgcccctgctcccgctcgctctgcagctgctcctccacgcgggcccgctgggcctcagcctcgtccaggctgccccgcagctcctcacgttcctggtccaggctgtccagctgctttagcagggctcgctgcttggcctgcagagactaagcaggaacggacaagcagggaggctgtgagacccacagggctaggcccagccatgtggaactaaggaggctacagcatctactacccctcggctgctacccccctggggtgtgtgtctgtgtctagggaatgctggtcacatgcgtggaagggtaggggtcgggggaagctggcagcaggcagatgcacaccggacctggtcaaggccaggatcccagcttgaagaccccggcccttggaacgcagatggctggctctgggggtctcacccccacttccttccagtcatacacagaccccacttggagaggaattctgggaactaagtttttcttctcctcgggtctccagtgtcacatcatcccatgttgctgaagcccacatttcctaacacccactgaatggaaagcaggaagaactaacgctggactgctcggagtcctggctccacctctcactagctgtgtggccttgggcaacttccttaacctcactcaataaggctgtttcctcattcgtaaaatgggggtgacaagagtatctacctcctgttgctgtagcgaggagtaagcatcagaggctgcggcgcctgaagcctgggtcacagcagacacctgatacatggcggctgtgacagtttgcaaggcacagagaacagcacccacttggggtagaaaggcttcccctaccctgggcccatgtctgaccctggggactctcaactgaactcctggctccttgctgagcttttgagggttagacccagccaagacagcccccagacctgcccctttcactaggcaacaggtcacctactccctcaaccacacttctgaggactcctgtgaggccccattgcccagagcacagctatgccccgggccctggctcaccctctgcctgccctgtccttcccctggctgatggactaattgcctgtcatgggcgtccagctcaaaggccacctcctcctagaagccattctggattcccatggcagatgtggccatccctccctgcaccccttagccatctggcaggagagtgtggcacacctgctcatctttgcctgtggggcgctcttccagagtgaggcctcactgggcagtatcagtccctgggtcactgttcccccagtgcctggttcagggtagactctctgtaaaggtgagtcaacccccacacctggaggcatctcagggagcagatgcccaatatagatgatcccccattccctgacagtggagccctctttccctgcagcctacattgcagatgcccaggctagcgagggccctggcctcacctcctggtggcggaccatgctgtcgacacgggccttctccttatccagctccgtgctggcccagcagacctgctggccagcgccctccagccgacccaccaacagctgcacctgcgcctccaactgctgcacctgctcctccagctgctgcacctgcctctccgctgccgccctgcgctcaccttcctcctgcagctgctgggcctttgcctctgcagcattaagtggacatgggatggggtagggcaggggagcgctgtactacctcagacctaggacgggagctcacatcccatctctgggcctcagagtcctcagccacaaaatggggctctagaccccacctgaggtgggtttggaaaatagaaggcgctttctcggtaggaggtggcaacccagtttggtcatcgccaatagtgtggttggtcaggcccaccctcctgtggctggttcccttcaactttgccctggatgctcaggggacagagatggacgatgctcatccagccacacccctggcttgagatgtggcatgggggcctatgatggggctccttacccacagcctgtgtggactcccgctgctgtttcagttctctctccagggtggccatctttgtctttaggtcacttgtttctatggcagccaagagagaggcccttcagagggtcccatggacctggccggcggccttcatgcccagtgtgccccgtggagtggaggcagcccatcgcctgcagaggggccgcctgcggccatgggaggagctctagggaggctggtggaagcggctgggcccttacccaccctgcttctcatgggctggctgccatgtgtctacacctctctgggccttggtgtcgtccatggaggcaactgtgatgaggctcagaaagggcaaatccctcaggcctcccatcagtgggcactggccatcttctggtgccaggaactttgtctctaatggcttttgccacaaccagagaggctgctctgcttggctggaagtgccaggggaataactctctggaagtagccctcaatgactgacagtgcaagtggatacatacctcggttccctcactgaccgatggacgagtctgggcaagcgtcctagcccagctcctggtggccccagtgggactgagatcacagtgtcaccaccggatgaacacccccttccttgctgccctcccttccctgcctcttgcctgtgtcccagcctgggttcttccacacaaaccacttgccctggaagccctgtctcacaaacatccatgcaaaggctgtggcagagcccctgggcaccaggcgtctggcctctggggcacagacctgtgagcagctgctgtttgtcgtgctcccactcagacaggcactgctcatcctcctccgcctgtcgccgccgtgccccctgctcctgtttcagcgcctgctccagcttgcccgcctgcttcctcaggccatccttctgcccttcagcctcctccagctgggccctgagggcctccacatgcttactgaggcgcgtcaggtctttcctctgctctgctgcccagcggcccacggtggcagccggcagtggcctgagccccatgctgtcctgcaccagttgctggaactggcctaaggacgagggcaggttctggctctgacacaggctgatgaccaccttgcccaccttctgcaggcttccctggacgctggcgcatgcgtcacagggcaccagggccgtctcaatggtctgggagtggacactcctggtgttcttgaaggtcgtggctgggaactgcagggaggctctgacagggatgctctctggctcttggcaggtctggggcaagcctagcactggggaggagggcttgattaacttggtagtcagatattcagggctcctggctggctcgcccttggtggtgggcttggaggtgggagtctccctttggtttgcccctttctgtgttcagaaaaagacaagggaaagcaggtgagggagagagtagagagggaggtgactggttccctgggggatgttctgtgacagtgtgacagccttgcctgacactcagaccctcaaatgttctctgacaccgacgtgaataagagagaactttctccctctgttactctgactcagcttactacagccaggtctcctctctgcggcccgcaccccaagctccaggcttgatctgattgtatgcatggtgttgggaaggtgatggtgacggtcacagctgctggttactgggctcttgcttactggacctgcctgctcttgtgtcaccataaccactctcagttttagtttccttcccatcatgggaacagtggttcttccccagtgggtggttgtgtggattacgggatagcccataacaaacaggggtcacatgacctccgttgtatagatgaagaaactgcggttcaaagtaggcaagatttttccaaagtcccacagggatgtcagagccagggagcaaggcatgatccccaaggcctgcgttcttaaccgccacactgtgtggggcttgattgggagggcggtgggagccagtaaaggctgtggtgcacatagtggtaggctaggaagccagagctggggcgaggtgtgaaggccaccacagtggggagatagaggctgaggctgacccacctgagacagaggctgggacccacctgggggagtggctgctggtggagcgtgcccagcctcagcaggctgtcccagaagcgccgcaccgtgagccccacggacatgcagggccccgcagcctgtgcagggggcatcatctgctctgagccaaggttctccaagtagctcatacagctttgaagcagcagcaggagcctgcgggcagagatgctaggttgctggggcccaggctggtgctaacataccctcagaccatacaaccgcagctctggctctggggaactggcccaggcatcaagagcttggagagtctcagaatatgctctgctgggccagcttcaaacctaacccaggggctacttcctcagggaagccctccctggccacagcctcagcttgggagcctcttctgtgtctcctgggtggcacttctgcctggctcttctccactggaccagggagctctgtgaagccaggcctggccttgcctcagttgtatcctgagtccttgaaaagttctgggtgaatggctgccttatatccagtggcccggagcctccacttgatagatgacagagctgagacccagagaggggaagagcttgcccacagacacacattgatagggcagagcagggagtgtgcacagtctcctgaggctagtcaggggcttctgcagggtgagctgcttctgtgacagtggagacctgtgtcaagacagctaggtctctgtcctaacctccaagtttaaaactacagtcaggcatgaattgtaagaaaaaggagtattataataaaaagctaagtttgcatttg

SEQ ID NO: 177418 - DNA, 3104 bp, Homo sapiens
  Payload ID: 14816
  Gene Symbol: RNF216
  Gene Name: ring finger protein 216
  ENST ID: ENST00000389900
  CDS Start-End: 70-1050
ttcttttgaaacagatggtcaccatgtttagatattagcagtcccatatatgcatgtctgcatttgaaaatggaagagggaaacaacaatgaagaggtaattcacttgaacaactttcactgccatcggggacaagagtggatcaatctccgagatgggcccatcaccatatctgactcctcagatgaggaaaggattccaatgctggtcaccccagctcctcagcagcatgaagaagaggacctggatgatgatgtcatcctgacagaagatgattctgaggatgactacggtgaatttctggatcttgggcctcctggaatctctgaattcactaagccaagtggccaaacagaaagagaacccaagcctggaccgagtcataaccaagcagcaaatgacattgtcaaccccagatcagagcagaaagtcatcatcttggaagaaggtagccttctttacacagaaagcgatcctttggaaactcagaaccagtcatccgaagactcagagacagagctgttatcaaatctaggagagtcagctgctctagcagatgatcaggccatcgaagaagactgctggttagatcatccttacttccagtctctgaaccaacagccccgtgaaataacaaaccaggtcgttcctcaggaacggcagcctgaagcagaactgggccgcttgttgtttcagcatgaattcccagggcccgcttttccaaggccggaaccccagcaaggtgggatttcaggcccctcttctcctcagcctgcccatcctctaggagagtttgaagaccagcagttagcaagtgatgatgaagagccaggtccagcctttccaatgcaagaatctcaagagcccaatttggaaaacatttgggggcaagaagctgcagaggtagatcaagagctcgttgaactactagtgaaagaaacgagatgctcaatatttgttgaagcaatgaagaatggatctgtaaaatggggacagagaaccagatctctcaagacctttctagacctcatcttctatgtagacagatgaatctgggaactagtgttgaatttgaagacacacacagacctgcttcacagcccttttctagtctttagtcattttattatactttttgccatctgtcttgtattgccatttgaaaccattctagtgaatgaaatataaattatgttcttatttgtttctaggaagcaagatttccagatgtagcaaatgggtttattgaggaaataattcattttaagaattattatgatctgaatgtactttgtaattttcttctggaaaacccagattatccaaagagagaagacagaatcattataaatcccagtagcagtctgctggccagccaagatgagacaaagttgcctaaaatagacttttttgactattctaaattgacccctcttgaccagcgctgcttcatccaagctgctgacctcctcatggccgacttcaaagtgctcagtagtcaggacatcaagtgggccctgcacgagctcaaaggacactatgcaatcacccgaaaggccttgtctgatgccattaaaaaatggcaggagctgtcaccagaaaccagtggaaaaaggaagaagagaaaacaaatgaaccagtattcttacattgatttcaagtttgaacaaggtgacataaaaatagaaaagaggatgttctttcttgaaaataagcgacgacattgtaggtcctatgaccgacgtgctctccttccagctgtgcaacaagagcaggagttctatgagcagaaaatcaaagagatggcagagcatgaagactttttgcttgccctacagatgaatgaagaacagtatcaaaaggatggccagctgattgagtgtcgctgctgctatggggaatttccattcgaggagctgacgcagtgcgcagatgctcacttgttctgcaaagagtgtctcatcagatatgcccaagaggcagtctttggatctggaaagttggagctcagctgcatggaaggcagctgcacgtgttcgttcccaaccagtgagctggagaaggtgctcccccagaccatcctgtataagtactatgagcgaaaagccgaggaggaggttgcggcagcctacgccgacgagcttgtcaggtgcccgtcctgtagctttccggctctgttggacagtgatgtgaagaggttcagctgtcctaatcctcactgccgaaaggaaacctgtaggaagtgtcagggactctggaaagaacataatggcctcacctgtgaagagctggctgaaaaagacgacatcaagtaccgtacctctattgaagaaaaaatgactgctgcccgcattagaaaatgccacaagtgtgggactggcctcatcaaatctgaaggctgcaaccgcatgtcttgccgctgtggtgcccagatgtgctacctctgtcgagtttctattaatggatatgaccatttctgccaacatccccgctcaccaggagccccttgccaggagtgttcaagatgctctctctggaccgatcccactgaagatgatgagaagcttattgaggaaatccagaaggaggctgaagaggaacagaaaagaaagaatggagagaacaccttcaaacgcattggacccccgctggagaagcctgtggagaaggtgcagagggtggaggccctcccgaggcccgttccgcagaacctgccacagccacagatgccaccctatgccttcgcgcacccacccttccccctgcctcccgtgcggcctgtgttcaacaacttcccactcaacatggggcctatcccagccccgtacgtgccccctctgcccaacgtgcgggtcaactatgacttcggtcccatccacatgcccctggagcacaacctgcccatgcactttggcccccagccgcggcatcgcttctgatggccccgaatccccattgagcagcacaaagcccgtttggggtaggagtgtggatggagaaccctcccccaaggctggtgtctgtaccattgcatcctaagtcagcttgaagggtaggctggttttcttcccacccctttcctagaagggctactgctcctggaa

SEQ ID NO: 177419 - DNA, 3293 bp, Homo sapiens
  Payload ID: 14816
  Gene Symbol: RNF216
  Gene Name: ring finger protein 216
  Uniprot ID: Q9NWF9
  ENST ID: ENST00000389902
  CDS Start-End: 269-3040
agtacccggagtgcctctatggttcttcctgtccttagtcgggagggggcgctgtgcgcaggcgcgaggtgacgccgcggcagggccggaaggagtgcagcggctgccacggagctcgcagctgcggcttctgaggagtaagcggcgcggtagcgaaggccgccgaacctgcctggctagccggcgacttgagtgacgattcttttgaaacagatggtcaccatgtttagatattagcagtcccatatatgcatgtctgcatttgaaaatggaagagggaaacaacaatgaagaggtaattcacttgaacaactttcactgccatcggggacaagagtggatcaatctccgagatgggcccatcaccatatctgactcctcagatgaggaaaggattccaatgctggtcaccccagctcctcagcagcatgaagaagaggacctggatgatgatgtcatcctgacagaaacaaataaacctcagagatcacgacccaatctcatcaaaccagctgcccagtggcaagatctgaaaaggttgggagaagaaaggcctaaaaagtctagagcagcatttgaatcagataagagcagctatttttcagtgtgtaacaacccattgtttgattctggggcacaggatgattctgaggatgactacggtgaatttctggatcttgggcctcctggaatctctgaattcactaagccaagtggccaaacagaaagagaacccaagcctggaccgagtcataaccaagcagcaaatgacattgtcaaccccagatcagagcagaaagtcatcatcttggaagaaggtagccttctttacacagaaagcgatcctttggaaactcagaaccagtcatccgaagactcagagacagagctgttatcaaatctaggagagtcagctgctctagcagatgatcaggccatcgaagaagactgctggttagatcatccttacttccagtctctgaaccaacagccccgtgaaataacaaaccaggtcgttcctcaggaacggcagcctgaagcagaactgggccgcttgttgtttcagcatgaattcccagggcccgcttttccaaggccggaaccccagcaaggtgggatttcaggcccctcttctcctcagcctgcccatcctctaggagagtttgaagaccagcagttagcaagtgatgatgaagagccaggtccagcctttccaatgcaagaatctcaagagcccaatttggaaaacatttgggggcaagaagctgcagaggtagatcaagagctcgttgaactactagtgaaagaaacggaagcaagatttccagatgtagcaaatgggtttattgaggaaataattcattttaagaattattatgatctgaatgtactttgtaattttcttctggaaaacccagattatccaaagagagaagacagaatcattataaatcccagtagcagtctgctggccagccaagatgagacaaagttgcctaaaatagacttttttgactattctaaattgacccctcttgaccagcgctgcttcatccaagctgctgacctcctcatggccgacttcaaagtgctcagtagtcaggacatcaagtgggccctgcacgagctcaaaggacactatgcaatcacccgaaaggccttgtctgatgccattaaaaaatggcaggagctgtcaccagaaaccagtggaaaaaggaagaagagaaaacaaatgaaccagtattcttacattgatttcaagtttgaacaaggtgacataaaaatagaaaagaggatgttctttcttgaaaataagcgacgacattgtaggtcctatgaccgacgtgctctccttccagctgtgcaacaagagcaggagttctatgagcagaaaatcaaagagatggcagagcatgaagactttttgcttgccctacagatgaatgaagaacagtatcaaaaggatggccagctgattgagtgtcgctgctgctatggggaatttccattcgaggagctgacgcagtgcgcagatgctcacttgttctgcaaagagtgtctcatcagatatgcccaagaggcagtctttggatctggaaagttggagctcagctgcatggaaggcagctgcacgtgttcgttcccaaccagtgagctggagaaggtgctcccccagaccatcctgtataagtactatgagcgaaaagccgaggaggaggttgcggcagcctacgccgacgagcttgtcaggtgcccgtcctgtagctttccggctctgttggacagtgatgtgaagaggttcagctgtcctaatcctcactgccgaaaggaaacctgtaggaagtgtcagggactctggaaagaacataatggcctcacctgtgaagagctggctgaaaaagacgacatcaagtaccgtacctctattgaagaaaaaatgactgctgcccgcattagaaaatgccacaagtgtgggactggcctcatcaaatctgaaggctgcaaccgcatgtcttgccgctgtggtgcccagatgtgctacctctgtcgagtttctattaatggatatgaccatttctgccaacatccccgctcaccaggagccccttgccaggagtgttcaagatgctctctctggaccgatcccactgaagatgatgagaagcttattgaggaaatccagaaggaggctgaagaggaacagaaaagaaagaatggagagaacaccttcaaacgcattggacccccgctggagaagcctgtggagaaggtgcagagggtggaggccctcccgaggcccgttccgcagaacctgccacagccacagatgccaccctatgccttcgcgcacccacccttccccctgcctcccgtgcggcctgtgttcaacaacttcccactcaacatggggcctatcccagccccgtacgtgccccctctgcccaacgtgcgggtcaactatgacttcggtcccatccacatgcccctggagcacaacctgcccatgcactttggcccccagccgcggcatcgcttctgatggccccgaatccccattgagcagcacaaagcccgtttggggtaggagtgtggatggagaaccctcccccaaggctggtgtctgtaccattgcatcctaagtcagcttgaagggtaggctggttttcttcccacccctttcctagaagggctactgctcctggaagagtggacggatccataataaagacgtcccaaatggtggagttcggagagagctgcgatgtgaactgcccctcccctcgcatccccca

SEQ ID NO: 177420 - DNA, 570 bp, Homo sapiens
  Payload ID: 14816
  Gene Symbol: RNF216
  Gene Name: ring finger protein 216
  ENST ID: ENST00000416985
  CDS Start-End: 512-570
agctgcggcttctgaggagtaagcggcgcggtagcgaaggccgccgaacctgcctggctagccggcgacttgagtgacgacatcaccatcctgtggtcacctgatctcagcgtctaggtcaactttgattcctttcttcttgccctgatggccagtgacatacacagatcccatcgactctaactctgcagtcagtgtcttgtattcttctcctccccctaggccatgtttcctgactctggttctatggccatggtgaataacagctccagtctttgacagaggaagaagtttttggagccactcgttcaacaactgtgctaggcattggaaatacaactataagtaagaaaagaggccaggcacagtgacttacgactgtaatctcaccactttgcctctggaacaggacccaaggacattatcattatacagctatctgttcttttgaaacagatggtcaccatgtttagatattagcagtcccatatatgcatgtctgcatttgaaaatggaagagggaaacaacaatgaagaggtaattcacttgaacaactttcactgccatcg

SEQ ID NO: 177421 - DNA, 5639 bp, Homo sapiens
  Payload ID: 14816
  Gene Symbol: RNF216
  Gene Name: ring finger protein 216
  Uniprot ID: Q9NWF9
  ENST ID: ENST00000425013
  CDS Start-End: 226-2826
agggggcgctgtgcgcaggcgcgaggtgacgccgcggcagggccggaaggagtgcagcggctgccacggagctcgcagctgcggcttctgaggagtaagcggcgcggtagcgaaggccgccgaacctgcctggctagccggcgacttgagtgacgattcttttgaaacagatggtcaccatgtttagatattagcagtcccatatatgcatgtctgcatttgaaaatggaagagggaaacaacaatgaagaggtaattcacttgaacaactttcactgccatcggggacaagagtggatcaatctccgagatgggcccatcaccatatctgactcctcagatgaggaaaggattccaatgctggtcaccccagctcctcagcagcatgaagaagaggacctggatgatgatgtcatcctgacagaagatgattctgaggatgactacggtgaatttctggatcttgggcctcctggaatctctgaattcactaagccaagtggccaaacagaaagagaacccaagcctggaccgagtcataaccaagcagcaaatgacattgtcaaccccagatcagagcagaaagtcatcatcttggaagaaggtagccttctttacacagaaagcgatcctttggaaactcagaaccagtcatccgaagactcagagacagagctgttatcaaatctaggagagtcagctgctctagcagatgatcaggccatcgaagaagactgctggttagatcatccttacttccagtctctgaaccaacagccccgtgaaataacaaaccaggtcgttcctcaggaacggcagcctgaagcagaactgggccgcttgttgtttcagcatgaattcccagggcccgcttttccaaggccggaaccccagcaaggtgggatttcaggcccctcttctcctcagcctgcccatcctctaggagagtttgaagaccagcagttagcaagtgatgatgaagagccaggtccagcctttccaatgcaagaatctcaagagcccaatttggaaaacatttgggggcaagaagctgcagaggtagatcaagagctcgttgaactactagtgaaagaaacggaagcaagatttccagatgtagcaaatgggtttattgaggaaataattcattttaagaattattatgatctgaatgtactttgtaattttcttctggaaaacccagattatccaaagagagaagacagaatcattataaatcccagtagcagtctgctggccagccaagatgagacaaagttgcctaaaatagacttttttgactattctaaattgacccctcttgaccagcgctgcttcatccaagctgctgacctcctcatggccgacttcaaagtgctcagtagtcaggacatcaagtgggccctgcacgagctcaaaggacactatgcaatcacccgaaaggccttgtctgatgccattaaaaaatggcaggagctgtcaccagaaaccagtggaaaaaggaagaagagaaaacaaatgaaccagtattcttacattgatttcaagtttgaacaaggtgacataaaaatagaaaagaggatgttctttcttgaaaataagcgacgacattgtaggtcctatgaccgacgtgctctccttccagctgtgcaacaagagcaggagttctatgagcagaaaatcaaagagatggcagagcatgaagactttttgcttgccctacagatgaatgaagaacagtatcaaaaggatggccagctgattgagtgtcgctgctgctatggggaatttccattcgaggagctgacgcagtgcgcagatgctcacttgttctgcaaagagtgtctcatcagatatgcccaagaggcagtctttggatctggaaagttggagctcagctgcatggaaggcagctgcacgtgttcgttcccaaccagtgagctggagaaggtgctcccccagaccatcctgtataagtactatgagcgaaaagccgaggaggaggttgcggcagcctacgccgacgagcttgtcaggtgcccgtcctgtagctttccggctctgttggacagtgatgtgaagaggttcagctgtcctaatcctcactgccgaaaggaaacctgtaggaagtgtcagggactctggaaagaacataatggcctcacctgtgaagagctggctgaaaaagacgacatcaagtaccgtacctctattgaagaaaaaatgactgctgcccgcattagaaaatgccacaagtgtgggactggcctcatcaaatctgaaggctgcaaccgcatgtcttgccgctgtggtgcccagatgtgctacctctgtcgagtttctattaatggatatgaccatttctgccaacatccccgctcaccaggagccccttgccaggagtgttcaagatgctctctctggaccgatcccactgaagatgatgagaagcttattgaggaaatccagaaggaggctgaagaggaacagaaaagaaagaatggagagaacaccttcaaacgcattggacccccgctggagaagcctgtggagaaggtgcagagggtggaggccctcccgaggcccgttccgcagaacctgccacagccacagatgccaccctatgccttcgcgcacccacccttccccctgcctcccgtgcggcctgtgttcaacaacttcccactcaacatggggcctatcccagccccgtacgtgccccctctgcccaacgtgcgggtcaactatgacttcggtcccatccacatgcccctggagcacaacctgcccatgcactttggcccccagccgcggcatcgcttctgatggccccgaatccccattgagcagcacaaagcccgtttggggtaggagtgtggatggagaaccctcccccaaggctggtgtctgtaccattgcatcctaagtcagcttgaagggtaggctggttttcttcccacccctttcctagaagggctactgctcctggaagagtggacggatccataataaagacgtcccaaatggtggagttcggagagagctgcgatgtgaactgcccctcccctcgcatcccccaggccaccaacggcagtccttctgccttgtccatggcataggccatagaccaggtccctgctgctcacacctgggcctctcctcggagccgacccctgggtagcaaggcagccgagagcatctccctggaggggcccacggttgggccaagggcagagggggctgcacctgcgggcctgggaagcattgctcagggtggggggctgggaccatggcccgcagaggcactgccacagctgtgagggccaagatgctgtccccccatccaaaacccgtgcgccactgcagtgagtgttgagggcacctctcctcccctcttacacctactcagatgaggcagcagcagacccatctcgcggcgggggttttgttctgttgccgcctaactttctcatcctcggtctctggaaagtcaggctgagaaatcctttcccaggccaggccgctgcggtacactggatggttctgaagctggcccattgaaagagcctcttaaggcagctgggacagaggcctggtggccctgctgggcagcccaactgctgggggagacgtttctgccaccctgggtgatgagcagcttttcccccctggctttctgggggaggagtgggcctccttagggagacaggtgaccctgggtgccacccctgccccgtgtgtgccccgggtgttctcagtggttgctgaaggcaggtagagggtgctgtccagtatcccccatgtgaaggtcacttcccttctcatggagtcagctgagcatcagctcagccctgccatgtccccactcaccctcctcgcctcctgtccggccctgggtttctagcggtgcctgaggcatcactctggcccattgacagatgagaggtctgaagccttcctggccacaggcatcactttctcctcctcctcatgccctgccttgtccttgtcgtgttgccatggggttctgagaggctgggagttcacagacctcagacacagctgagtccgacaaccattggggtggggctgcatcagtctccggagtggcccgccacctcctgaagcagggcctggcccacccaaggtgcctggggcaggcgggcaccgtcattcgctgccattggcttctcagatgtatttcaaggactaaagtgggctctaagatctaagatggcccggcgcggtggctcccgcctgtaatcccagcactttgggaggccgaggcgggcggatgagttgaggtcgggagtttgagtccccgtctctactaaaaatacaaaattagccggacaaggtggcgcatgcctataatcccaggtactcaggaggctgaggcaggagaatcacttgaacctgggaggcagaggttgcagtgagccaagattgtgccactgcactccagcctgagcaacaaaagcaaaactctatctttaaaaaaaaaaaaaaaaaaactaagatacccattctttctgcctttgcccaggatggaggctttgaagacaggtggtcacctggacctggggtaagggtgcgcagggaggccgggcttgggggcagcctgctgctatgtccttgctggcgcccatacctgttggactgcctgaactttgctactagcctgaacgacagtgccttggaaaggcaggctccatgcggcagcaacaggattgtcttcggtaccttaaatatgctccctgtgcttccccagggaggatctctgggagcagagggcggctgtagacatcacagctgaagaggtgacctcaggccctgggagcctcagctccctctgccctgtaccctaggcacgtggctccagcaagagccccaggcaggacaaagggagcaggcagcagctgcagaaacagccctagacaggtgctggcctcaaccctggcaggggagggggagcccagagtgatgtttctcctaaggccaaaccccaggggtgggtcatttgagaggagttccagctgttctggccacactgggctggtggggaaggagcggcggcctctttccttggagggtccctgattcctgaggatcctccccgagccaggcacgggggaccacagggctgccgtgagcacccaccctggttctccaggcccctctgtccagaggcagggcctgaacctcgggctcctgcctggaccagtgacagcattggggagagaagcactgggggtcttcagaccagccagcaaggggccgtgccagtgcccagagagcaggtcagacaacaggcaaccctgaggcagctggctccctctctctgccctgcagggcttgccgcagggcgtgaggctccccagccacagccccctcttacttgccttaaaactggagagaggaatctagtatttgcacttagcaaaatatttaaaaactgaaaaaaatgtgcatgatctgtcactttgtataaaaacaagaaacgattagttcattaaactttttctttaccttctggtagtaaaaatagataaaataattccgtttcaactactgtgtgtaaaaagcctgtatcatatgtaactgggacttttgtaaataaatgtttgtgcgctctgctc

SEQ ID NO: 177422 - DNA, 563 bp, Homo sapiens
  Payload ID: 14816
  Gene Symbol: RNF216
  Gene Name: ring finger protein 216
  ENST ID: ENST00000411812
  CDS Start-End: 176-325
agtgcagcggctgccacggagctcgcagctgcggcttctgaggagtaagcggcgcggtagcgaaggccgccgaacctgcctggctagccggcgacttgagtgacgattcttttgaaacagatggtcaccatgtttagatattagcagtcccatatatgcatgtctgcatttgaaaatggaagagggaaacaacaatgaagaggtaattcacttgaacaactttcactgccatcggggacaagatggaattttactcattgcccaggccagagtgcaatggcgtaatctcgactcaccacgagctccgcctcctgggttcaaatgattctccggtctgagcctcctgagtagctgggattacagagtggatcaatctccgagatgggcccatcaccatatctgactcctcagatgaggaaaggattccaatgctggtcaccccagctcctcagcagcatgaagaagaggacctggatgatgatgtcatcctgacagaagatgattctgaggatgactacggtgaatttctggatcttgggcctcctggaatctctgaattcact

SEQ ID NO: 177423 - DNA, 1784 bp, Homo sapiens
  Payload ID: 14817
  Gene Symbol: RNF217
  Gene Name: ring finger protein 217
  Uniprot ID: Q8TC41
  ENST ID: ENST00000359704
  CDS Start-End: 339-1166
agtatacagaggaggacacaaacatgagaagattaaggtagagagtgaaatatggtcaggacaaatgtgaatttagagcctgagtgatggtttagtggatttatgtcctcacttgtcactaatgaaaaggaccttacaggttatataattaaagctctgttgacattggctcttgaaggcaaacttcataatgaggggaagagtcaagttttgtgtaacctgaagcatatacagtgtccattgccagcacttgagtaaagataaagagtaggagaatcaaagctgttgtataattagttctcttctcatccacacccataaaccagttcaagaaagggatgaaggtacaacttggccaagtagaaatcaaatgccccatcacagagtgttttgaattcttggaagaaacaactgttgtctataacttaacgcatgaagactccatcaagtataagtacttcttggaacttggccgtattgattccagcaccaagccatgtcctcagtgcaagcactttacaaccttcaagaaaaaaggacatattcccaccccttccagatcagaaagcaaatacaaaatccagtgccctacctgccaattcgtctggtgttttaagtgccactctccttggcatgaaggtgttaactgcaaggagtacaaaaaaggagacaaattgttgcgtcactgggccagcgaaattgagcatgggcagaggaatgcccagaagtgtccaaagtgcaagatccacatccagcgaactgaaggatgtgaccatatgacctgctcacaatgtaacactaatttttgttaccgatgtggtgagagataccgccagctccgattttttggagaccacacatcaaacctcagtatatttggatgcaaatatcgctacctcccagagagacctcatttaaggagattagtgcgagggtcagtctgtgctggaaaattattcattgcacctctaattatggttttgggattggcactaggggccatagcggttgtaatcgttgaggaaattaagacttactggaacctcataagtggtagaaccaggaatcaaacccaacatttggctccacagcctgtgttgttaagtgatatgctatactgcctgaaacaagtgtttatttgtatttcctatctattgcctttgtaaaaaacagagaaaacgatcacggacaggtatgcactggtaacatgcagatgatttcatccagctaagctggttggagtaggagcgataccaaagggtacacccatctgtgagtcacatcttgaaaaacactgagaggaaccttctaccatctcatctcccagtgattctccgtgggccacaatgcctctagctatggtgcactcccaacatggtatcctgtcctttccctaaacaaattgctgctgcttttaaaaaatggtcactttcataaactataaacatctatatcataactctgacctttgtggttcttggaagaagatattttaagaaccagttatcctaagaattctgagcacgcctcttctgagaattgcttggactgtctttgaactctgcacctccttccaggccatcttgtgagacttggtgttaatagctgaagtcctatctgtaccaacaagcaaggccacttttcagaagataagagttcactgaatgcacctattataatctgtggccccagcagtataattcttttatctttcaaatgttataattgcaaaaaatctcaatgtccaaaagggaatgagtgaaactaaattaatgagaagaata

SEQ ID NO: 177424 - DNA, 1771 bp, Homo sapiens
  Payload ID: 14817
  Gene Symbol: RNF217
  Gene Name: ring finger protein 217
  ENST ID: ENST00000368414
  CDS Start-End: 672-986
atttagtatacagaggaggacacaaacatgagaagattaaggtagagagtgaaatatggtcaggacaaatgtgaatttagagcctgagtgatggtttagtggatttatgtcctcacttgtcactaatgaaaaggaccttacaggttatataattaaagctctgttgacattggctcttgaaggcaaacttcataatgaggggaagagtcaagttttgtgtaacctgaagcatatacagtgtacaacttggccaagtagaaatcaaatgccccatcacagagtgttttgaattcttggaagaaacaactgttgtctataacttaacgcatgaagactccatcaagtataagtacttcttggaacttggccgtattgattccagcaccaagccatgtcctcagtgcaagcactttacaaccttcaagaaaaaaggacatattcccaccccttccagatcagaaagcaaatacaaaatccagtgccctacctgccaattcgtctggtgttttaagtgccactctccttggcatgaaggtgttaactgcaaggagtacaaaaaaggagacaaattgttgcgtcactgggccagcgaaattgagcatgggcagaggaatgcccagaagtgtccaaagtgcaagatccacatccagcgaactgaaggatgtgaccatatgacctgctcacaatgtaacactaatttttgttaccgatgtggtgagagataccgccagctccgattttttggagaccacacatcaaacctcagtatatttggatgcaaatatcgctacctcccagagagacctcatttaaggagattagtgcgagggtcagtctgtgctggaaaattattcattgcacctctaattatggttttgggattggcactaggggccatagcggttgtaatcggtttatttgtatttcctatctattgcctttgtaaaaaacagagaaaacgatcacggacaggtatgcactggtaacatgcagatgatttcatccagctaagctggttggagtaggagcgataccaaagggtacacccatctgtgagtcacatcttgaaaaacactgagaggaaccttctaccatctcatctcccagtgattctccgtgggccacaatgcctctagctatggtgcactcccaacatggtatcctgtcctttccctaaacaaattgctgctgcttttaaaaaatggtcactttcataaactataaacatctatatcataactctgacctttgtggttcttggaagaagatattttaagaaccagttatcctaagaattctgagcacgcctcttctgagaattgcttggactgtctttgaactctgcacctccttccaggccatcttgtgagacttggtgttaatagctgaagtcctatctgtaccaacaagcaaggccacttttcagaagataagagttcactgaatgcacctattataatctgtggccccagcagtataattcttttatctttcaaatgttataattgcaaaaaatctcaatgtccaaaagggaatgagtgaaactaaattaatgagaagaatattaagttactgaagtgtatatgcgtaggggcgtgaatgtgtgtgtatataaatatgtattaaaactaggcccagtaaccttgtacttacccagttccatgccgctacactatttttccacattttcatagacctattgaaagatgatggctcctttgtggacataatttagcaatgtattaaattaaagtcaatgtagacaacaggc

SEQ ID NO: 177425 - DNA, 672 bp, Homo sapiens
  Payload ID: 14817
  Gene Symbol: RNF217
  Gene Name: ring finger protein 217
  ENST ID: ENST00000432158
  CDS Start-End: 1-196
agactccatcaagtataagtacttcttggaacttggccgtattgattccagcaccaagccatgtcctcagtgcaagcactttacaaccttcaagaaaaaaggacatattcccaccccttccagatcagaaagcaaatacaaacaaaatggcaggatgaagtggtttcaaaggctgtttggagtcatctccatttaaggtaaggagagcactgacatggataccccagccaaccaatcgtgagattcatggccacagtatggcaccctgtactgagactaagatctttgttctttgtgatgaacagatccagtgccctacctgccaattcgtctggtgttttaagtgccactctccttggcatgaaggtgttaactgcaaggagtacaaaaaaggagacaaattgttgcgtcactgggccagcgaaattgagcatgggcagaggaatgcccagaagtgtccaaagtgcaagatccacatccagcgaactgaaggatgtgaccatatgacctgctcacaatgtaacactaatttttgttaccgatgtggtgagagataccgccagctccgattttttggagaccacacatcaaacctcagtatatttggatgcaaatatcgctacctcccagagagacctcatttaaggagattagtgcgagggtcagtctgtg

SEQ ID NO: 177426 - DNA, 450 bp, Homo sapiens
  Payload ID: 14817
  Gene Symbol: RNF217
  Gene Name: ring finger protein 217
  ENST ID: ENST00000519799
  CDS Start-End: 322-327
atttagtatacagaggaggacacaaacatgagaagattaaggtagagagtgaaatatggtcaggacaaatgtgaatttagagcctgagtgatggtttagtggatttatgtcctcacttgtcactaatgaaaaggaccttacaggttatataattaaagctctgttgacattggctcttgaaggcaaacttcataatgaggggaagagtcaagttttgtgtaacctgaagcatatacagtctcctgcaaatgataagaggcttgaggatacttcccaggaactcctgcctttttggaggtgactctgtcagttaaagtgtgaatgaagagtggagcataaaagtccattgccagcacttgagtaaagataaagagtaggagaatcaaagctgttgtataattagttctcttctcatccacacccataaaccagttcaagaaagggatgaag

SEQ ID NO: 177427 - DNA, 11325 bp, Homo sapiens
  Payload ID: 14817
  Gene Symbol: RNF217
  Gene Name: ring finger protein 217
  Uniprot ID: Q8TC41
  ENST ID: ENST00000521654
  CDS Start-End: 1-1629
atgggcgaggagcagagcacggtgagcggcggcggcgggccccaggagtcgcagaccctggccagtggcactgcgggccaccctgagcccccgaggcctcagggggacagcgcccgggcgcccccgctgcgcgccgcctccgcggagccgagcggcggtggctgcggaagcgactggggctgcgcggacaccagcgccccagagcccgcgaggagcctggggcccccgggctggagtaagagccgagcaccggcgcagcctgcgggactggcactcaccgggcctctcaatccccagaccttgccactgcagttggagctggaggaggaagaggaggaagctggggatcgaaaagagggaggggatgaacagcaggaggcgccccccggcgaagagctggagcccaggacccgcgtgggggccgccgacggactggtcctggacgtgctgggtcagcggcgcccgtccctcgccaagagacaagtcttctgctccgtgtactgcgtggagagcgacctgcccgaggcccccgcctcggagcagctctcgccgcccgcgtcgccacctggggctccgccagtgttgaaccctcccagcacccgctcttccttccccagcccccgactgtccctcccaacggattccctctcccccgacggcggcagcatcgagctggagttctacctggcgcccgagccgttctccatgcccagcctgttgggagctccaccctactctggcctgggcggtgtaggggatccctatgtgcccctcatggtgctgatgtgccgggtgtgcctggaagacaagcccatcaagcccctgccttgctgcaagaaggccgtgtgcgaggagtgcctcaaagtctacctgagcgcccaggtacaacttggccaagtagaaatcaaatgccccatcacagagtgttttgaattcttggaagaaacaactgttgtctataacttaacgcatgaagactccatcaagtataagtacttcttggaacttggccgtattgattccagcaccaagccatgtcctcagtgcaagcactttacaaccttcaagaaaaaaggacatattcccaccccttccagatcagaaagcaaatacaaaatccagtgccctacctgccaattcgtctggtgttttaagtgccactctccttggcatgaaggtgttaactgcaaggagtacaaaaaaggagacaaattgttgcgtcactgggccagcgaaattgagcatgggcagaggaatgcccagaagtgtccaaagtgcaagatccacatccagcgaactgaaggatgtgaccatatgacctgctcacaatgtaacactaatttttgttaccgatgtggtgagagataccgccagctccgattttttggagaccacacatcaaacctcagtatatttggatgcaaatatcgctacctcccagagagacctcatttaaggagattagtgcgagggtcagtctgtgctggaaaattattcattgcacctctaattatggttttgggattggcactaggggccatagcggttgtaatcggtttatttgtatttcctatctattgcctttgtaaaaaacagagaaaacgatcacggacaggtatgcactggtaacatgcagatgatttcatccagctaagctggttggagtaggagcgataccaaagggtacacccatctgtgagtcacatcttgaaaaacactgagaggaaccttctaccatctcatctcccagtgattctccgtgggccacaatgcctctagctatggtgcactcccaacatggtatcctgtcctttccctaaacaaattgctgctgcttttaaaaaatggtcactttcataaactataaacatctatatcataactctgacctttgtggttcttggaagaagatattttaagaaccagttatcctaagaattctgagcacgcctcttctgagaattgcttggactgtctttgaactctgcacctccttccaggccatcttgtgagacttggtgttaatagctgaagtcctatctgtaccaacaagcaaggccacttttcagaagataagagttcactgaatgcacctattataatctgtggccccagcagtataattcttttatctttcaaatgttataattgcaaaaaatctcaatgtccaaaagggaatgagtgaaactaaattaatgagaagaatattaagttactgaagtgtatatgcgtaggggcgtgaatgtgtgtgtatataaatatgtattaaaactaggcccagtaaccttgtacttacccagttccatgccgctacactatttttccacattttcatagacctattgaaagatgatggctcctttgtggacataatttagcaatgtattaaattaaagtcaatgtagacaacaggccatttcgatactgaacttttctatttcttgctctttctttttgtcacacaaacacagaaatttgtgcaacgtcaccccaaggagtattaagctttgtaaactgacaaaactggctgcttttaggaaattctcaagacacaaatattcagtctttttaaaattcttacattttggaaaacatgcttcactctatagatagatccttcacattgggattatttaatcccaaaaacaagtttgctgtagacaactgcttaagcctttaaaaaattcctattctgctaattttttaaccaacttgtaattatagataattctgctttaggtcaaggtcttacatcatttaatatcctaaccttgttatctcttgcctcctcctctctgtttttatttgttttcaaggtttttcataaaaacaaatactagttttgaaggattttttcttacatttaactgctcaaacataatatttttggggacaccttcttatggaggagtttgaaaactttttatgttcttgagtttgtccaatatcagctgcttttgggaaaggaaacaaaaaagtgaaggaaatattttcaggaagtttttctcaacctacaaaagctttaaaaataagaaattgacaagtaactagactatgatatgcctttgctttcatcacaaaagttcatcagcaaacaggaaaaaaaaagacccctaaaaagcctaaagctttaaattgtctccaaattcttaaaattagtcatctgtcttagatgtacatttatttgtcagcaaccttgtctgatttgaaatagatgatatgataaaacatgcattaacatgagtagtttatttttgttgggctccagagtgtaagaatattttattttttgtttgacataaaaagtgaagttgacttgcgtgaataacaatccagcatgctttcattctttctgaataacacagaataactgtgctacagcttctggattagttgtctatttccagttagaggagtgtgtgacatttatggtttgggaatagcatatttctaaagcataatataatacaagaaatagtgatgctctgttttcacaaatttatcttttcattcacccatccatccatttaacagatatttattgagtgcctatcttaggtgtaatagtatttaagactgaaagaaggagaatttctaacctgtcataagagtaaggtttcgtaaattcatctttcctgaacttaggcattagtttggcaatatgtgaatatgatgaactctaaacctagctgatctgtatatgtatgatgtatatatgtcatatgtatgatatatatgaaatattcccataactgcatatgaacacatatgccatatacatatataccaacgggctgaataacatactcttttgtcttggataatctgttttctgggttatgtatctgttgtctttggcctactcagggatttttatttctttaaataacttatcttttggacatatttttatattatttggaaaactttccaatattcctgttacaaagtggtgtctgttttcagtgatggctatttcatcagtgcttgaaatagtgtgcactgtgttgcacaggtttttcatttttctattgagtagatatttttaaattaacatacacatttttctctttaaagggtcatatctattaggcctttccctgctggtaacttaaaatgattatttgtgaattttttactaagtttcatcaagatcttaaaaagagagaagaaaataaaaagtattatttatatgtcagtgccaactttgaaggtaaaacagtagtagtaacttttgggagaaattctaaaaactactttaaaaagaagcgtgcacataaaataaatatctttctatccaaggcttgtcattttatatgcttttattgtaaatttaatatatactactttaaaaaattgaactatacagaatttataaaatacaactttctctacttaccccacctcttattttctaggggtaaccactgttaatggtttggtatgtgtccttccagacactttctacaaatatacaaataagtgtgtttgtgtatgtgtctgtgtgtgtattcattttatacaaatagaaaaatattcttactgtgctgtgactctttgtcattttattatatattaatagatacctttccataagcgtttaaatagatttacctcattcttttataaattactgcataatccattgtaggagtatactttaacttattgaattagtcccctgttgaatggactacaagattattttcacttctctattacaaagaaagcaagagtgaagacccttttgcatatatttttgtcaccttgcatgaacatatccataaggttgtacatttgttttttacaagatctttgtaataaacattttaatgtaatttcaggagatgaggtcatagagataatatgagacccttttttggataaaaagaaagattgtacaggagtgcataatttttaaagaaaatcgtcttttgaagggtaatttcctttctgcctgattagccaaataaataccttgccaaaacttacaataggaaattttttttcaataaaaataaaatttgaggagatgtgtgtcagataatgtgagagagatgaattgacttttggattgcctcattttaaaacttgagggatttaaatcaaatacccaagccaaattggtgatacttttcgcatttttagtaacactatccacttttgtgtatgttgcttgacagaggaacttaattatgccattgtgaaaagtaggaaagaatatgttggcaattataaatgcccacagcaattcccagaaaaatacattagattatgtacgatttagtgatttggtgggataattataaatcgtggaataatttatatatgtggagtaagaagagaggggtcaaaccttttggtacaagcaacatcttgttgccaccaccttgattttctcataggtgctattgtgtcctaagagtagaacagacaagaaaacaaagataattaaacacaagtcaggttacaacatgatatctttaattgtactttctctgctgtggtatcaagattcagtggtgcttgtcagaaaataccttgttctgtgactctgactatctcttgagtcccaaggctccaattgagcctttatctttcaaccttaccacccaagtatatgaccaactgttctcctaaaatacctatgaaccactgtaatcatttccagtccctgatgcccctcttcaacctcatttttctccatacctctgctattctaactattcctcttcactgaaggagaagaggagagacaggaggggcctaaaaactcactctggtatgtgggaaacattagaattccttcctgacctttgtcaaatgagggcacatctgccaagacatcagtccagcttctcccttgttaaatgaaattgtttttaacattacacttttatactggctgttacattagaattacaaaaaagttagtggcctctataaccttaattggcatactttactacaaaaataagaaaatgtatgccaaaaaacgtttttagattttaattttataagcaacctgcacataagccttaatgtgagtcttcacattggattatatttttattctcccatatttgtggctgaaatctctcccaactattgagagtgatctttcccatggtctgctttattgttttgtgttaatatctattataaatatagccttaaaattttgtaatgcactttaaaatatttgtgccatttaaataatgacaaagcaatcaatgcatacatttcaatggagacagtatacaaagttaaagcaactgatacatatatttcagtggagacagtaggataacagtgttagcaaatatgtgtcatctctttaaatttgggaggaatcagaagctaaagatttaaaacaaataaaacatacctgaagaaaagtagcaatttctgaaattgtagtaatcttggaatggttatcaaacctagcaaataatacttaataagtgttacctaatatacctaattggaatgtttgtttaaaatattaaattaatttatactgaaagttttaactgcaatttcataattcatgaattctataaaagaaatctccctcactaaaaatatgatcaatcaaaactaccagttttgcacaccaatcccaagtttaagcatattttgtatttaaagttataatttaattatgatactgtccccctaatatggaaaataagttacaaaattcttttttttttttttttttttttgagacagaggttctctcaatgttgcccaggctggtctcaaactcttgggctcaagcgatcctccctcctctgcctctggagtagctgggattacaagcacgtgcctactatgcctgtcttcaaaatcacattgttaatttttatagccacaattattaatttgataaaacaaataattttatagaagcattaaagtattatcagaacaaaatcagagttccaaaatttggggagtattttaagattgtgaaatgttaccttttggatgcaaaccaatgatacaaatctttaagaaagaattacagtgggactcctttgaaactctgattttgaaaatagaacaaatacacatttcatagccaaactttgtgtgggacttctattgttactaattgtaaggctgtaactttggttgacttcatccaaatccaagaaacagagtcacagtagtgagactattctcattgcttctttggagcattagctgaagctttaccatatcacataccttacaaaatccctatacatattgccagttttaaaagaatgtaattatgcatgttacaaactatatatatctttttggctagagaagtgactattttagaataacagtatgaatgtaaaaggcaataattttttttaaatacacaaaacattgccattgcccttttttgtcacttccttttttcttctaaaaattttcatttggtgtatctaactttgtatcacttaaattattcagacttactaagataaaaaatactttttttcagttctgtgctatattctgtcactctattccattattaatactaaatgactttccttgtgaaatgatacccacatactacaacatcaagctcctttttctcttaaatttcctaattatcttgatttttgcctctgcagtcttcttcccatcttggccaagtgtgggataaattctgtctcgcccgtaactcctttcactgtaatgaaatgaattcaacactgaacgcactccagaatttagctctggtagtgagcataatttaccttggcttattttatttgtaaatggaaatgtatcaggagtgcctggaacacttttccctcttgataggagttggagaacactgcctagccctctgccaagaagtaagtcaagcaaatgaagataccagttggatcagagggcctaataatagtctaaaaccaagcttcagaaattgcttcgtgactgttgtaagatcaatattgtgtttgcgtattagttggacagaaagcatgtgtggacattcatccaacctgaccccaggtcattcattctccatccaaaaagggttataggtatggtttatggtctttgtttcagcaaaacgtcctacagcttggacttggggtggatttatatagtgtagcatttgtatataagattcaattatggattcatgctctgtgaacattgttagatttttaataatctaaagtaggtcacattgaatgtaactgatattaaccctattctagagaaaacatttgtcatttgcaagtgtttgacttttttattgatatgatttagatatgccacactcaatatatttagtatagattcagtacataacaggaaagaaaaagggagagacagacttgagtgttaaaggaccccagaaattgctgaaatgtccttttagattcttgtggctggcaagctatgctgtcattggttctctgcgaatctgtgatgtgttcacttcgccatgccccagcttgggaaatattcttagtaatccaatcaaatccttaaaaacagcatttttgtgaatgtattacttcttcaatatccccatatatttgtattgtttcaagccactagtatctaaatttttgatataaatatctaaattctttcattttatagaaaattagcatgctttatgtttctttataatgaaaagtctagataaagtatcataatttcattatcagctgacaagaaacccttctaagacccatttttttaagtgtcatatggcaactcctcaatagcttacttttattatttgatcattttcatcacaattgcaatcctctagagggtattttaaaaagtagaccaaccttatgtttcacgtgaaacatagaataataattagtttgtatatatataaaaccatttaccttgacaaggacaatctgttacagatttttaatatgaaaattgacaattttgttgcttttagaagcaattaacatagtaattagtaaattctgagagatgacagaaatgattttctgtagaaggaacacaacagtgatgttaaaatgttaacaaagaaccagttgttttgattctattttaaacaaaattgtaaggcaattttatgaaacaaacatttatatcaatgtatatctatttcaaaactgtgggacaattattcattcttttcccaaatagagtaaaatattaaagagaaaaaaattcgagtgtttatctgttattactgtatattcagaaattacagttctaaggaattattgtcatcctctaagtatcagaatgtattccattttaattatattctccttaacaatagaaaattagaagaaatttcttgatcataagatgaatagtaatttgtaccagatcttgtccatcatttcattagattgcatatttttagttttctataaaatttgcagccattttccaaataaagtaagttataatatttttcaagtttaaaatggaccgggttgaaaagagatttcattgattctttttaatgatattggaaaatatttatgcaattttattttttaaccttttctccatttcattagttatactattaactttgataatcacaaaactatgtggaagaaatcattctgattatattttatgaaagagaggggtagagtaaattttttaattagacaatgttgatatgcagaaatctctcaaaagaaattgcaaaggaaaaattacgttgagatgaaatgttgagaaataaggagtatcttaaaaacctaatttcttacactttttagagcaatcaacttatttccaaattattatttcatgctgttgtttccatgaattgtgtttttagcatagtatatacttttctaccacgttagcatttacactctaattactgaaaataaaggaagaagttggtgaataaaagccagggaaactgggtttattctcattttccaatagcactaatgtataatccctttaaccttccatatggtgctttgtgtgatgagtatataacattcatatacgttattagtgccttatttttttcacttgactttatttcttatctaaagagccatatattttttgtgagtgttctttggtccctctatttaaagtgctaaggagaaagcatatctttagggatgtatataggctgcgtttgctaccttaatctactgtattatctctaaaacaggttagccaatgtatttttcttaaattcattgttcatttttaagctaacctatacaaatggatattaaacaccagaaattaaagccattaaaattgaattgtactttaaaaccataaaaaatgctaattaagtttagaacaggagttgaaatgactctcagttttatctatagctccaattaggacaaaattactttacaaaaagcattaaaaataaaagtaactgtatggtacttcaggaatttgaccagttccttacaacttattcttggcaatattttgtcagtaatatactttcatacagatgctagagaaccatggtgtctgctatttacatgttatttgttcccagtgagctttatcaacatcaaccctgtttatataatatgttattttgctcttcttgatctgtgccttttgttttagctttatacaaaatgctaggtttgttatattctttatgtatcataatatataattcaacttttcctgatgaatgtatgctgaataattaaactaaaccatgtgcttagaaaagacaaagacaggttgtatatgcagttatgtgtaaatatttgacaaagaaaaaaaaaggaaaagaatcttcctgccaacaggtaggtcctgctggacaggacctgaaaattaagagatttttttttttaagcagtgaaatttaaaaatctattacctcaagaattttcagtcgatatgtcaatgtactgttccttctcagtaagtacagtgtcacatgctgctggcggtaaaagcaacccaagtgtcagatcacacaaattttagggacaagtctttcaaaagacggacaccttgtgatattttggagtctaatttccgacttttcgtaatgtcccaatgaccttttgttgtggttgggcttttataaaaaattattttcggttggttgttgtagaatggaagagtaatcttaattatgaaatcagattgcatggaagaatataaagacactcactcggatgaaaactataacggttttcaaactattttgatggtcattgtacgagctattgtatggattactgtggagtgctgtttaccacatgatgtgtgcaatacatcatgcaatgttatttagcaatgcgtaataaaagtttttaaaagagaaaa

SEQ ID NO: 177428 - DNA, 10660 bp, Homo sapiens
  Payload ID: 14817
  Gene Symbol: RNF217
  Gene Name: ring finger protein 217
  ENST ID: ENST00000519565
  CDS Start-End: 1-236
atgtgcccctcatggtgctgatgtgccgggtgtgcctggaagacaagcccatcaagcccctgccttgctgcaagaaggccgtgtgcgaggagtgcctcaaagtctacctgagcgcccaggctggagtgcagtggcatgatctcggctcacggaaacctccacatcccaggttcaagcgattctcctgcctcagccttccgagtagttgggactacaggtacaacttggccaagtagaaatcaaatgccccatcacagagtgttttgaattcttggaagaaacaactgttgtctataacttaacgcatgaagactccatcaagtataagtacttcttggaacttggccgtattgattccagcaccaagccatgtcctcagtgcaagcactttacaaccttcaagaaaaaaggacatattcccaccccttccagatcagaaagcaaatacaaaatccagtgccctacctgccaattcgtctggtgttttaagtgccactctccttggcatgaaggtgttaactgcaaggagtacaaaaaaggagacaaattgttgcgtcactgggccagcgaaattgagcatgggcagaggaatgcccagaagtgtccaaagtgcaagatccacatccagcgaactgaaggatgtgaccatatgacctgctcacaatgtaacactaatttttgttaccgatgtggtgagagataccgccagctccgattttttggagaccacacatcaaacctcagtatatttggatgcaaatatcgctacctcccagagagacctcatttaaggagattagtgcgagggtcagtctgtgctggaaaattattcattgcacctctaattatggttttgggattggcactaggggccatagcggttgtaatcggtttatttgtatttcctatctattgcctttgtaaaaaacagagaaaacgatcacggacaggtatgcactggtaacatgcagatgatttcatccagctaagctggttggagtaggagcgataccaaagggtacacccatctgtgagtcacatcttgaaaaacactgagaggaaccttctaccatctcatctcccagtgattctccgtgggccacaatgcctctagctatggtgcactcccaacatggtatcctgtcctttccctaaacaaattgctgctgcttttaaaaaatggtcactttcataaactataaacatctatatcataactctgacctttgtggttcttggaagaagatattttaagaaccagttatcctaagaattctgagcacgcctcttctgagaattgcttggactgtctttgaactctgcacctccttccaggccatcttgtgagacttggtgttaatagctgaagtcctatctgtaccaacaagcaaggccacttttcagaagataagagttcactgaatgcacctattataatctgtggccccagcagtataattcttttatctttcaaatgttataattgcaaaaaatctcaatgtccaaaagggaatgagtgaaactaaattaatgagaagaatattaagttactgaagtgtatatgcgtaggggcgtgaatgtgtgtgtatataaatatgtattaaaactaggcccagtaaccttgtacttacccagttccatgccgctacactatttttccacattttcatagacctattgaaagatgatggctcctttgtggacataatttagcaatgtattaaattaaagtcaatgtagacaacaggccatttcgatactgaacttttctatttcttgctctttctttttgtcacacaaacacagaaatttgtgcaacgtcaccccaaggagtattaagctttgtaaactgacaaaactggctgcttttaggaaattctcaagacacaaatattcagtctttttaaaattcttacattttggaaaacatgcttcactctatagatagatccttcacattgggattatttaatcccaaaaacaagtttgctgtagacaactgcttaagcctttaaaaaattcctattctgctaattttttaaccaacttgtaattatagataattctgctttaggtcaaggtcttacatcatttaatatcctaaccttgttatctcttgcctcctcctctctgtttttatttgttttcaaggtttttcataaaaacaaatactagttttgaaggattttttcttacatttaactgctcaaacataatatttttggggacaccttcttatggaggagtttgaaaactttttatgttcttgagtttgtccaatatcagctgcttttgggaaaggaaacaaaaaagtgaaggaaatattttcaggaagtttttctcaacctacaaaagctttaaaaataagaaattgacaagtaactagactatgatatgcctttgctttcatcacaaaagttcatcagcaaacaggaaaaaaaaagacccctaaaaagcctaaagctttaaattgtctccaaattcttaaaattagtcatctgtcttagatgtacatttatttgtcagcaaccttgtctgatttgaaatagatgatatgataaaacatgcattaacatgagtagtttatttttgttgggctccagagtgtaagaatattttattttttgtttgacataaaaagtgaagttgacttgcgtgaataacaatccagcatgctttcattctttctgaataacacagaataactgtgctacagcttctggattagttgtctatttccagttagaggagtgtgtgacatttatggtttgggaatagcatatttctaaagcataatataatacaagaaatagtgatgctctgttttcacaaatttatcttttcattcacccatccatccatttaacagatatttattgagtgcctatcttaggtgtaatagtatttaagactgaaagaaggagaatttctaacctgtcataagagtaaggtttcgtaaattcatctttcctgaacttaggcattagtttggcaatatgtgaatatgatgaactctaaacctagctgatctgtatatgtatgatgtatatatgtcatatgtatgatatatatgaaatattcccataactgcatatgaacacatatgccatatacatatataccaacgggctgaataacatactcttttgtcttggataatctgttttctgggttatgtatctgttgtctttggcctactcagggatttttatttctttaaataacttatcttttggacatatttttatattatttggaaaactttccaatattcctgttacaaagtggtgtctgttttcagtgatggctatttcatcagtgcttgaaatagtgtgcactgtgttgcacaggtttttcatttttctattgagtagatatttttaaattaacatacacatttttctctttaaagggtcatatctattaggcctttccctgctggtaacttaaaatgattatttgtgaattttttactaagtttcatcaagatcttaaaaagagagaagaaaataaaaagtattatttatatgtcagtgccaactttgaaggtaaaacagtagtagtaacttttgggagaaattctaaaaactactttaaaaagaagcgtgcacataaaataaatatctttctatccaaggcttgtcattttatatgcttttattgtaaatttaatatatactactttaaaaaattgaactatacagaatttataaaatacaactttctctacttaccccacctcttattttctaggggtaaccactgttaatggtttggtatgtgtccttccagacactttctacaaatatacaaataagtgtgtttgtgtatgtgtctgtgtgtgtattcattttatacaaatagaaaaatattcttactgtgctgtgactctttgtcattttattatatattaatagatacctttccataagcgtttaaatagatttacctcattcttttataaattactgcataatccattgtaggagtatactttaacttattgaattagtcccctgttgaatggactacaagattattttcacttctctattacaaagaaagcaagagtgaagacccttttgcatatatttttgtcaccttgcatgaacatatccataaggttgtacatttgttttttacaagatctttgtaataaacattttaatgtaatttcaggagatgaggtcatagagataatatgagacccttttttggataaaaagaaagattgtacaggagtgcataatttttaaagaaaatcgtcttttgaagggtaatttcctttctgcctgattagccaaataaataccttgccaaaacttacaataggaaattttttttcaataaaaataaaatttgaggagatgtgtgtcagataatgtgagagagatgaattgacttttggattgcctcattttaaaacttgagggatttaaatcaaatacccaagccaaattggtgatacttttcgcatttttagtaacactatccacttttgtgtatgttgcttgacagaggaacttaattatgccattgtgaaaagtaggaaagaatatgttggcaattataaatgcccacagcaattcccagaaaaatacattagattatgtacgatttagtgatttggtgggataattataaatcgtggaataatttatatatgtggagtaagaagagaggggtcaaaccttttggtacaagcaacatcttgttgccaccaccttgattttctcataggtgctattgtgtcctaagagtagaacagacaagaaaacaaagataattaaacacaagtcaggttacaacatgatatctttaattgtactttctctgctgtggtatcaagattcagtggtgcttgtcagaaaataccttgttctgtgactctgactatctcttgagtcccaaggctccaattgagcctttatctttcaaccttaccacccaagtatatgaccaactgttctcctaaaatacctatgaaccactgtaatcatttccagtccctgatgcccctcttcaacctcatttttctccatacctctgctattctaactattcctcttcactgaaggagaagaggagagacaggaggggcctaaaaactcactctggtatgtgggaaacattagaattccttcctgacctttgtcaaatgagggcacatctgccaagacatcagtccagcttctcccttgttaaatgaaattgtttttaacattacacttttatactggctgttacattagaattacaaaaaagttagtggcctctataaccttaattggcatactttactacaaaaataagaaaatgtatgccaaaaaacgtttttagattttaattttataagcaacctgcacataagccttaatgtgagtcttcacattggattatatttttattctcccatatttgtggctgaaatctctcccaactattgagagtgatctttcccatggtctgctttattgttttgtgttaatatctattataaatatagccttaaaattttgtaatgcactttaaaatatttgtgccatttaaataatgacaaagcaatcaatgcatacatttcaatggagacagtatacaaagttaaagcaactgatacatatatttcagtggagacagtaggataacagtgttagcaaatatgtgtcatctctttaaatttgggaggaatcagaagctaaagatttaaaacaaataaaacatacctgaagaaaagtagcaatttctgaaattgtagtaatcttggaatggttatcaaacctagcaaataatacttaataagtgttacctaatatacctaattggaatgtttgtttaaaatattaaattaatttatactgaaagttttaactgcaatttcataattcatgaattctataaaagaaatctccctcactaaaaatatgatcaatcaaaactaccagttttgcacaccaatcccaagtttaagcatattttgtatttaaagttataatttaattatgatactgtccccctaatatggaaaataagttacaaaattcttttttttttttttttttttttgagacagaggttctctcaatgttgcccaggctggtctcaaactcttgggctcaagcgatcctccctcctctgcctctggagtagctgggattacaagcacgtgcctactatgcctgtcttcaaaatcacattgttaatttttatagccacaattattaatttgataaaacaaataattttatagaagcattaaagtattatcagaacaaaatcagagttccaaaatttggggagtattttaagattgtgaaatgttaccttttggatgcaaaccaatgatacaaatctttaagaaagaattacagtgggactcctttgaaactctgattttgaaaatagaacaaatacacatttcatagccaaactttgtgtgggacttctattgttactaattgtaaggctgtaactttggttgacttcatccaaatccaagaaacagagtcacagtagtgagactattctcattgcttctttggagcattagctgaagctttaccatatcacataccttacaaaatccctatacatattgccagttttaaaagaatgtaattatgcatgttacaaactatatatatctttttggctagagaagtgactattttagaataacagtatgaatgtaaaaggcaataattttttttaaatacacaaaacattgccattgcccttttttgtcacttccttttttcttctaaaaattttcatttggtgtatctaactttgtatcacttaaattattcagacttactaagataaaaaatactttttttcagttctgtgctatattctgtcactctattccattattaatactaaatgactttccttgtgaaatgatacccacatactacaacatcaagctcctttttctcttaaatttcctaattatcttgatttttgcctctgcagtcttcttcccatcttggccaagtgtgggataaattctgtctcgcccgtaactcctttcactgtaatgaaatgaattcaacactgaacgcactccagaatttagctctggtagtgagcataatttaccttggcttattttatttgtaaatggaaatgtatcaggagtgcctggaacacttttccctcttgataggagttggagaacactgcctagccctctgccaagaagtaagtcaagcaaatgaagataccagttggatcagagggcctaataatagtctaaaaccaagcttcagaaattgcttcgtgactgttgtaagatcaatattgtgtttgcgtattagttggacagaaagcatgtgtggacattcatccaacctgaccccaggtcattcattctccatccaaaaagggttataggtatggtttatggtctttgtttcagcaaaacgtcctacagcttggacttggggtggatttatatagtgtagcatttgtatataagattcaattatggattcatgctctgtgaacattgttagatttttaataatctaaagtaggtcacattgaatgtaactgatattaaccctattctagagaaaacatttgtcatttgcaagtgtttgacttttttattgatatgatttagatatgccacactcaatatatttagtatagattcagtacataacaggaaagaaaaagggagagacagacttgagtgttaaaggaccccagaaattgctgaaatgtccttttagattcttgtggctggcaagctatgctgtcattggttctctgcgaatctgtgatgtgttcacttcgccatgccccagcttgggaaatattcttagtaatccaatcaaatccttaaaaacagcatttttgtgaatgtattacttcttcaatatccccatatatttgtattgtttcaagccactagtatctaaatttttgatataaatatctaaattctttcattttatagaaaattagcatgctttatgtttctttataatgaaaagtctagataaagtatcataatttcattatcagctgacaagaaacccttctaagacccatttttttaagtgtcatatggcaactcctcaatagcttacttttattatttgatcattttcatcacaattgcaatcctctagagggtattttaaaaagtagaccaaccttatgtttcacgtgaaacatagaataataattagtttgtatatatataaaaccatttaccttgacaaggacaatctgttacagatttttaatatgaaaattgacaattttgttgcttttagaagcaattaacatagtaattagtaaattctgagagatgacagaaatgattttctgtagaaggaacacaacagtgatgttaaaatgttaacaaagaaccagttgttttgattctattttaaacaaaattgtaaggcaattttatgaaacaaacatttatatcaatgtatatctatttcaaaactgtgggacaattattcattcttttcccaaatagagtaaaatattaaagagaaaaaaattcgagtgtttatctgttattactgtatattcagaaattacagttctaaggaattattgtcatcctctaagtatcagaatgtattccattttaattatattctccttaacaatagaaaattagaagaaatttcttgatcataagatgaatagtaatttgtaccagatcttgtccatcatttcattagattgcatatttttagttttctataaaatttgcagccattttccaaataaagtaagttataatatttttcaagtttaaaatggaccgggttgaaaagagatttcattgattctttttaatgatattggaaaatatttatgcaattttattttttaaccttttctccatttcattagttatactattaactttgataatcacaaaactatgtggaagaaatcattctgattatattttatgaaagagaggggtagagtaaattttttaattagacaatgttgatatgcagaaatctctcaaaagaaattgcaaaggaaaaattacgttgagatgaaatgttgagaaataaggagtatcttaaaaacctaatttcttacactttttagagcaatcaacttatttccaaattattatttcatgctgttgtttccatgaattgtgtttttagcatagtatatacttttctaccacgttagcatttacactctaattactgaaaataaaggaagaagttggtgaataaaagccagggaaactgggtttattctcattttccaatagcactaatgtataatccctttaaccttccatatggtgctttgtgtgatgagtatataacattcatatacgttattagtgccttatttttttcacttgactttatttcttatctaaagagccatatattttttgtgagtgttctttggtccctctatttaaagtgctaaggagaaagcatatctttagggatgtatataggctgcgtttgctaccttaatctactgtattatctctaaaacaggttagccaatgtatttttcttaaattcattgttcatttttaagctaacctatacaaatggatattaaacaccagaaattaaagccattaaaattgaattgtactttaaaaccataaaaaatgctaattaagtttagaacaggagttgaaatgactctcagttttatctatagctccaattaggacaaaattactttacaaaaagcattaaaaataaaagtaactgtatggtacttcaggaatttgaccagttccttacaacttattcttggcaatattttgtcagtaatatactttcatacagatgctagagaaccatggtgtctgctatttacatgttatttgttcccagtgagctttatcaacatcaaccctgtttatataatatgttattttgctcttcttgatctgtgccttttgttttagctttatacaaaatgctaggtttgttatattctttatgtatcataatatataattcaacttttcctgatgaatgtatgctgaataattaaactaaaccatgtgcttagaaaagacaaagacaggttgtatatgcagttatgtgtaaatatttgacaaagaaaaaaaaaggaaaagaatcttcctgccaacaggtaggtcctgctggacaggacctgaaaattaagagatttttttttttaagcagtgaaatttaaaaatctattacctcaagaattttcagtcgatatgtcaatgtactgttccttctcagtaagtacagtgtcacatgctgctggcggtaaaagcaacccaagtgtcagatcacacaaattttagggacaagtctttcaaaagacggacaccttgtgatattttggagtctaatttccgacttttcgtaatgtcccaatgaccttttgttgtggttgggcttttataaaaaattattttcggttggttgttgtagaatggaagagtaatcttaattatgaaatcagattgcatggaagaatataaagacactcactcggatgaaaactataacggttttcaaactattttgatggtcattgtacgagctattgtatggattactgtggagtgctgtttaccacatgatgtgtgcaatacatcatgcaatgttatttagcaatgcgtaataaaagtttttaaaagagaaaa

SEQ ID NO: 177429 - DNA, 5145 bp, Homo sapiens
  Payload ID: 14817
  Gene Symbol: RNF217
  Gene Name: ring finger protein 217
  ENST ID: ENST00000560949
  CDS Start-End: 784-1704
atgggcgaggagcagagcacggtgagcggcggcggcgggccccaggagtcgcagaccctggccagtggcactgcgggccaccctgagcccccgaggcctcagggggacagcgcccgggcgcccccgctgcgcgccgcctccgcggagccgagcggcggtggctgcggaagcgactggggctgcgcggacaccagcgccccagagcccgcgaggagcctggggcccccgggctggagtaagagccgagcaccggcgcagcctgcgggactggcactcaccgggcctctcaatccccagaccttgccactgcagttggagctggaggaggaagaggaggaagctggggatcgaaaagagggaggggatgaacagcaggaggcgccccccggcgaagagctggagcccaggacccgcgtgggggccgccgacggactggtcctggacgtgctgggtcagcggcgcccgtccctcgccaagagacaagtcttctgctccgtgtactgcgtggagagcgacctgcccgaggcccccgcctcggagcagctctcgccgcccgcgtcgccacctggggctccgccagtgttgaaccctcccagcacccgctcttccttccccagcccccgactgtccctcccaacggattccctctcccccgacggcggcagcatcgagctggagttctacctggcgcccgagccgttctccatgcccagcctgttgggagctccaccctactctggcctgggcggtgtaggggatccctatgtgcccctcatggtgctgatgtgccgggtgtgcctggaagacaagcccatcaagcccctgccttgctgcaagaaggccgtgtgcgaggagtgcctcaaagtctacctgagcgcccaggtacaacttggccaagtagaaatcaaatgccccatcacagagtgttttgaattcttggaagaaacaactgttgtctataacttaacgcatgaagactccatcaagtataagtacttcttggaacttggccgtattgattccagcaccaagccatgtcctcagtgcaagcactttacaaccttcaagaaaaaaggacatattcccaccccttccagatcagaaagcaaatacaaaatccagtgccctacctgccaattcgtctggtgttttaagtgccactctccttggcatgaaggtgttaactgcaaggagtacaaaaaaggagacaaattgttgcgtcactgggccagcgaaattgagcatgggcagaggaatgcccagaagtgtccaaagtgcaagatccacatccagcgaactgaaggatgtgaccatatgacctgctcacaatgtaacactaatttttgttaccgatgtggtgagagataccgccagctccgattttttggagaccacacatcaaacctcagtatatttggatgcaaatatcgctacctcccagagagacctcatttaaggagattagtgcgagggtcagtctgtgctggaaaattattcattgcacctctaattatggttttgggattggcactaggggccatagcggttgtaatcgttgaggaaattaagacttactggaacctcataagtggtagaaccaggaatcaaacccaacatttggctccacagcctgtgttgttaagtgatatgctatactgcctgaaacaagtgtttatttgtatttcctatctattgcctttgtaaaaaacagagaaaacgatcacggacaggtatgcactggtaacatgcagatgatttcatccagctaagctggttggagtaggagcgataccaaagggtacacccatctgtgagtcacatcttgaaaaacactgagaggaaccttctaccatctcatctcccagtgattctccgtgggccacaatgcctctagctatggtgcactcccaacatggtatcctgtcctttccctaaacaaattgctgctgcttttaaaaaatggtcactttcataaactataaacatctatatcataactctgacctttgtggttcttggaagaagatattttaagaaccagttatcctaagaattctgagcacgcctcttctgagaattgcttggactgtctttgaactctgcacctccttccaggccatcttgtgagacttggtgttaatagctgaagtcctatctgtaccaacaagcaaggccacttttcagaagataagagttcactgaatgcacctattataatctgtggccccagcagtataattcttttatctttcaaatgttataattgcaaaaaatctcaatgtccaaaagggaatgagtgaaactaaattaatgagaagaatattaagttactgaagtgtatatgcgtaggggcgtgaatgtgtgtgtatataaatatgtattaaaactaggcccagtaaccttgtacttacccagttccatgccgctacactatttttccacattttcatagacctattgaaagatgatggctcctttgtggacataatttagcaatgtattaaattaaagtcaatgtagacaacaggccatttcgatactgaacttttctatttcttgctctttctttttgtcacacaaacacagaaatttgtgcaacgtcaccccaaggagtattaagctttgtaaactgacaaaactggctgcttttaggaaattctcaagacacaaatattcagtctttttaaaattcttacattttggaaaacatgcttcactctatagatagatccttcacattgggattatttaatcccaaaaacaagtttgctgtagacaactgcttaagcctttaaaaaattcctattctgctaattttttaaccaacttgtaattatagataattctgctttaggtcaaggtcttacatcatttaatatcctaaccttgttatctcttgcctcctcctctctgtttttatttgttttcaaggtttttcataaaaacaaatactagttttgaaggattttttcttacatttaactgctcaaacataatatttttggggacaccttcttatggaggagtttgaaaactttttatgttcttgagtttgtccaatatcagctgcttttgggaaaggaaacaaaaaagtgaaggaaatattttcaggaagtttttctcaacctacaaaagctttaaaaataagaaattgacaagtaactagactatgatatgcctttgctttcatcacaaaagttcatcagcaaacaggaaaaaaaaagacccctaaaaagcctaaagctttaaattgtctccaaattcttaaaattagtcatctgtcttagatgtacatttatttgtcagcaaccttgtctgatttgaaatagatgatatgataaaacatgcattaacatgagtagtttatttttgttgggctccagagtgtaagaatattttattttttgtttgacataaaaagtgaagttgacttgcgtgaataacaatccagcatgctttcattctttctgaataacacagaataactgtgctacagcttctggattagttgtctatttccagttagaggagtgtgtgacatttatggtttgggaatagcatatttctaaagcataatataatacaagaaatagtgatgctctgttttcacaaatttatcttttcattcacccatccatccatttaacagatatttattgagtgcctatcttaggtgtaatagtatttaagactgaaagaaggagaatttctaacctgtcataagagtaaggtttcgtaaattcatctttcctgaacttaggcattagtttggcaatatgtgaatatgatgaactctaaacctagctgatctgtatatgtatgatgtatatatgtcatatgtatgatatatatgaaatattcccataactgcatatgaacacatatgccatatacatatataccaacgggctgaataacatactcttttgtcttggataatctgttttctgggttatgtatctgttgtctttggcctactcagggatttttatttctttaaataacttatcttttggacatatttttatattatttggaaaactttccaatattcctgttacaaagtggtgtctgttttcagtgatggctatttcatcagtgcttgaaatagtgtgcactgtgttgcacaggtttttcatttttctattgagtagatatttttaaattaacatacacatttttctctttaaagggtcatatctattaggcctttccctgctggtaacttaaaatgattatttgtgaattttttactaagtttcatcaagatcttaaaaagagagaagaaaataaaaagtattatttatatgtcagtgccaactttgaaggtaaaacagtagtagtaacttttgggagaaattctaaaaactactttaaaaagaagcgtgcacataaaataaatatctttctatccaaggcttgtcattttatatgcttttattgtaaatttaatatatactactttaaaaaattgaactatacagaatttataaaatacaactttctctacttaccccacctcttattttctaggggtaaccactgttaatggtttggtatgtgtccttccagacactttctacaaatatacaaataagtgtgtttgtgtatgtgtctgtgtgtgtattcattttatacaaatagaaaaatattcttactgtgctgtgactctttgtcattttattatatattaatagatacctttccataagcgtttaaatagatttacctcattcttttataaattactgcataatccattgtaggagtatactttaacttattgaattagtcccctgttgaatggactacaagattattttcacttctctattacaaagaaagcaagagtgaagacccttttgcatatatttttgtcaccttgcatgaacatatccataaggttgtacatttgttttttacaagatctttgtaataaacattttaatgtaatttcaggagatgaggtcatagagataatatgagacccttttttggataaaaagaaagattgtacaggagtgcataatttttaaagaaaatcgtcttttgaagggtaatttcctttctgcctgattagccaaataaataccttgccaaaacttacaataggaaattttttttcaataaaaataaaatttgagg

SEQ ID NO: 177430 - DNA, 3529 bp, Homo sapiens
  Payload ID: 14818
  Gene Symbol: RNF219
  Gene Name: ring finger protein 219
  Uniprot ID: Q5W0B1
  ENST ID: ENST00000282003
  CDS Start-End: 60-2240
ggcgaagagtagcggtaggtcggcgggacttccgtgttggcgggattctgaacgctgccatggctcagaccgtgcagaatgttacattgtcgctcactctgcccatcacgtgccacatttgcttggggaaggtacgtcagcctgtcatatgcatcaacaaccatgtattttgttcgatttgtattgatttgtggttgaagaataatagccagtgtccagcttgcagagtccccatcactcctgaaaatccttgcaaagaaattataggaggaacaagtgaaagtgaacctatgctaagccatacggtcaggaagcatcttcggaaaactagacttgaattactacacaaagaatatgaggacgaaatagattgtttacagaaagaagtagaagagcttaagagtaaaaatctcagcttggagtcacagatcaaaactattctggatcctttaaccttggtgcagggcaaccaaaatgaagacaaacatctagtcacagataatccaagtaaaattaacccagaaactgtagcagagtggaagaaaaaactcagaacagctaatgaaatctatgaaaaagtgaaagatgatgtggataagctaaaggaggcaaataaaaaattgaaattggaaaatggtggtctggtgagggagaatttacgactgaaggctgaagttgataacagatcacctcaaaagtttggaaggtttgcagttgctgctcttcagtccaaagtagaacagtatgagcgtgaaaccaatcgcctcaagaaagccctggaacgaagtgataagtatatagaggaactagaatctcaagttgcacagctaaaaaattcaagtgaagagaaagaagctatgaattccatttgccagacagcactttctgcagatggcaaagggagcaaaggcagtgaggaggatgtggtgtcaaagaatcaaggcgatagtgccagaaagcagcctggctcatccacctccagttcttctcacctagcgaagccttccagcagcagactgtgtgacaccagttctgcaaggcaggaaagtaccagcaaagcagaccttaactgttctaagaacaaagacctatatcaagaacaggtagaagtaatgttagatgtgacagatacaagtatggatacttatttggaaagagaatgggggaataaaccaagtgactgtgtaccctacaaagatgaagaactttatgatcttccagctccttgtactcctttgtcccttagttgccttcagctcagtactccagaaaatagagagagctctgtggtccaagcaggaggttccaaaaagcactcaaaccatctcagaaaattggtgtttgatgatttttgtgattcttcaaatgtttctaataaagattcttcagaagatgatataagtagaagtgaaaatgaaaagaaatcagaatgtttttcttccccaaagacaggattttgggactgttgttccacaagctatgcccaaaacttagattttgaaagttcagaggggaacacgatagcaaattctgttggagaaatatcttcaaaattgagtgagaaatcaggcttatgtttatccaaaaggttgaattctattcgctcttttgaaatgaaccggacaagaacatccagtgaagcatcgatggatgctgcttaccttgacaaaatctctgagttggattcaatgatgtcagagtcagacaacagcaagagcccttgtaataacggttttaagtcactggatttggatgggttatcaaagtcatctcaaggcagtgaatttcttgaggaacctgataagttggaagaaaaaactgagctaaacctttccaaaggttctctaactaatgatcagttagaaaatggaagtgaatggaaacccacttctttttttctcctctctccatctgaccaagaaatgaatgaagatttttcactccattccagttcttgtccagtaactaatgaaatcaaacccccaagctgcttgtttcagacagagttttcccagggcattttgttaagcagttcacatcgactatttgaagatcaaagatttgggtcatctttgtttaagatgtcctcagagatgcacagtcttcataaccaccttcagtctccttggtctacttcctttgtgcctgaaaagaggaataaaaatgtgaatcaatcaacaaaaagaaaaatccagagcagcctttccagtgccagcccatcaaaagcaactaaaagttgactcattagaaaggtgtcatttgtggttttgtcctgagagaaatagaaaagttgttaaagttaccttttttcctcataaaagttctatacaaattggaattgataatctttagtcaagtatcaagtcaggatggtggattaacctgtacccagaatacttattgttcattttgaaaagactttgttcttttcatttttatttgggagtctttgtgaccagagaagttagggaggaggttatttttgtgttttggggttggttggttggttggttttgtttttggttttgtttttttactgaatttgatatgtatctcggttggatatacattgtttttttaaaaaatgttatttaactgttagatacagtggcctgttgataagccccacttgtcttcagaacttggatttcttaaataaaacttttagtgttgtctatacactgctcaataagacacttgagtttaagcttttcccagggtggaaattattttacctgtccctttttatttatgtttagtgatggcctagtttttctgcagggccatgatggagaaatagcactctagccttagtccaatattgatttactttctttttttaggttttatgtatatgtttgcattttttagcattgtgttttgtccagttttgtgaaaatgttctgctagtatgaaagaaaacattttctatatgaagacatttgttttatgttaggtagcttacattttctcctctgcgtgtgtgtgtatgtgtgtaaaatcagaaatttagcatactatggaaagaaggcatggagcacttgggtttagaggaacctaaaacatcatagcttcattgttccagatgtaacaggtttgaaagagctcatcgccaagttcttgatccacttgcattccaggggagttttcttttgagtagtatgtttcttgtttgcatgttcctgttctttgtggaaactatgcatggtagcatttttgcttgctgtgttttccatacttaagaaaaagaggtttcagttggctgatagaatatcttttatgtaggacaaaacttttctgtgaagagtgttgagggggtgaagataggtaagaggtaagcacaatttttaatttaggctctgaaaaagtgtattgttctaaacgtatttggtatgcctatataggtctttaaaaatgggtatgtatgctgtttaatgtgcactgaacattttacattaatattgtactgttttacattaatactgcatgcttttctatgtgaattgaataaagaatgtcataagcactg

SEQ ID NO: 177431 - DNA, 1203 bp, Homo sapiens
  Payload ID: 14819
  Gene Symbol: RNF220
  Gene Name: ring finger protein 220
  ENST ID: ENST00000335497
  CDS Start-End: 424-1203
cgggcgatggggcggaaggagccccgcagcgggaggggtcgtggagtggggtggaaggacttcgcagccgctaaagattgggtgggtaggcttcacgggcggtgggagggaccccggggaggcttctgccggttgctacccgagtacaaacggcagcttcctggtctctgtccggccgcccccgccgcattgtgaactttcacccccagcgcgcgacggcggcagatcacgtgattagggccaacatggccgccgccgccgcttggagctgaagtgccgccgccgccgggcagccacggggaatccgcccgcatcgccgccctcgccggccgggcggccgtggggcccagagcgccggaggccagggctggggcggcaccgcgcagcggccacggggtcccgttagagcagcgcccggcggctatgccgagagcccggagcggccggaggagcagaggggccggcgggagggaggaaacctttctgcgagtacgagccaaccggcagacccgactgaatgctcggattgggaaaatgaaacggaggaagcaagatgaagggcaggtatgtcccctgtgcaaccgccccctggcaggatcggagcaggagatgagtaggcatgtggagcattgcctttctaagagggaaggctcctgcatggctgaggatgatgctgtggacatcgagcatgagaacaacaaccgctttgaggagtatgagtggtgtggacagaagcggatacgggccaccactctcctggaaggtggcttccgaggctctggcttcatcatgtgcagcggcaaagagaacccggacagtgatgctgacttggatgtggatggggatgacactctggagtatgggaagccacaatacacagaggctgatgtcatcccctgcacaggcgaggagcctggtgaagccaaggagagagaggcacttcggggcgcagtcctaaatggcggccctcccagcacgcgcatcacacctgagttctctaaatgggccagtgatgagatgccatccaccagcaatggtgaaagcagcaagcaggaggccatgcagaagacctgcaagaacagcgacatcgagaaaatcaccgaagattcagctgtgaccacgtttgaggctctgaaggctcgggtcagagaacttgaacggcagctatctcgtggggaccgttacaaatgcctcatctgcatg

SEQ ID NO: 177432 - DNA, 3099 bp, Homo sapiens
  Payload ID: 14819
  Gene Symbol: RNF220
  Gene Name: ring finger protein 220
  Uniprot ID: Q5VTB9
  ENST ID: ENST00000355387
  CDS Start-End: 451-2151
tgcgtgcgtgtgtgtgtgcgcgcgtgtgtgtgtctccgagtccctgggagagtggaggctcattcactgattagatccagcgctgagaggcagcactgctccttctctcacgccaactgagtctcttgatctgtacatgcaatcccaggcagctcgcgaacacaaacccggggccagccgcctactgctgctgctgctgctgccgctgccgccgccgccgccgccgctgcctccgccggctctgcgaacccgggacttttcatgcaccacactctccgcctgcttccctccgtgtcctgaaaagtgcgaccgttctcccaaggaatttccacggtcttaggagggaatgattccccagtaatattccctgccctgacccaaagtgctggttggcctccctcccagggaagactgcttcttgcgtaacgccggccacagaaagagactccgatggacttacaccgggcagccttcaagatggagaactcatcctaccttcccaaccctctggcatccccagcactgatggtcctggcatccacggctgaggccagccgtgatgcttccatcccttgtcagcagccacgaccctttggtgtacctgtctcagttgacaaggacgtgcatattcctttcaccaacggttcctatacctttgcctctatgtaccatcggcaaggtggggtgccaggcacttttgccaatcgtgatttccccccttctctactacacctccaccctcaatttgctcccccaaatctagattgcaccccaatcagtatgctgaatcatagtggtgtgggggctttccggccctttgcctccaccgaggaccgggagagctatcagtcagcctttacgccggccaagcgacttaagaactgccatgacacagagtctccccacttgcgcttctcagatgcagatggcaaggaatatgactttgggacacagctgccatctagctcccccggttcactaaaggttgatgacactgggaagaagatttttgctgtctctggcctcatttctgatcgggaagcctcatctagcccagaggatcggaatgacagatgtaagaagaaagcagcggcattgttcgacagccaggccccaatttgccccatctgccaggtcctgctgaggcccagtgagctgcaggagcatatggagcaggaactggagcagctagcccaactgccctcgagcaagaattcccttctgaaggatgccatggctccaggcaccccaaagtccctcctgttgtctgcttccatcaagagggaaggagagtctccaacggcatcaccccactcatctgccaccgatgacctccaccattcagacagataccagacctttctgcgagtacgagccaaccggcagacccgactgaatgctcggattgggaaaatgaaacggaggaagcaagatgaagggcagagggaaggctcctgcatggctgaggatgatgctgtggacatcgagcatgagaacaacaaccgctttgaggagtatgagtggtgtggacagaagcggatacgggccaccactctcctggaaggtggcttccgaggctctggcttcatcatgtgcagcggcaaagagaacccggacagtgatgctgacttggatgtggatggggatgacactctggagtatgggaagccacaatacacagaggctgatgtcatcccctgcacaggcgaggagcctggtgaagccaaggagagagaggcacttcggggcgcagtcctaaatggcggccctcccagcacgcgcatcacacctgagttctctaaatgggccagtgatgagatgccatccaccagcaatggtgaaagcagcaagcaggaggccatgcagaagacctgcaagaacagcgacatcgagaaaatcaccgaagattcagctgtgaccacgtttgaggctctgaaggctcgggtcagagaacttgaacggcagctatctcgtggggaccgttacaaatgcctcatctgcatggactcgtactcgatgcccctaacgtccatccagtgttggcacgtgcactgcgaggagtgctggctgcggaccctgggtgccaagaagctctgccctcagtgcaacacgatcacagcgcccggagacctgcggaggatctacttgtgagctatctgccccaggcaggcctcgcctccagcagccccacctgcccccagcctctgtgacagtgaccgtctccctttgtacatacttgcacacaggttccccatgtacatacatgcacatactcaaacatgcgtacacacacacacatttacacacgcaggactctggagccagagtagaggctgtggcccaggcactacctgctggctcccacctatggtttgggggccatacctgttccagctctgttcccagggtggggcagggaggtgggggttgggggagtagtggggcacggctcctaagatccagcccccatactgacagacggacagacagacatgcaaacaccagactgaagcacatgtaatatagaccgtgtatgtttacaatgttgtgtataaatgggacaactcctcgccctctacctgtcccctccccctttggttgtatgattttcttcttttttaagaacccctggaagcagcgcctccttcagggttggctgggagctcggcccatccacctcttggggtacctgcctctctctctcctgtggtgtcccttccctctcccatgtgctcggtgttcagtggtgtatatttcttctcccagacatggggcacacgccccaagggacatgatcctctccttagtcttagctcatggggctctttataaggagttggggggtagaggcaggaaatgggaaccgagctgaagcagaggctgagttagggggctagaggacagtgctcctggccacccagcctctgctgagaaccattcctgggattagagctgcctttcccagggaaaaagtgtcgtctccccgaccctcccgtgggccctgtggtgtgatgctgtgtctgtatattctatacaaaggtacttgtcctttccctttgtaaactacatttgacatggattaaaccagtataaacagtt

SEQ ID NO: 177433 - DNA, 3009 bp, Homo sapiens
  Payload ID: 14819
  Gene Symbol: RNF220
  Gene Name: ring finger protein 220
  Uniprot ID: Q5VTB9
  ENST ID: ENST00000361799
  CDS Start-End: 361-2061
actgctccttctctcacgccaactgagtctcttgatctgtacatgcaatcccaggcagctcgcgaacacaaacccggggccagccgcctactgctgctgctgctgctgccgctgccgccgccgccgccgccgctgcctccgccggctctgcgaacccgggacttttcatgcaccacactctccgcctgcttccctccgtgtcctgaaaagtgcgaccgttctcccaaggaatttccacggcaagtcttaggagggaatgattccccagtaatattccctgccctgacccaaagtgctggttggcctccctcccagggaagactgcttcttgcgtaacgccggccacagaaagagactccgatggacttacaccgggcagccttcaagatggagaactcatcctaccttcccaaccctctggcatccccagcactgatggtcctggcatccacggctgaggccagccgtgatgcttccatcccttgtcagcagccacgaccctttggtgtacctgtctcagttgacaaggacgtgcatattcctttcaccaacggttcctatacctttgcctctatgtaccatcggcaaggtggggtgccaggcacttttgccaatcgtgatttccccccttctctactacacctccaccctcaatttgctcccccaaatctagattgcaccccaatcagtatgctgaatcatagtggtgtgggggctttccggccctttgcctccaccgaggaccgggagagctatcagtcagcctttacgccggccaagcgacttaagaactgccatgacacagagtctccccacttgcgcttctcagatgcagatggcaaggaatatgactttgggacacagctgccatctagctcccccggttcactaaaggttgatgacactgggaagaagatttttgctgtctctggcctcatttctgatcgggaagcctcatctagcccagaggatcggaatgacagatgtaagaagaaagcagcggcattgttcgacagccaggccccaatttgccccatctgccaggtcctgctgaggcccagtgagctgcaggagcatatggagcaggaactggagcagctagcccaactgccctcgagcaagaattcccttctgaaggatgccatggctccaggcaccccaaagtccctcctgttgtctgcttccatcaagagggaaggagagtctccaacggcatcaccccactcatctgccaccgatgacctccaccattcagacagataccagacctttctgcgagtacgagccaaccggcagacccgactgaatgctcggattgggaaaatgaaacggaggaagcaagatgaagggcagagggaaggctcctgcatggctgaggatgatgctgtggacatcgagcatgagaacaacaaccgctttgaggagtatgagtggtgtggacagaagcggatacgggccaccactctcctggaaggtggcttccgaggctctggcttcatcatgtgcagcggcaaagagaacccggacagtgatgctgacttggatgtggatggggatgacactctggagtatgggaagccacaatacacagaggctgatgtcatcccctgcacaggcgaggagcctggtgaagccaaggagagagaggcacttcggggcgcagtcctaaatggcggccctcccagcacgcgcatcacacctgagttctctaaatgggccagtgatgagatgccatccaccagcaatggtgaaagcagcaagcaggaggccatgcagaagacctgcaagaacagcgacatcgagaaaatcaccgaagattcagctgtgaccacgtttgaggctctgaaggctcgggtcagagaacttgaacggcagctatctcgtggggaccgttacaaatgcctcatctgcatggactcgtactcgatgcccctaacgtccatccagtgttggcacgtgcactgcgaggagtgctggctgcggaccctgggtgccaagaagctctgccctcagtgcaacacgatcacagcgcccggagacctgcggaggatctacttgtgagctatctgccccaggcaggcctcgcctccagcagccccacctgcccccagcctctgtgacagtgaccgtctccctttgtacatacttgcacacaggttccccatgtacatacatgcacatactcaaacatgcgtacacacacacacatttacacacgcaggactctggagccagagtagaggctgtggcccaggcactacctgctggctcccacctatggtttgggggccatacctgttccagctctgttcccagggtggggcagggaggtgggggttgggggagtagtggggcacggctcctaagatccagcccccatactgacagacggacagacagacatgcaaacaccagactgaagcacatgtaatatagaccgtgtatgtttacaatgttgtgtataaatgggacaactcctcgccctctacctgtcccctccccctttggttgtatgattttcttcttttttaagaacccctggaagcagcgcctccttcagggttggctgggagctcggcccatccacctcttggggtacctgcctctctctctcctgtggtgtcccttccctctcccatgtgctcggtgttcagtggtgtatatttcttctcccagacatggggcacacgccccaagggacatgatcctctccttagtcttagctcatggggctctttataaggagttggggggtagaggcaggaaatgggaaccgagctgaagcagaggctgagttagggggctagaggacagtgctcctggccacccagcctctgctgagaaccattcctgggattagagctgcctttcccagggaaaaagtgtcgtctccccgaccctcccgtgggccctgtggtgtgatgctgtgtctgtatattctatacaaaggtacttgtcctttccctttgtaaactacatttgacatggattaaaccagtataaacagtt

SEQ ID NO: 177434 - DNA, 3010 bp, Homo sapiens
  Payload ID: 14819
  Gene Symbol: RNF220
  Gene Name: ring finger protein 220
  Uniprot ID: Q5VTB9
  ENST ID: ENST00000372247
  CDS Start-End: 361-2061
actgctccttctctcacgccaactgagtctcttgatctgtacatgcaatcccaggcagctcgcgaacacaaacccggggccagccgcctactgctgctgctgctgctgccgctgccgccgccgccgccgccgctgcctccgccggctctgcgaacccgggacttttcatgcaccacactctccgcctgcttccctccgtgtcctgaaaagtgcgaccgttctcccaaggaatttccacggcaagtcttaggagggaatgattccccagtaatattccctgccctgacccaaagtgctggttggcctccctcccagggaagactgcttcttgcgtaacgccggccacagaaagagactccgatggacttacaccgggcagccttcaagatggagaactcatcctaccttcccaaccctctggcatccccagcactgatggtcctggcatccacggctgaggccagccgtgatgcttccatcccttgtcagcagccacgaccctttggtgtacctgtctcagttgacaaggacgtgcatattcctttcaccaacggttcctatacctttgcctctatgtaccatcggcaaggtggggtgccaggcacttttgccaatcgtgatttccccccttctctactacacctccaccctcaatttgctcccccaaatctagattgcaccccaatcagtatgctgaatcatagtggtgtgggggctttccggccctttgcctccaccgaggaccgggagagctatcagtcagcctttacgccggccaagcgacttaagaactgccatgacacagagtctccccacttgcgcttctcagatgcagatggcaaggaatatgactttgggacacagctgccatctagctcccccggttcactaaaggttgatgacactgggaagaagatttttgctgtctctggcctcatttctgatcgggaagcctcatctagcccagaggatcggaatgacagatgtaagaagaaagcagcggcattgttcgacagccaggccccaatttgccccatctgccaggtcctgctgaggcccagtgagctgcaggagcatatggagcaggaactggagcagctagcccaactgccctcgagcaagaattcccttctgaaggatgccatggctccaggcaccccaaagtccctcctgttgtctgcttccatcaagagggaaggagagtctccaacggcatcaccccactcatctgccaccgatgacctccaccattcagacagataccagacctttctgcgagtacgagccaaccggcagacccgactgaatgctcggattgggaaaatgaaacggaggaagcaagatgaagggcagagggaaggctcctgcatggctgaggatgatgctgtggacatcgagcatgagaacaacaaccgctttgaggagtatgagtggtgtggacagaagcggatacgggccaccactctcctggaaggtggcttccgaggctctggcttcatcatgtgcagcggcaaagagaacccggacagtgatgctgacttggatgtggatggggatgacactctggagtatgggaagccacaatacacagaggctgatgtcatcccctgcacaggcgaggagcctggtgaagccaaggagagagaggcacttcggggcgcagtcctaaatggcggccctcccagcacgcgcatcacacctgagttctctaaatgggccagtgatgagatgccatccaccagcaatggtgaaagcagcaagcaggaggccatgcagaagacctgcaagaacagcgacatcgagaaaatcaccgaagattcagctgtgaccacgtttgaggctctgaaggctcgggtcagagaacttgaacggcagctatctcgtggggaccgttacaaatgcctcatctgcatggactcgtactcgatgcccctaacgtccatccagtgttggcacgtgcactgcgaggagtgctggctgcggaccctgggtgccaagaagctctgccctcagtgcaacacgatcacagcgcccggagacctgcggaggatctacttgtgagctatctgccccaggcaggcctcgcctccagcagccccacctgcccccagcctctgtgacagtgaccgtctccctttgtacatacttgcacacaggttccccatgtacatacatgcacatactcaaacatgcgtacacacacacacatttacacacgcaggactctggagccagagtagaggctgtggcccaggcactacctgctggctcccacctatggtttgggggccatacctgttccagctctgttcccagggtggggcagggaggtgggggttgggggagtagtggggcacggctcctaagatccagcccccatactgacagacggacagacagacatgcaaacaccagactgaagcacatgtaatatagaccgtgtatgtttacaatgttgtgtataaatgggacaactcctcgccctctacctgtcccctccccctttggttgtatgattttcttcttttttaagaacccctggaagcagcgcctccttcagggttggctgggagctcggcccatccacctcttggggtacctgcctctctctctcctgtggtgtcccttccctctcccatgtgctcggtgttcagtggtgtatatttcttctcccagacatggggcacacgccccaagggacatgatcctctccttagtcttagctcatggggctctttataaggagttggggggtagaggcaggaaatgggaaccgagctgaagcagaggctgagttagggggctagaggacagtgctcctggccacccagcctctgctgagaaccattcctgggattagagctgcctttcccagggaaaaagtgtcgtctccccgaccctcccgtgggccctgtggtgtgatgctgtgtctgtatattctatacaaaggtacttgtcctttccctttgtaaactacatttgacatggattaaaccagtataaacagttg

SEQ ID NO: 177435 - DNA, 1200 bp, Homo sapiens
  Payload ID: 14819
  Gene Symbol: RNF220
  Gene Name: ring finger protein 220
  ENST ID: ENST00000440132
  CDS Start-End: 424-1200
cgggcgatggggcggaaggagccccgcagcgggaggggtcgtggagtggggtggaaggacttcgcagccgctaaagattgggtgggtaggcttcacgggcggtgggagggaccccggggaggcttctgccggttgctacccgagtacaaacggcagcttcctggtctctgtccggccgcccccgccgcattgtgaactttcacccccagcgcgcgacggcggcagatcacgtgattagggccaacatggccgccgccgccgcttggagctgaagtgccgccgccgccgggcagccacggggaatccgcccgcatcgccgccctcgccggccgggcggccgtggggcccagagcgccggaggccagggctggggcggcaccgcgcagcggccacggggtcccgttagagcagcgcccggcggctatgccgagagcccggagcggccggaggagcagaggggccggcgggagggaggaaacctttctgcgagtacgagccaaccggcagacccgactgaatgctcggattgggaaaatgaaacggaggaagcaagatgaagggcagagggaaggctcctgcatggctgaggatgatgctgtggacatcgagcatgagaacaacaaccgctttgaggagtatgagtggtgtggacagaagcggatacgggccaccactctcctggaaggtggcttccgaggctctggcttcatcatgtgcagcggcaaagagaacccggacagtgatgctgacttggatgtggatggggatgacactctggagtatgggaagccacaatacacagaggctgatgtcatcccctgcacaggcgaggagcctggtgaagccaaggagagagaggcacttcggggcgcagtcctaaatggcggccctcccagcacgcgcatcacacctgagttctctaaatgggccagtgatgagatgccatccaccagcaatggtgaaagcagcaagcaggaggccatgcagaagacctgcaagaacagcgacatcgagaaaatcaccgaagattcagctgtgaccacgtttgaggctctgaaggctcgggtcagagaacttgaacggcagctatctcgtggggaccgttacaaatgcctcatctgcatggactcgtactcgatgcccctaacgtccatccagtgttggcacgtgcactgcgaggagtgctggctgcggaccctg

SEQ ID NO: 177436 - DNA, 361 bp, Homo sapiens
  Payload ID: 14819
  Gene Symbol: RNF220
  Gene Name: ring finger protein 220
  ENST ID: ENST00000453863
  CDS Start-End: 1-361
ggaaggagagtctccaacggcatcaccccactcatctgccaccgatgacctccaccattcagacagataccagacctttctgcgagtacgagccaaccggcagacccgactgaatgctcggattgggaaaatgaaacggaggaagcaagatgaagggcaggtatgtcccctgtgcaaccgccccctggcaggatcggagcaggagatgagtaggcatgtggagcattgcctttctaagagggaaggctcctgcatggctgaggatgatgctgtggacatcgagcatgagaacaacaaccgctttgaggagtatgagtggtgtggacagaagcggatacgggccaccactctcctggaaggt

SEQ ID NO: 177437 - DNA, 860 bp, Homo sapiens
  Payload ID: 14819
  Gene Symbol: RNF220
  Gene Name: ring finger protein 220
  ENST ID: ENST00000488865
  CDS Start-End: 172-309
ccgccgccgcttggagctgaagtgccgccgccgccgggcagccacggggaatccgcccgcatcgccgccctcgccggccgggcggccgtggggcccagagcgccggaggccagggctggggcggcaccgcgcagcggccacggggtcccgttagagcagcgcccggcggctatgccgagagcccggagcggccggaggagcagaggggccggcgggagggaggaagtagacctttctgcgagtacgagccaaccggcagacccgactgaatgctcggattgggaaaatgaaacggaggaagcaagatgaagggcaggtatgtcccctgtgcaaccgccccctggcaggatcggagcaggagatgagtaggcatgtggagcattgcctttctaagagggaaggctcctgcatggctgaggatgatgctgtggacatcgagcatgagaacaacaaccgctttgaggagtatgagtggtgtggacagaagcggatacgggccaccactctcctggaaggtggcttccgaggtacaagcagctgacacgtagacattggcactctggtgccaggcctctgctgggtatccatctgctggaagccaagaggccgaggctggtggctggtcatccatccgttccaccacgtggggactgctgctggtggggctcctttgtgaccgtgctgcctgcctgtgatgtgcatattaaaatggatgtatttgggtggggaaatggaattgtgaggctgcaagctaggagtgacgaaggggggctctcagcttcgggtgatgcattgaaggtgacagccaagccgcgttagcacctgcataaaatattaaagggacggttatgcatttatca

SEQ ID NO: 177438 - DNA, 2786 bp, Homo sapiens
  Payload ID: 14820
  Gene Symbol: RNF222
  Gene Name: ring finger protein 222
  Uniprot ID: A6NCQ9
  ENST ID: ENST00000344001
  CDS Start-End: 29-691
cagctgagcgtgccatctcccagtggccatgtcagaaggggagagcaaggacagctcgggcagtgagtgccccgtgtgctatgagaagttccgggacctggagggcgccagccggacgctgagctgtggccatgtgttctgccatgactgcctggtcaagtacctgctgtccacccgcgtggatgggcaggtccagaggaccctggtctgccccatctgccgctacgtcacattcctcagcaagaagagctcccgctggccctccatgctggacaagagctcccagacgctggctgtgcccgtgggcctgccctccgtgcccccactggacagcctgggccacacaaaccccctggccgcctcctcccctgcctggaggccacctccaggccaggccaggccgccaggcagcccgggccagagcgcccagctccccctggacctgctgcccagcctgccccgggagtcacagatctttgtcatcagccgccacgggatgcccctgggggagcaggacagcgtgctgccccgccgcagcctggcagagctctcggaggcctccctggcgccccgctccgcccgcgccttctgctgccgatcgcgggccctgctgctcatcacgctcatcgctgtggtggccgtggtggccgccatcctgccctgggtgctgctggtgaggaagcaggcgtgagccgcacctcagggaggccgccgggctagccgtggcctggggtgggacaggaggcccacggcagccctggtgccaccaagctccgaggggcacgcgggcaggcagaggggaggacctgggcacagagagggccttgggcttccccgacccccgcaggggcttccgctcgacagagaggctggagctgactccatgcgcgcggcgcgtgttccccacgtgaatcctcagcagatgcgttccccttcctctaggctgggaagatgggtggtcactgccctcctgcaggctcaccagccctgagcggcagaccttacctgccaggtgacctgcccaaagccaggtgggcccctccagggacaagaaagtcctgcaggcagacgtcctgctgggctggccgatggcaggatcctccaggccagaattcccacccaggatttgcggcttgccctcgggaacagacagaaggggcgcccagaatctcagcactcacccccgacctccaccacagcaccccatcccctaaccctccctgtccccaacctgccagcttagaagggcttccctgaaggagaagctgatctcagaggctgccccagaatttctgggagaatgaacagaaactgttcttcctgcagagctgaggccagatccagagacaggggttggttgatagaggccaccccagcagagtgccccacgaacggagccagaggtctccctgagccctccaggccaaaggagggatccaaactttgagtcctggggttctcaagggtggcagggagtggaggggaagcctgacaggcgagccttgagtcagctgagaactatgtgggcaaacgaacccctgggggctcccgcctccctcccagctagtcctcctcctcatgacccagccactcatttagaggccacaccagctgggccagtttcctaggtggattgccaggctgggctgggtgaggaagggtggggaggaaaacagctgtgcttgtcagggacgccgccatctcaaccgagaaatgctgaggcccaggtgccctcagctgctcctcaaggtctctttgcctggggcccccacgttggactgtgaagagcctcaggttgggtctagcctgagtcattcggggatagctattggctgtttattgaggtccgtaagtcaaccaacacctttcaatggaaaacaacaaaaacctccagcaattatctcaactaagtggtggtctgcacccagctgtgcccacagctgagcccccaacctccctcaacctatacccctctgggcaatttgctgtcttggtggggagggaagaaatagcagtctacgttttatctagttcctaaatgcctgcagtgctggtcatttggggaccgctggggaattgggccccactacaggggatatttgggacatagagagggctgctttaaaagcacttgtgggcttctctgtgctcatttcaagattacagaagtggccaggcacggtggctcatgtctgtaatcccagcactttgggaggccgaggtgggtggatcacaaggtcaggagttcgagaccagcctggccaatatggtgaaaccgcgtctctactaaaaatacaaaaattagccaggagtggtggcacgtgcctgtaatcccagctacctgggagagacagaagattcgcttgaacccgggaggcggaggttgcagtgagccgagatcgcgccactgcactccagcctgggtgacagagcgagactctgtctaaaaaaaaaaaaaaattacagaagagcacaggtgctattggaggggagggatacagatggattccatggggaaaatatttattataggaataaaaataatgttaaatttgcaaagactccaatgagtctcttttaacctcagccaggctgttttaaacagtgtcatgaatttctgggaacctggttctagtcttttcagattctgtcgtatttgccaaaagtttctttcaacatactctcagtgtttttgtatgttcaatggtgacctgtagctgcaactccttttattgtcagagaatgccaaaagctatttttaaaataaaggtatatattttctcaaa

SEQ ID NO: 177439 - DNA, 3062 bp, Homo sapiens
  Payload ID: 14820
  Gene Symbol: RNF222
  Gene Name: ring finger protein 222
  Uniprot ID: A6NCQ9
  ENST ID: ENST00000399398
  CDS Start-End: 310-972
tcattaggaattgcctcggcggtggcggtcacactaacagcaacaggaggagatcgtgctgctgctcagcacctcggggtggctcagatctgctggaggccccaggagggaaggtggatgctgctctctccgacttggctaccagtgacttctgggcatttccaaagtatcagacatattctcaaaggatgaaattctgtctccatcacggttaatcagatgcttctctcactgcctcaggcagccccataagaagaatttggagaatgactgagctgtggcagctgagcgtgccatctcccagtggccatgtcagaaggggagagcaaggacagctcgggcagtgagtgccccgtgtgctatgagaagttccgggacctggagggcgccagccggacgctgagctgtggccatgtgttctgccatgactgcctggtcaagtacctgctgtccacccgcgtggatgggcaggtccagaggaccctggtctgccccatctgccgctacgtcacattcctcagcaagaagagctcccgctggccctccatgctggacaagagctcccagacgctggctgtgcccgtgggcctgccctccgtgcccccactggacagcctgggccacacaaaccccctggccgcctcctcccctgcctggaggccacctccaggccaggccaggccgccaggcagcccgggccagagcgcccagctccccctggacctgctgcccagcctgccccgggagtcacagatctttgtcatcagccgccacgggatgcccctgggggagcaggacagcgtgctgccccgccgcagcctggcagagctctcggaggcctccctggcgccccgctccgcccgcgccttctgctgccgatcgcgggccctgctgctcatcacgctcatcgctgtggtggccgtggtggccgccatcctgccctgggtgctgctggtgaggaagcaggcgtgagccgcacctcagggaggccgccgggctagccgtggcctggggtgggacaggaggcccacggcagccctggtgccaccaagctccgaggggcacgcgggcaggcagaggggaggacctgggcacagagagggccttgggcttccccgacccccgcaggggcttccgctcgacagagaggctggagctgactccatgcgcgcggcgcgtgttccccacgtgaatcctcagcagatgcgttccccttcctctaggctgggaagatgggtggtcactgccctcctgcaggctcaccagccctgagcggcagaccttacctgccaggtgacctgcccaaagccaggtgggcccctccagggacaagaaagtcctgcaggcagacgtcctgctgggctggccgatggcaggatcctccaggccagaattcccacccaggatttgcggcttgccctcgggaacagacagaaggggcgcccagaatctcagcactcacccccgacctccaccacagcaccccatcccctaaccctccctgtccccaacctgccagcttagaagggcttccctgaaggagaagctgatctcagaggctgccccagaatttctgggagaatgaacagaaactgttcttcctgcagagctgaggccagatccagagacaggggttggttgatagaggccaccccagcagagtgccccacgaacggagccagaggtctccctgagccctccaggccaaaggagggatccaaactttgagtcctggggttctcaagggtggcagggagtggaggggaagcctgacaggcgagccttgagtcagctgagaactatgtgggcaaacgaacccctgggggctcccgcctccctcccagctagtcctcctcctcatgacccagccactcatttagaggccacaccagctgggccagtttcctaggtggattgccaggctgggctgggtgaggaagggtggggaggaaaacagctgtgcttgtcagggacgccgccatctcaaccgagaaatgctgaggcccaggtgccctcagctgctcctcaaggtctctttgcctggggcccccacgttggactgtgaagagcctcaggttgggtctagcctgagtcattcggggatagctattggctgtttattgaggtccgtaagtcaaccaacacctttcaatggaaaacaacaaaaacctccagcaattatctcaactaagtggtggtctgcacccagctgtgcccacagctgagcccccaacctccctcaacctatacccctctgggcaatttgctgtcttggtggggagggaagaaatagcagtctacgttttatctagttcctaaatgcctgcagtgctggtcatttggggaccgctggggaattgggccccactacaggggatatttgggacatagagagggctgctttaaaagcacttgtgggcttctctgtgctcatttcaagattacagaagtggccaggcacggtggctcatgtctgtaatcccagcactttgggaggccgaggtgggtggatcacaaggtcaggagttcgagaccagcctggccaatatggtgaaaccgcgtctctactaaaaatacaaaaattagccaggagtggtggcacgtgcctgtaatcccagctacctgggagagacagaagattcgcttgaacccgggaggcggaggttgcagtgagccgagatcgcgccactgcactccagcctgggtgacagagcgagactctgtctaaaaaaaaaaaaaaattacagaagagcacaggtgctattggaggggagggatacagatggattccatggggaaaatatttattataggaataaaaataatgttaaatttgcaaagactccaatgagtctcttttaacctcagccaggctgttttaaacagtgtcatgaatttctgggaacctggttctagtcttttcagattctgtcgtatttgccaaaagtttctttcaacatactctcagtgtttttgtatgttcaatggtgacctgtagctgcaactccttttattgtcagagaatgccaaaagctatttttaaaataaaggtatatattttc

SEQ ID NO: 177440 - DNA, 1902 bp, Homo sapiens
  Payload ID: 14821
  Gene Symbol: RNF223
  Gene Name: ring finger protein 223
  Uniprot ID: E7ERA6
  ENST ID: ENST00000453464
  CDS Start-End: 302-1051
agcaactcacacctgcctcagaccagagctctgtgcgggtgacggcgcacgcattccttgtgtccccgcctgtcttggacagagcagaagccacacctgccagaccagtgccaccgggacagctgctggtggccggccccggggagggatacctgctgggtgaagcacaggccgggccgggcccggagaagaggaagcagacactgccacggcagggcagcccagggccttggagcccaaccgtggccggcgaggaggaccacgcccaggcccgctgacccccggccaccagctcagagacatgtcgtcaggccagcaggtgtggcacacggctgtgccaccccctcgccggagcagctccatagcctcgatgcccaggtcccccagctcggccggcagccccaggtcccctggcacccctggctcggagagggtggcctcccccctggagtgctccatctgtttctcaggctatgacaacatcttcaagacacccaaggagctctcctgcacccacgtcttctgcctggagtgcctggcccggctggcggctgctcagcctgtgggccgccccggtggtgaggctgtaccttgccccttctgcaggcagcccacggccgtgccgcccgccggagcccccgcgctgtgcaccagccgccagctgcaggcccggatgccggcgcatttgcggcgtgaggagcctgtgtggctggagggcaccaagctgtgctgccagccactgcccaccacacctggccgcgagcccggtttcgtatgcgtggacgtgggtttgagcaagcctgccgagccgcccgcgcccgcccgggaccctgccccccgccggggccgcctggcccgctgctgggcgcgctgcagggactggaggcgcatggcactggtctctgccctgctgctgatgctcttctgtgtggcactctggccggtgcagtgcgcgctcaagaccgggaacctgcgctgcctgcccctgcccccccggcccccggccaccagcacagccgcctcccccctcgggcctctgactgataattagggccagcagcctctgcccaggtcagccgccctcgcccagctccatggggcgtcccccactggggggcccaagggcacagcagccactggaagtcggtccccgaggacgcgaaaggagcctggcatctctgaggactccaccggggccccaccaagaccaggctccatttagcttgtccacccctcattctccaggctgggtcctgacggggtggacaagaggatccccaaagcctccaagaaccacagtctcaccgggcgcggtggctcacgcctgtcatctcagcactctggagggctgaggcagaaagaccacttgaggtcgggattttgacaccagcctggccaacatggtgaaaccccatctctactaaaaatacaaaaattaaccgggcatcgtggtgggtgcctcttagctactggggaggctgaggcaggagaactgcttgaaccggggaggtggaggtggcagtgagccaagattgcaccactgcatccagcctgggcgacagagggagaccctgtctcaaaacaaaacaaaaaaaaacaggctcgtacaggaagggtccaggagagcagctggtcagcatcccccccacccacacaccctgtgaactgcctgccagggaagccccttgccaagaaggaaggggccttgccgtgcttccactcatgctgacatttccccgcagggctggtcctgccattgggtgggggtgctcatcttgccctcggactgtggggagagagtggaggcagggcagccccccagtgcaaggtaaccacagaaacttccagctacccctccaaccttgtgaattgtaccttttaaaataaattatttgtatccat

SEQ ID NO: 177441 - DNA, 1798 bp, Homo sapiens
  Payload ID: 14822
  Gene Symbol: RNF224
  Gene Name: ring finger protein 224
  Uniprot ID: P0DH78
  ENST ID: ENST00000445101
  CDS Start-End: 776-1246
cctgaccctgtgccaggacttagcgtgccaggctccccgccttgccccgttgctggcccccaccagagggtgaccacacccaggccagccacgagaacttgtctgaccagtcctgggggcagactgccaagaaggtgggcaggggtgaggaggggccatttgcttccacccagcggggctgtgagtggttctggggtcctgcccacctgtcccaacccttcttggtccctcaactctgctctgcctgcagtctggtgtggacacactgatcatacctcccggaacctgggcctcccagggtggcctggaggctgcagacgggcagagcagccaggagctgcccaccaaggaggcgtctggcactgtctggggtcccgagctgggagcggggatccccagacacggagctggtgcgccacctggagtccatgtggactggtgcagccctctgccgtccagccggcatcaaggtgaggctgagaagccacacagatccacagacaagcacagtggcaaagtctgcagaaggctctgagccaggagggaaccctggcaggcttcctagaggaggagatgtgagcagaggccaagatctagtttcaaggctttgtggctgaaacgggagcccacgcccgccacagctggccacctgcctctctcctgactcccgtgcaaggccagtaatgcaacccaggagggagccgcagggcgccctgggtcccccactcccttctccggccaccccgtggctgtgcatagctgcccagcagagcccatgcaggatgctgcagccggagggcccccaggcctcggaggaggggggcccccggaggagaggacagactgcatcatctgctgctcggcctatgacctctccgggcacctgccccgccgcctctactgtggacacaccttctgccaggcgtgtgtgcggcggctggacacaccggcgcccgagcagcgctggatcccctgtccgcagtgccgtcagagcacgcccacgcctcgcggaggggtggccatgctagacctggacctggctgctttcctggcggtcaaggctgagcgggagccggcaagactagaacccctgcccctcacctccctcaaaggcagcgccatcactcggcagccagctgggctgtgccctgccctgggaccccagccccacttcccccagcccagatactgctgctggggctgtggcagcctctgctgcccacccctaggcagccccgaggtctgaactctggccattcccacccctgcaggggaaatgcctgccttggaacccctgaccacacaccatcatgggttcagcccactcagaacaacctggcagtagcatcctatacgcagcttcgtgtggcccagcagggtggtgtcatcccagccgtgaacatcccaggccacagcctaaggttgggggctgggaggctccgcaggaggctggtgacctcccacctgtcctggccacaattaccagaccccagactagcccgaccggatgtgcctggtgaggacactgctgtctgagtgggcggcaagcctggcttgggcctagacgcagcgcaaaggatggctcccaagaggatgcgaaggcgtcccgggggcctgggctgcaggctggaggggcagggccggtctggctatgcctggcgggctgcccagagcaggtctcccctctcccacagacgtccccggggtgtaccgggagggtggcaagactacctccttcctccctgccctgcatggcagccctgtgaattcacccactcaacaaagctcatggagttcc

SEQ ID NO: 177442 - DNA, 990 bp, Homo sapiens
  Payload ID: 14823
  Gene Symbol: RNF225
  Gene Name: ring finger protein 225
  Uniprot ID: M0QZC1
  ENST ID: ENST00000601382
  CDS Start-End: 1-990
atgccctgccctcggccgttctggctccgccattcccgggccccccagggctcgggtcccagctccccaggctcgctctctgcgccccgctccccaagcagaggggaagaccaggaggaggaggaggaggaggaaggggacggcagcccaggctccggccctatcctgccccccgcctccccggtggagtgcctcatctgcgtgtcgtccttcgacggcgtgttcaagctgcccaagcgcctggactgcggccacgtcttctgtctcgagtgcctggcgcgcctatcgttggccacggcgggcggcggcaacgcggtggcctgtccggtgtgccgcgcgcccacgcgcctggccccccgccgcggactccccgcgttgcccacgcagtccggtctcctgccccgcgacgcgcgcgcaccgccctctcgccagggctccgtgcgcttcgaccggcgccgcggccttctctacctgcggccgccgccgcccccgcccgggccgcgcaaggcccgcgccccgccgcccccgccgcctctgcgcctgggccgcccgctgtcgcgccgcttgtcgctggccagcccggcctgggtcttcaacgctgccgtggcgctggcggtgctggtggccgcgggcctcgtggtctcgggcgtctacatcttcttcctcatcccgcacgccacctcctccggccccccgcggccccagctcgtggcgctcgctccagcgcctggcttctcttggtttccgccgaggcccccgccggggtcgccctgggcccccgcctggacgccgcgccccacgggccctgacctggacacggccctgccaggaactgcagaagatgcgctggagcccgaggcgggccccgaggacccggcggaggccgagaggacgctggacaggcgatcggatggcacgtggggcacagaggctggccccggctgggccccgtggccacggggcgcgaggaggctgtggggctcacaataa

SEQ ID NO: 177443 - DNA, 7453 bp, Homo sapiens
  Payload ID: 14824
  Gene Symbol: RNF24
  Gene Name: ring finger protein 24
  Uniprot ID: Q9Y225
  ENST ID: ENST00000336095
  CDS Start-End: 253-699
ctggggtttgggggaccgagccgctccgggttcgggatgctgaggagaccgcgggcccgcgccagcctcccacacacacacactctcccggcgcctcggccggccgggcgcggtgtgcaggggtgaggcggtgtctccaggctgaggagggacgcggaggagggtccggcgcggccccgggactggagggtgagtccctcacaaagggcggagcggggctgtcacctggagatcacggagggaagttcatccatgagctcggatttcccacattacaacttcaggatgcctaatattggattccagaatctgcctctcaacatatatattgtggtttttggtactgctatatttgtcttcatccttagtttactcttctgttgctacttgattaggctaagacatcaagcacacaaagaattttatgcctacaaacaggttatattaaaagagaaagtaaaagaattgaatttacatgagctctgtgcagtgtgcctagaagacttcaagcctcgagatgagttggggatttgcccatgtaagcacgccttccacagaaagtgccttattaagtggctggaggttcgtaaagtgtgtcccctgtgcaacatgccagttctacagctggcccagttgcacagtaagcaggaccgtggaccccctcaggggccccttcctggggcagagaacattgtatagcttaccgcaaggatcagactgttgctggacacgacgtctgtgtggagccaggaggaacacatgtggtgtctgtatggctgctctctacctaggacaccagctgccacttcttttgcctcatgaagaactcttgggccagccaaactgggaacctaggtgtctgggtcttgtgacaaccaaagcactttgacactaccccctgccgagagaagaggagtggatgagcctgcgggtttgcctcaagaaacttcatgagggtctcttactaactccattacactctctctcctggagcctcatctccatgtcaagcaggagggtaaagaagggaactaagagcaggtctttcaagccacacccccacctgcggatggatgggtttctctgtaggccatgcaggcctttgtcgcagcaaaccttcccagcagcccttgagccaagtaaaaccagcacaaccagccaccagtggttggtgaggcagtgcccacaaggctcatgttgtatgcctttgataaggccatcttggctttgagtagcagtgttcctcgtcacccatttccccctcaggattacaacacctgctatcaaatcatctaagctgaaaacatgagatgcgcttggaaaggcctagtcagaagccatttcctcttatcatttccctctcctatgcaccagtaaggcccgtccagagccccagcagggagtgggccctgagtccacactgtccctgagtgatccaggaggctgcccacatccccacatgtgcactgtggttccagtgtagctgctgtgagcccactgccactgcctcagaagggagccactgtgaacctctcgagtggctccaaagagcagtggctttttgagaatggcccatacttctggcccggctggatgaagggaatgccgaccctttggcctctccccctccttccatctcttctctctcttgccctatctctctttctacttcagaaaaaaaaaaaaaaaaaaaaaaaagcctgtcattcactttttaacactttatcccaaataagatccctgtgtaattctgaagctggtgatccacttggaattgtagatagtttcaggaagctcctgcagggctgtccaccgttggtgtgtgcctcagtatttggacttccgaaactgaaagtgaaagtgtctttataggagagaaacgcatgctgctctttggctctttctgtccaacttttctagaaatgactcaaagtccattaagatttgtgaatattgtataaattagctatggaaagtagcaggtcagatggaaaattcttttccacagccctgctctccgcctccctccatcttaggagcgcctgcctcaattcctcgtcaactgctttgctccactccatcccacaggtgtgagtgggggaagtttttcattaggaatacagtctgcgtgacatggagaatggatggagggagctttgctactctgctcttggcatgactccaggatttttttctggaatccaacctctgtcctcttaggagaaggaacctgtccttggttcagatggctgggcatgaggaggaaaatttccattagtgtagaacagtgctggacagaatccggtttggaaaattacaaatccagttggtcaaaataggccatttcctatgtgtgacctattcgtggtatgccaactggactgcttcctaaacaggacgaggaaagtgaggaatatttttatatgaaagccttagcctgtctggcacccatgaaaaaaactatttatgcactcctactttcaccgtctttttgcattctctatttgtagcacaacagagttgaatgccacaaaacaccccgtttatagtgagctgttttcagtgaccaatatcagaaggaggcttgcttctggactagcctcactaattgccagcagccaccattttccatggaatggccttgggacagatgtcacctctgttatggggctctaataggaaagagaatgttttttcccttcctatgatcaatactgcaaattattgctgctcacagcttttataggattctcccaactgaaagttgcaggctttttctgtccctgtgcatcagtactaacaaaagacagcctcaccaagtctgtatatttgaacagaggcaagttaattcatccccccgtgtcagagccacaggcatgttgagggggttgatacgtagcactggaccagggcgcaaagcccagatagttccagccatgagaggagagcacaagaatgctctgcactctgcactcagcaccaccttgggtctgctttgcccagatgagggaccactaacaaccttctcagcacatgtgaatgtggactggttttaaaatgcattcattctgctaggattgggctggaagctggaacagtgagagtactttttctgctcctagtcatctccctttctcagcgtgacatcctcctgcagcaagcctagtatcactagcagtagttcctgcgactcttagcaacacaacccgaatatttgctccctgcatctgggtcctccaccaggatgggcctgcgcatctgcattgctgtacagacaaacaggccttttaatttacatcctcctttaattctcattaaaatcgcagggtttttgtttgaaagacagtcctttttttatttattttgaaaaaggaatgagttagggacccctttataactctcttggctcagactcgaaccccatggtaaagtcaccctttccgcatctatcttcaggagttgctgggacttgttactgtgtagctgcgtggggattctggtctgctcttggaccactggctggtatcctttgtgtgtttcttaagcagctcaaagatagaatgttgctggtctgctatgggttagtggagcataactcagccccaactggactccacgggtggctgaaccattagtagttgctaggggtacaactgaattcaactgccttcagaaacagggaacaaaaccagcctgacttgattcctggttgggtcagtatcagacactaggaagttgacatctgctgcttttctttgccacgtgtgatttggttaggcctgtccctggcagataaggtccttgaagcctatgcttgcctagccagggaaggcaggacagaaatggccaaataggggcaggtggcccctgggaaggtctgagctgagggatacaggggacctcccaccattgccggataccctgttcttgacaagaagatccttttccccagtgccaagccccttggatccatcagagaaatagcctcgggccttgtcctttttcacaaccccacttcaaaatcatgtcatctccctggcctgatcccgctctaagctactttgaacaactaggaattatttttctcagaggctttttgggcattatgaaatacatcctgatacatccagggcagtatacccagagctccaggcagagagtgatggaatcacctcttgtcactcactagccttaggcccttctgcaggttagcctctcagtctcttccttagcttccttagctaccacccagggattgtagtaacgtccctggcacctcttgtgggggttagctggtgcccagagcctggtaggcagcaggcctggtgtcatgggggctgctgataccacataacatcatctgggttacatgggctcctctgccatcatgattgataggaacagaacctcagccaaaaagcttcctgagctgtaggggctttccctgaggcccaggttcacctggcccctttcttccttggtcatctctgcctttgcccacagtgaactctgacttggttgttcagtgctgaatatttctttcttaatgttttgaataggtaatccattcatgtggttcacaaatcataaagtagttaaaagcctttcttgagttcctgatgcctagcaagctccgctcctcactccatgaatacctactattggtttgttccttgggtatccttccagagatcatttatgcatgtacacacatgtgtatgtgtgtctatataatttttctccttttctactcatgtgataccagacaagtgtattcaaggaacgctcctactaatgtgggaagagccatcccagaaatcagaatacaaaatgtgaacccagaattgggggatgtttttgcaatcacactcctgttgagtaagacatattttcattttattgcaacatactgaaattttagttttctgtacaaatcagaatctgcagtccctcccttaccccaaatgcccagctaatccaagagcacaaccagatttttctgattgactttctatctgcgacaggatgctcaagatcaggctctgtagctgacagcagtggcacaggcctctcccagctctgagcagcctctgcaggtgcctggacagctgctggcccctcccctaccttggccagttccaagtgaggaccagtggtgatgtgtggctgcaactgttgtggtcacttaggcaagctcttgtgtctttgatgcaggagtttgagcagcagcaactgaaggcttctattttgtggggcagacatcttagctactgagcaagtgcacagtgagtctcatgtggatatgcctgaatgtccagcgtcagttcatggagctactccctttccctcccaacttttcgttgttgttgagacagggtcttgttacccagactggagtgcagtggcaccattgtagctcactgcagcctcaacttcctggactcaagtgatcctcccgcctcagtctgtagctgcgtctacaggtgcacaccagcacacctggctaattttcgtaattatttttttgtagagacaggtctcaactcactatgttgcccaggctggcctcctcactctgtgcacacactttgaaaagaaaatgcttctggtcgggcgcgatggctcacgcctgtaatcccaacatcccagcactttgggaggccgaggcaggcggatcaccttaggtcaagagttcaagaccagcctgaccaatatggtgaaaccccctctactaaaaatacaaaaatttgccgggtgtggtgacgcatgcctgtaatcccagccactcaggaggctgggacaggagaattgattgaacccgggagacagaagttgcagtgagccaagatccccactgcactccagcctgggcaacagagcgagactccgtctcaaaaaaacacacaagaaaagaaaatgcttcctacagaattttccctttatgccttgttttccatttgacaacagaaattaccccaacaattttttttttttttttttttttttttttttttgagacggagtctcgctctgtcacccaggctggaatgcagtggcacgatcttggcccactgcaagctccgcctcccaggttcacgccattctcccgcctcgggagctgggacaacaggtgcccgccaccacgctcggctaattttttgtatttttagtacagacggagtttcaccgtgttagccaggatggtctcgatctcctgacctcgtgatgcacctgccttgacctcccaaagtgctgggattacaggcgtgagccactgcgcccggccaataatttttttagtttaagttcatttttgtccccgctgatgaaagttagagctgcttcctccaggcagccctgggagtaggggcacagacttgtgcctcgcttcccagcagctgcccagtgcctctgtccacacccacctccctggtgtacttgccccctacagcagcagcccagatcctcccctggattaaaattgcaactggtgccctaacccaaaacttgagaaaaaattctctatcacatccactcttctggcatttgtagaatctctggccctgggtgtgtcttttcctgtagctgttacagatttcttaagcagatttcttaagcagatggacatgtccagattcatgcctaaatatccagttgataactggaaaatgctggttcacggttctttagtaaagattaataagggatccccatgtgctggggagtgtgcttccatttgagtggggatatcagaagaaaaagaggggcttgtgtagtaaaccttactttgccaattcagctgtagagcccaaattgttacaagatgcaaagatgtactccactttttgaccaagcatcagcacctttggcttaccatccagtccttacttctgtgactgtaagggccccaccagtgtcagcagacttgtttgtgctttgggggaactctcttctcagctccctttgccagtcccaagcctggtggatctgcatctcacgcccactgcacaccgttcctctccatctgcccttccctcccaggcccccggtcgggggagcaggtgtggcaagtgttaggaactcccttctggtgacagctggtcttcctagagtgttgctggtaactatcgcctcttggtcttctgacatcattgccaggaacggggcactttttcgtcttgtagtttggccctcgggtttcctcactaggtattgtgtaactccctcaaaaaaaggtttatgaaatgctgaacctcaggtttcatagacgtctttgtacactaaaaattctgcagcagaatatttttaaacattcgcagttttttgtaagctatatttttgtatatttaattgctattttaaaattttaatgcattttgctaatcactcctcaaaaataaaacatgcatgtaattgactcaaacgtgtaaataaaagcaaattttgaaaaata

SEQ ID NO: 177444 - DNA, 3242 bp, Homo sapiens
  Payload ID: 14824
  Gene Symbol: RNF24
  Gene Name: ring finger protein 24
  Uniprot ID: Q9Y225
  ENST ID: ENST00000358395
  CDS Start-End: 154-600
gcccctcgcgaggggccgccgggcgcagtcagccgccgccacctccgccgcgctctgtccggacggacgctcgccgcccgcagcctgccgcccgccgcagggcgctgacggtcccgcacgtctgccgctgccaccggcgcgcccgattcatccatgagctcggatttcccacattacaacttcaggatgcctaatattggattccagaatctgcctctcaacatatatattgtggtttttggtactgctatatttgtcttcatccttagtttactcttctgttgctacttgattaggctaagacatcaagcacacaaagaattttatgcctacaaacaggttatattaaaagagaaagtaaaagaattgaatttacatgagctctgtgcagtgtgcctagaagacttcaagcctcgagatgagttggggatttgcccatgtaagcacgccttccacagaaagtgccttattaagtggctggaggttcgtaaagtgtgtcccctgtgcaacatgccagttctacagctggcccagttgcacagtaagcaggaccgtggaccccctcaggggccccttcctggggcagagaacattgtatagcttaccgcaaggatcagactgttgctggacacgacgtctgtgtggagccaggaggaacacatgtggtgtctgtatggctgctctctacctaggacaccagctgccacttcttttgcctcatgaagaactcttgggccagccaaactgggaacctaggtgtctgggtcttgtgacaaccaaagcactttgacactaccccctgccgagagaagaggagtggatgagcctgcgggtttgcctcaagaaacttcatgagggtctcttactaactccattacactctctctcctggagcctcatctccatgtcaagcaggagggtaaagaagggaactaagagcaggtctttcaagccacacccccacctgcggatggatgggtttctctgtaggccatgcaggcctttgtcgcagcaaaccttcccagcagcccttgagccaagtaaaaccagcacaaccagccaccagtggttggtgaggcagtgcccacaaggctcatgttgtatgcctttgataaggccatcttggctttgagtagcagtgttcctcgtcacccatttccccctcaggattacaacacctgctatcaaatcatctaagctgaaaacatgagatgcgcttggaaaggcctagtcagaagccatttcctcttatcatttccctctcctatgcaccagtaaggcccgtccagagccccagcagggagtgggccctgagtccacactgtccctgagtgatccaggaggctgcccacatccccacatgtgcactgtggttccagtgtagctgctgtgagcccactgccactgcctcagaagggagccactgtgaacctctcgagtggctccaaagagcagtggctttttgagaatggcccatacttctggcccggctggatgaagggaatgccgaccctttggcctctccccctccttccatctcttctctctcttgccctatctctctttctacttcagaaaaaaaaaaaaaaaaaaaaaaaagcctgtcattcactttttaacactttatcccaaataagatccctgtgtaattctgaagctggtgatccacttggaattgtagatagtttcaggaagctcctgcagggctgtccaccgttggtgtgtgcctcagtatttggacttccgaaactgaaagtgaaagtgtctttataggagagaaacgcatgctgctctttggctctttctgtccaacttttctagaaatgactcaaagtccattaagatttgtgaatattgtataaattagctatggaaagtagcaggtcagatggaaaattcttttccacagccctgctctccgcctccctccatcttaggagcgcctgcctcaattcctcgtcaactgctttgctccactccatcccacaggtgtgagtgggggaagtttttcattaggaatacagtctgcgtgacatggagaatggatggagggagctttgctactctgctcttggcatgactccaggatttttttctggaatccaacctctgtcctcttaggagaaggaacctgtccttggttcagatggctgggcatgaggaggaaaatttccattagtgtagaacagtgctggacagaatccggtttggaaaattacaaatccagttggtcaaaataggccatttcctatgtgtgacctattcgtggtatgccaactggactgcttcctaaacaggacgaggaaagtgaggaatatttttatatgaaagccttagcctgtctggcacccatgaaaaaaactatttatgcactcctactttcaccgtctttttgcattctctatttgtagcacaacagagttgaatgccacaaaacaccccgtttatagtgagctgttttcagtgaccaatatcagaaggaggcttgcttctggactagcctcactaattgccagcagccaccattttccatggaatggccttgggacagatgtcacctctgttatggggctctaataggaaagagaatgttttttcccttcctatgatcaatactgcaaattattgctgctcacagcttttataggattctcccaactgaaagttgcaggctttttctgtccctgtgcatcagtactaacaaaagacagcctcaccaagtctgtatatttgaacagaggcaagttaattcatccccccgtgtcagagccacaggcatgttgagggggttgatacgtagcactggaccagggcgcaaagcccagatagttccagccatgagaggagagcacaagaatgctctgcactctgcactcagcaccaccttgggtctgctttgcccagatgagggaccactaacaaccttctcagcacatgtgaatgtggactggttttaaaatgcattcattctgctaggattgggctggaagctggaacagtgagagtactttttctgctcctagtcatctccctttctcagcgtgacatcctcctgcagcaagcctagtatcactagcagtagttcctgcgactcttagcaacacaacccgaatatttgctccctgcatctgggtcctccaccaggatgggcctgcgcatctgcattgctgtacagacaaacaggccttttaatttacatcctcctttaattctcattaaaatcgcagggtttttgtttgaaa

SEQ ID NO: 177445 - DNA, 3149 bp, Homo sapiens
  Payload ID: 14824
  Gene Symbol: RNF24
  Gene Name: ring finger protein 24
  Uniprot ID: Q9Y225
  ENST ID: ENST00000432261
  CDS Start-End: 1-510
atgttgaataagagtggtgagagcagatatcctgccttgttcccggtcttagggggttcatccatgagctcggatttcccacattacaacttcaggatgcctaatattggattccagaatctgcctctcaacatatatattgtggtttttggtactgctatatttgtcttcatccttagtttactcttctgttgctacttgattaggctaagacatcaagcacacaaagaattttatgcctacaaacaggttatattaaaagagaaagtaaaagaattgaatttacatgagctctgtgcagtgtgcctagaagacttcaagcctcgagatgagttggggatttgcccatgtaagcacgccttccacagaaagtgccttattaagtggctggaggttcgtaaagtgtgtcccctgtgcaacatgccagttctacagctggcccagttgcacagtaagcaggaccgtggaccccctcaggggccccttcctggggcagagaacattgtatagcttaccgcaaggatcagactgttgctggacacgacgtctgtgtggagccaggaggaacacatgtggtgtctgtatggctgctctctacctaggacaccagctgccacttcttttgcctcatgaagaactcttgggccagccaaactgggaacctaggtgtctgggtcttgtgacaaccaaagcactttgacactaccccctgccgagagaagaggagtggatgagcctgcgggtttgcctcaagaaacttcatgagggtctcttactaactccattacactctctctcctggagcctcatctccatgtcaagcaggagggtaaagaagggaactaagagcaggtctttcaagccacacccccacctgcggatggatgggtttctctgtaggccatgcaggcctttgtcgcagcaaaccttcccagcagcccttgagccaagtaaaaccagcacaaccagccaccagtggttggtgaggcagtgcccacaaggctcatgttgtatgcctttgataaggccatcttggctttgagtagcagtgttcctcgtcacccatttccccctcaggattacaacacctgctatcaaatcatctaagctgaaaacatgagatgcgcttggaaaggcctagtcagaagccatttcctcttatcatttccctctcctatgcaccagtaaggcccgtccagagccccagcagggagtgggccctgagtccacactgtccctgagtgatccaggaggctgcccacatccccacatgtgcactgtggttccagtgtagctgctgtgagcccactgccactgcctcagaagggagccactgtgaacctctcgagtggctccaaagagcagtggctttttgagaatggcccatacttctggcccggctggatgaagggaatgccgaccctttggcctctccccctccttccatctcttctctctcttgccctatctctctttctacttcagaaaaaaaaaaaaaaaaaaaaaaaagcctgtcattcactttttaacactttatcccaaataagatccctgtgtaattctgaagctggtgatccacttggaattgtagatagtttcaggaagctcctgcagggctgtccaccgttggtgtgtgcctcagtatttggacttccgaaactgaaagtgaaagtgtctttataggagagaaacgcatgctgctctttggctctttctgtccaacttttctagaaatgactcaaagtccattaagatttgtgaatattgtataaattagctatggaaagtagcaggtcagatggaaaattcttttccacagccctgctctccgcctccctccatcttaggagcgcctgcctcaattcctcgtcaactgctttgctccactccatcccacaggtgtgagtgggggaagtttttcattaggaatacagtctgcgtgacatggagaatggatggagggagctttgctactctgctcttggcatgactccaggatttttttctggaatccaacctctgtcctcttaggagaaggaacctgtccttggttcagatggctgggcatgaggaggaaaatttccattagtgtagaacagtgctggacagaatccggtttggaaaattacaaatccagttggtcaaaataggccatttcctatgtgtgacctattcgtggtatgccaactggactgcttcctaaacaggacgaggaaagtgaggaatatttttatatgaaagccttagcctgtctggcacccatgaaaaaaactatttatgcactcctactttcaccgtctttttgcattctctatttgtagcacaacagagttgaatgccacaaaacaccccgtttatagtgagctgttttcagtgaccaatatcagaaggaggcttgcttctggactagcctcactaattgccagcagccaccattttccatggaatggccttgggacagatgtcacctctgttatggggctctaataggaaagagaatgttttttcccttcctatgatcaatactgcaaattattgctgctcacagcttttataggattctcccaactgaaagttgcaggctttttctgtccctgtgcatcagtactaacaaaagacagcctcaccaagtctgtatatttgaacagaggcaagttaattcatccccccgtgtcagagccacaggcatgttgagggggttgatacgtagcactggaccagggcgcaaagcccagatagttccagccatgagaggagagcacaagaatgctctgcactctgcactcagcaccaccttgggtctgctttgcccagatgagggaccactaacaaccttctcagcacatgtgaatgtggactggttttaaaatgcattcattctgctaggattgggctggaagctggaacagtgagagtactttttctgctcctagtcatctccctttctcagcgtgacatcctcctgcagcaagcctagtatcactagcagtagttcctgcgactcttagcaacacaacccgaatatttgctccctgcatctgggtcctccaccaggatgggcctgcgcatctgcattgctgtacagacaaacaggccttttaatttacatcctcctttaattctcattaaaatcgcagggtttttgtttg

SEQ ID NO: 177446 - DNA, 1128 bp, Homo sapiens
  Payload ID: 14824
  Gene Symbol: RNF24
  Gene Name: ring finger protein 24
  Uniprot ID: Q9Y225
  ENST ID: ENST00000545616
  CDS Start-End: 123-632
gccacctccgccgcgctctgtccggacggacgctcgccgcccgcagcctgccgcccgccgcagggcgctgacggtcccgcacgtctgccgctgccaccggcgcgcccgaaacttccagcactatgttgaataagagtggtgagagcagatatcctgccttgttcccggtcttagggggttcatccatgagctcggatttcccacattacaacttcaggatgcctaatattggattccagaatctgcctctcaacatatatattgtggtttttggtactgctatatttgtcttcatccttagtttactcttctgttgctacttgattaggctaagacatcaagcacacaaagaattttatgcctacaaacaggttatattaaaagagaaagtaaaagaattgaatttacatgagctctgtgcagtgtgcctagaagacttcaagcctcgagatgagttggggatttgcccatgtaagcacgccttccacagaaagtgccttattaagtggctggaggttcgtaaagtgtgtcccctgtgcaacatgccagttctacagctggcccagttgcacagtaagcaggaccgtggaccccctcaggggccccttcctggggcagagaacattgtatagcttaccgcaaggatcagactgttgctggacacgacgtctgtgtggagccaggaggaacacatgtggtgtctgtatggctgctctctacctaggacaccagctgccacttcttttgcctcatgaagaactcttgggccagccaaactgggaacctaggtgtctgggtcttgtgacaaccaaagcactttgacactaccccctgccgagagaagaggagtggatgagcctgcgggtttgcctcaagaaacttcatgagggtctcttactaactccattacactctctctcctggagcctcatctccatgtcaagcaggagggtaaagaagggaactaagagcaggtctttcaagccacacccccacctgcggatggatgggtttctctgtaggccatgcaggcctttgtcgcagcaaaccttcccagcagcccttgagccaagtaaaaccagcacaaccagccaccagtggttggtgaggcagtgcccacaaggctca

SEQ ID NO: 177447 - DNA, 1914 bp, Homo sapiens
  Payload ID: 14825
  Gene Symbol: RNF25
  Gene Name: ring finger protein 25
  Uniprot ID: Q96BH1
  ENST ID: ENST00000295704
  CDS Start-End: 442-1821
agaccccctggcccgtgcgcttcgcaggccagagcccctctctcacccccagcctaggagctccaagctcctcaggccaagggacggattccctggcgtttagccccatctcttctggctgcctgcatacgttgcctgacttataattcttctccacccgcctctccctccggtctctttcggctccctttcttacaattttactcgctagaactggtgagaagttcagaggacaaaggcgctcagaggtgtggaatggacggcggaccacacatgggcacttcctgggacacatccgaactgcctcagggccatcaggcccggctaaggacccggagtctgcggttgcctagaaacgacgctagctgcccacccctcttagttttccgcctccgacttccctaagggcatttccggttccggctgcgggccggtgaagatatggcggcgtctgcgtctgcagctgcaggggaggaggactgggtccttccctctgaagttgaagtattggagtccatctatctagatgaactacaggtgattaaaggaaatggcagaacttcaccatgggagatctacatcactttgcatcctgccactgcagaggaccaggattcacagtatgtctgcttcactctggtgcttcaggtcccagcagagtatccccatgaggtgccacagatctctatccgaaatccccgaggactttcagatgaacagatccacacgatcttacaggtgctgggccacgtggccaaggctgggctgggcactgccatgctgtatgaactcattgagaaagggaaggaaattctcacagataacaacatccctcatggccagtgtgtcatctgcctctatggtttccaggagaaggaggcctttaccaaaacaccctgttaccactacttccactgccactgccttgctcggtacatccagcacatggagcaagagctgaaggcacaaggacaggagcaggaacaggaacggcagcatgctacaaccaaacagaaggcagtcggtgtgcagtgtccagtgtgcagagagcccctcgtgtatgatcttgcctcactgaaagcagcccctgaaccccaacagcccatggagctgtaccagcccagtgcagagagcttgcgccagcaagaagaacgcaagcggctctaccagaggcagcaggagcgggggggaatcattgaccttgaggctgagcgaaaccgatacttcatcagccttcagcagcctcctgcccctgcggaacctgagtcagctgtagatgtctccaaaggatcccaaccacccagcacccttgcagcagaactatccacctcaccagccgtccaatccactttgccacctcctctgcctgtggcgacccagcacatatgtgagaagattccagggaccaggtcaaatcagcaaaggttgggcgaaacccagaaagctatgctagatccccccaagcccagtcgaggtccctggcgacagcccgaacggaggcacccaaagggaggggagtgccacgcccctaaaggtacccgtgacacccaggaactgccacctcctgaggggcccctcaaggagcccatggacctaaagccagaaccccatagccaaggagttgaaggtcctccacaagagaaggggcctggcagctggcaggggcccccaccccgcaggactcgggactgtgttcgctgggagcgctctaaaggccggacacccggttcttcctaccctcgcctgcctcggggccagggagcataccggcctggtactcggagggagtccctgggcctggaatctaaggatggttcctagcaggacttggtggggggaacagggaattggggatgggagggaggcaataaagatatttggccttctttggctttctttgcttagcagcgccta

SEQ ID NO: 177448 - DNA, 624 bp, Homo sapiens
  Payload ID: 14825
  Gene Symbol: RNF25
  Gene Name: ring finger protein 25
  ENST ID: ENST00000423170
  CDS Start-End: 1-477
gcggcgtctgcgtctgcagctgcaggggaggaggactgggtccttccctctgaagttgaagtattggagtccatctatctagatgaactacaggtgattaaaggaaatggcagaacttcaccatgggagatctacatcactttgcatcctgccactgcagaggaccaggattcacatatccccatgaggtgccacagatctctatccgaaatccccgaggactttcagatgaacagatccacacgatcttacaggtgctgggccacgtggccaaggctgggctgggcactgccatgctgtatgaactcattgagaaagggaaggaaattctcacagataacaacatccctcatggccagtgtgtcatctgcctctatggtttccaggagaaggaggcctttaccaaaacaccctgttaccactacttccactgccactgccttgctcggtacatccagcacatggagcaagagctgaaggcacaaggacaggagcaggaacaggaacggcagcatgctacaaccaaacagaaggcagtcggtgtgcagtgtccagtgtgcagagagcccctcgtgtatgatcttgcctcactgaaagcagcccctgaaccccaacagcccatgg

SEQ ID NO: 177449 - DNA, 2787 bp, Homo sapiens
  Payload ID: 14826
  Gene Symbol: RNF26
  Gene Name: ring finger protein 26
  Uniprot ID: Q9BY78
  ENST ID: ENST00000311413
  CDS Start-End: 597-1898
acacaagatggcggcgcccagcggagtaggggctgcgcttggggtttgctgaagctggctgcctctcccactccccttttgggtgcaaagcgccgctagcgggaagacgggggccgggcggggacaggggcacctgcgtagctggactgagagcctgcgcccagcttacatcgaccccacccggccccggcccgacccgacgcgacccgatccgatccgatcccattccatccgttcctcgtctcctcccggtctgacccgttgcccggccgtggttcgccacaccaggcatccaaagctgaggtcgctcctacggcctgggctcgccttcgctttagagatgtttggcctcttccctcccaaacagcccatcttcaaaacctggactcttggactggcacctggccacctttccctctaccaagactccacttccgtcttacccacttcttcctcagattcttggtaccccctgggttggagactgctcattttccttccaaattaatcccagaccccctaaaatattgacaaccttgacaaccccccaaccgaggagccagactttgttttggactaacttccatagccctatcatggaggcagtgtacctggtagtgaatgggttgggcctggtgctggacgtgctgaccttggtgttggacctcaacttcctgctggtgtcctccctcctggcttccctggcctggctcctggccttcgtctacaacctgccgcacacggtactgactagtcttctgcacttgggccgcggagtcttgctttcattgctggccttgatcgaagccgtggtccggttcacatgtgggggcttgcaggccttgtgtactctgctgtatagctgctgctctggcctagagagcctaaagctcctggggcacctggcctctcatggggcactgcggagcagggagatactgcaccggggcgtcctcaatgtggtctccagtggccatgctttgctgcgccaggcctgtgacatctgtgccattgccatgagcctggtggcttatgtgatcaacagcctggtcaacatctgcctcatcggcactcagaacctcttttccctggtgctggccctgtgggatgcagtgaccgggcctctgtggaggatgacggacgtagtggctgccttcctagcccacatttccagcagtgctgtggccatggccatcctcctttggacaccctgccaactagccctggagctgctggcctcagctgcccgcctcctggccagctttgtgcttgtcaatctcactggcttggtgttgctagcttgtgtgctggcagtgacggtgactgtgttgcatccggacttcaccctgaggctggctacccaggcactcagccagctccatgcccggccatcctaccaccgtcttcgagaggatgtcatgcggctctctcgcctagcactgggctcagaggcctggcgccgagtctggagccgcagtctgcagctggcgagttggccaaaccggggaggggcacctggagctccccagggtgaccctatgagggtattctcagttaggacccggagacaggacactcttcctgaagcggggcgcagatcagaggcagaagaggaggaggccaggaccatcagagtgacacctgtcaggggccgagagaggctcaatgaggaggagcctccaggtgggcaagacccttggaaattgctgaaggagcaagaggagcggaagaagtgtgtcatctgccaggaccagagcaagacagtgttgctcctgccctgccggcatctgtgcctgtgccaggcctgcactgaaatcctgatgcgccaccccgtctaccaccgcaattgcccgctctgccgccggggcatcctgcagaccctcaatgtctacctctgaagcctccttccctgcctgcccacccctccatgctccacgcaggcactcacgctaggacagcattaacacctcatctccgggtcctggtctgaatcccctcctacccctgtggccatcctgccatacatccaggacattgagttggaagactatgatctgggtgggggcaggataacatggcttctctttacccagtgggtcccttcgatgctgagggtggtgagtatgtcactatgcaagggccctgagactatttgctgtgggctctcctccagcctgcccagggcccacccagatgcctctggggttacccctgtctgcttctggtttttctgttggagatctataggtccttttcctgcctccttcacatttcctccccagcttttgcggccacaacacatcagtgtcatttgggtgttttggcaactcaggggccttcggatgatcttaaacctttgtgttcagccagagcccctgtgccctggtaggcgttggggttagtatctctcgggtgccctcagagccacctctgcctgtgatcgtctgatgaggctccctcccaacctgatccaaaagccagtctcaggagtttacccctgggatgggggatgcatctgcacctgactttggggccacgtgccctgtggcaccccagctcactgggagtctcaggagggataaccggatttctgctctttcccctgtcactcccacatcacacagaaaaatggcattcctctctgtctctccctggcatggagagggcagactgtgcacatttcactagggtccaaatacagaagggcccagggcccaggggcttgcagcttcgtgaggggtctctggcccagtttccaatgaataaagttctcttgacagctctgac

SEQ ID NO: 177450 - DNA, 3627 bp, Homo sapiens
  Payload ID: 14827
  Gene Symbol: RNF31
  Gene Name: ring finger protein 31
  Uniprot ID: Q96EP0
  ENST ID: ENST00000324103
  CDS Start-End: 321-3539
attggttgggacctggccctccctcttggccgcgccccctggtttcctgacaccgctccaaccttaaccttaagccccgcccgttcctccgaaattgggtcgcagtcccaccctctctcctagtacttcctgttctcggctaaccctggcgctgggccgggggctggagagtgaccgtggtctgagtgacctggggcggctgcgtgggccggggtgggcctcaaagccgggcaccagacgggaggggcggcgctcgggccgcgcgctgcccgcgccgggtcctggcgggcggcgaggctggggctgactcctgcctcaggatgccgggggaggaagaggagcgggccttcctggtggcccgcgaggagctggcgagcgccctgaggagggattccgggcaggcgttttccctggagcagctccggccgctactagccagctctctgccgctagccgcccgctacctgcagctggacgccgcacgccttgtccgctgcaacgctcatggggagccccgaaactacctcaacaccctgtccacggctctgaacatcctggagaaatacggccgcaaccttctcagccctcagcggcctcggtactggcgtggtgtcaagtttaataaccctgtctttcgcagcacggtggatgctgtgcaggggggccgagatgtgctgcgattatatggctacacagaggagcaaccagatgggttgagcttccccgaagggcaggaggagccagatgagcaccaggttgctacagtcacactggaagtactgctgcttcggacagagctcagcctgctattgcagaatactcatccaagacagcaggcactggagcagctgttggaagacaaggttgaagatgatatgctgcagctttcagaatttgaccccctattgagagagattgctcctggccccctcaccacaccctctgtcccaggctccactcctggtccctgcttcctctgtggttctgccccaggcacactgcactgcccatcctgtaaacaggccctgtgtccagcctgtgaccacctgttccatggacacccatcccgtgctcatcacctccgccagaccctgcctggggtcctgcagggtacccacctgagccccagtttacctgcctcagcccaaccacggccccagtcgacctccctgctggccctgggagacagctctctttcttcccctaatcctgcaagtgctcatttgccctggcactgtgctgcctgtgccatgctaaatgagccttgggcagtgctctgtgtggcctgtgatcggccccgaggctgtaaggggttggggttgggaactgagggtccccaaggaactggaggcctagaacctgatcttgcacggggtcggtgggcctgccagagctgtacctttgagaatgaggcagctgctgtgctatgttccatatgtgagcgacctcggctggcccagcctcccagcttggtggtggattcccgagatgctggcatttgcctgcaaccccttcagcagggggatgctttgctggcctctgcccagagtcaagtctggtactgtattcactgtaccttctgcaactcgagccctggctgggtgtgtgttatgtgcaaccggactagtagccccattccagcacaacatgccccccggccctatgccagctctttggaaaagggaccccccaagcctgggcccccacgacgccttagtgcccccctgcccagttcctgtggagatcctgagaagcagcgccaagacaagatgcgggaagaaggcctccagctagtgagcatgatccgggaaggggaagccgcaggtgcctgtccagaggagatcttctcggctctgcagtactcgggcactgaggtgcctctgcagtggttgcgctcagaactgccctacgtcctggagatggtggctgagctggctggacagcaggaccctgggctgggtgccttttcctgtcaggaggcccggagagcctggctggatcgtcatggcaaccttgatgaagctgtggaggagtgtgtgaggaccaggcgaaggaaggtgcaggagctccagtctctaggctttgggcctgaggaggggtctctccaggcattgttccagcacggaggtgatgtgtcacgggccctgactgagctacagcgccaacgcctagagcccttccgccagcgcctctgggacagtggccctgagcccaccccttcctgggatgggccagacaagcagagcctggtcaggcggcttttggcagtctacgcactccccagctggggccgggcagagctggcactgtcactgctgcaggagacacccaggaactatgagttgggggatgtggtagaagctgtgaggcacagccaggaccgggccttcctgcgccgcttgcttgcccaggagtgtgccgtgtgtggctgggccctgccccacaaccggatgcaggccctgacttcctgtgagtgcaccatctgtcctgactgcttccgccagcacttcaccatcgccttgaaggagaagcacatcacagacatggtgtgccctgcctgtggccgccccgacctcaccgatgacacacagttgctcagctacttctctacccttgacatccagcttcgcgagagcctagagccagatgcctatgcgttgttccataagaagctgaccgagggtgtgctgatgcgggaccccaagttcttgtggtgtgcccagtgctcctttggcttcatatatgagcgtgagcagctggaggcaacttgtccccagtgtcaccagaccttctgtgtgcgctgcaagcgccagtgggaggagcagcaccgaggtcggagctgtgaggacttccagaactggaaacgcatgaacgacccagaataccaggcccagggcctagcaatgtatcttcaggaaaacggcattgactgccccaaatgcaagttctcgtacgccctggcccgaggaggctgcatgcactttcactgtacccagtgccgccaccagttctgcagcggctgctacaatgccttttacgccaagaataaatgtccagagcctaactgcagggtgaaaaagtccctgcacggccaccaccctcgagactgcctcttctacctgcgggactggactgctctccggcttcagaagctgctacaggacaataacgtcatgtttaatacagagcctccagctggggcccgggcagtccctggaggcggctgccgagtgatagagcagaaggaggttcccaatgggctcagggacgaagcttgtggcaaggaaactccagctggctatgccggcctgtgccaggcacactacaaagagtatcttgtgagcctcatcaatgcccactcgctggacccagccaccttgtatgaggtggaagagctggagacggccactgagcgctacctgcacgtacgcccccagcctttggctggagaggatccccctgcttaccaggcccgcttgttacagaagctgacagaagaggtacccttgggacagagtatcccccgcaggcggaagtagctgagggcaagggtcccgatgagggtcccatggcctgctccctcaggaacagctccagcaccaataaagaggcatcttaccacccagg

SEQ ID NO: 177451 - DNA, 579 bp, Homo sapiens
  Payload ID: 14827
  Gene Symbol: RNF31
  Gene Name: ring finger protein 31
  ENST ID: ENST00000559719
  CDS Start-End: 1-497
actgccccaaatgcaagttctcgtacgccctggcccgaggaggctgcatgcactttcactgtacccagtgccgccaccagttctgcagcggctgctacaatgccttttacgccaagaatgacaataacgtcatgtttaatacagagcctccagctggggcccgggcagtccctggaggcggctgccgagtgatagagcagaaggaggttcccaatgggctcagggacgaagcttgtggcaaggaaactccagctggctatgccggcctgtgccaggcacactacaaagagtatcttgtgagcctcatcaatgcccactcgctggacccagccaccttgtatgaggtggaagagctggagacggccactgagcgctacctgcacgtacgcccccagcctttggctggagaggatccccctgcttaccaggcccgcttgttacagaagctgacagaagaggtacccttgggacagagtatcccccgcaggcggaagtagctgagggcaagggtcccgatgagggtcccatggcctgctccctcaggaacagctccagcaccaataaagaggcatcttacca

SEQ ID NO: 177452 - DNA, 2834 bp, Homo sapiens
  Payload ID: 14827
  Gene Symbol: RNF31
  Gene Name: ring finger protein 31
  ENST ID: ENST00000560787
  CDS Start-End: 1-2753
ttaataaccctgtctttcgcagcacggtggatgctgtgcaggggggccgagatgtgctgcgattatatggctacacagaggagcaaccagatgggttgagcttccccgaagggcaggaggagccagatgagcaccaggttgctacagtcacactggaagtactgctgcttcggacagagctcagcctgctattgcagaatactcatccaagacagcaggcactggagcagctgttggaagacaaggttgaagatgatatgctgcagctttcagaatttgaccccctattgagagagattgctcctggccccctcaccacaccctctgtcccaggctccactcctggtccctgcttcctctgtggttctgccccaggcacactgcactgcccatcctgtaaacaggccctgtgtccagcctgtgaccacctgttccatggacacccatcccgtgctcatcacctccgccagaccctgcctggggtcctgcagggtacccacctgagccccagtttacctgcctcagcccaaccacggccccagtcgacctccctgctggccctgggagacagctctctttcttcccctaatcctgcaagtgctcatttgccctggcactgtgctgcctgtgccatgctaaatgagccttgggcagtgctctgtgtggcctgtgatcggccccgaggctgtaaggggttggggttgggaactgagggtccccaaggaactggaggcctagaacctgatcttgcacggggtcggtgggcctgccagagctgtacctttgagaatgaggcagctgctgtgctatgttccatatgtgagcgacctcggctggcccagcctcccagcttggtggtggattcccgagatgctggcatttgcctgcaaccccttcagcagggggatgctttgctggcctctgcccagagtcaagtctggtactgtattcactgtaccttctgcaactcgagccctggctgggtgtgtgttatgtgcaaccggactagtagccccattccagcacaacatgccccccggccctatgccagctctttggaaaagggaccccccaagcctgggcccccacgacgccttagtgcccccctgcccagttcctgtggagatcctgagaagcagcgccaagacaagatgcgggaagaaggcctccagctagtgagcatgatccgggaggcccggagagcctggctggatcgtcatggcaaccttgatgaagctgtggaggagtgtgtgaggaccaggcgaaggaaggtgcaggagctccagtctctaggctttgggcctgaggaggggtctctccaggcattgttccagcacggaggtgatgtgtcacgggccctgactgagctacagcgccaacgcctagagcccttccgccagcgcctctgggacagtggccctgagcccaccccttcctgggatgggccagacaagcagagcctggtcaggcggcttttggcagtctacgcactccccagctggggccgggcagagctggcactgtcactgctgcaggagacacccaggaactatgagttgggggatgtggtagaagctgtgaggcacagccaggaccgggccttcctgcgccgcttgcttgcccaggagtgtgccgtgtgtggctgggccctgccccacaaccggatgcaggccctgacttcctgtgagtgcaccatctgtcctgactgcttccgccagcacttcaccatcgccttgaaggagaagcacatcacagacatggtgtgccctgcctgtggccgccccgacctcaccgatgacacacagttgctcagctacttctctacccttgacatccagcttcgcgagagcctagagccagatgcctatgcgttgttccataagaagctgaccgagggtgtgctgatgcgggaccccaagttcttgtggtgtgcccagtgctcctttggcttcatatatgagcgtgagcagctggaggcaacttgtccccagtgtcaccagaccttctgtgtgcgctgcaagcgccagtgggaggagcagcaccgaggtcggagctgtgaggacttccagaactggaaacgcatgaacgacccagaataccaggcccagggcctagcaatgtatcttcaggaaaacggcattgactgccccaaatgcaagttctcgtacgccctggcccgaggaggctgcatgcactttcactgtacccagtgccgccaccagttctgcagcggctgctacaatgccttttacgccaagaataaatgtccagagcctaactgcagggtgaaaaagtccctgcacggccaccaccctcgagactgcctcttctacctgcgggactggactgctctccggcttcagaagctgctacaggacaataacgtcatgtttaatacagagcctccagctggggcccgggcagtccctggaggcggctgccgagtgatagagcagaaggaggttcccaatgggctcagggacgaagcttgtggcaaggaaactccagctggctatgccggcctgtgccaggcacactacaaagagtatcttgtgagcctcatcaatgcccactcgctggacccagccaccttgtatgaggtggaagagctggagacggccactgagcgctacctgcacgtacgcccccagcctttggctggagaggatccccctgcttaccaggcccgcttgttacagaagctgacagaagaggtacccttgggacagagtatcccccgcaggcggaagtagctgagggcaagggtcccgatgagggtcccatggcctgctccctcaggaacagctccagcaccaataaagaggcatcttacc

SEQ ID NO: 177453 - DNA, 578 bp, Homo sapiens
  Payload ID: 14827
  Gene Symbol: RNF31
  Gene Name: ring finger protein 31
  ENST ID: ENST00000557991
  CDS Start-End: 69-578
agttgccactaggagaggcggtgctggctgggtcacagtccaggggctgcccgagggaggggctagggatgccgggggaggaagaggagcgggccttcctggtggcccgcgaggagctggcgagcgccctgaggagggattccgggcaggcgttttccctggagcagctccggccgctactagccagctctctgccgctagccgcccgctacctgcagctggacgccgcacgccttgtccgctgcaacgctcatggggagccccgaaactacctcaacaccctgtccacggctctgaacatcctggagaaatacggccgcaaccttctcagccctcagcggcctcggtactggcgtggtgtcaagtttaataaccctgtctttcgcagcacggtggatgctgtgcaggggggccgagatgtgctgcgattatatggctacacagaggagcaaccagatgggttgagcttccccgaagggcaggaggagccagatgagcaccaggttgctacagtcacactggaagtactgctgcttcggacagagctcagcctgctattgcagaatactcatccaaga

SEQ ID NO: 177454 - DNA, 559 bp, Homo sapiens
  Payload ID: 14827
  Gene Symbol: RNF31
  Gene Name: ring finger protein 31
  ENST ID: ENST00000559308
  CDS Start-End: 402-559
ctttccgcccccctcctcccgctggcaggccgcaagcaccccgaaactacctcaacaccctgtccacggctctgaacatcctggagaaatacggccgcaaccttctcagccctcagcggcctcggtactggcgtggtgtcaagtttaataaccctgtctttcgcagcacggtggatgctgtgcaggggggccgagatgtgctgcgattatatggctacacagaggagcaaccagatgggttgagcttccccgaagggcaggaggagccagatgagcaccaggttgctacagtcacactggaagtactgctgcttcggacagagctcagcctgctattgcagaatactcatccaagacagcaggcactggagcagctgttggaagacaaggttgaagatgatatgctgcagctttcagaatttgaccccctattgagagagattgctcctggccccctcaccacaccctctgtcccaggctccactcctggtccctgcttcctctgtggttctgccccaggcacactgcactgcccatcctgtaaacaggccctgtgtcc

SEQ ID NO: 177455 - DNA, 606 bp, Homo sapiens
  Payload ID: 14827
  Gene Symbol: RNF31
  Gene Name: ring finger protein 31
  ENST ID: ENST00000560754
  CDS Start-End: 198-606
cattgtctattttcctccacccgactgtcttcagatgtttacgttgcctgcctggcccctgctggcacttgaggttgttaaccctgcccagttgttaattagaccctgatttcttagtggacacctggccactgcctcttccctagcctggcagctgtggcttctgaccccctcccctccaacccctcaccctccagatgcaggccctgacttcctgtgagtgcaccatctgtcctgactgcttccgccagcacttcaccatcgccttgaaggagaagcacatcacagacatggtgtgccctgcctgtggccgccccgacctcaccgatgacacacagttgctcagctacttctctacccttgacatccagcttcgcgagagcctagagccagatgcctatgcgttgttccataagaagctgaccgagggtgtgctgatgcgggaccccaagttcttgtggtgtgcccagtgctcctttggcttcatatatgagcgtgagcagctggaggcaacttgtccccagtgtcaccagaccttctgtgtgcgctgcaagcgccagtgggaggagcagcaccgaggtcggagctgtgaggacttccagaact

SEQ ID NO: 177456 - DNA, 3198 bp, Homo sapiens
  Payload ID: 14827
  Gene Symbol: RNF31
  Gene Name: ring finger protein 31
  Uniprot ID: Q96EP0
  ENST ID: ENST00000559275
  CDS Start-End: 347-3112
aactggaagtccagggttgggccccgaaactacctcaacaccctgtccacggctctgaacatcctggagaaatacggccgcaaccttctcagccctcagcggcctcggtactggcgtggtgtcaagtttaataaccctgtctttcgcagcacggtggatgctgtgcaggggggccgagatgtgctgcgattatatggctacacagaggagcaaccagatgggttgagcttccccgaagggcaggaggagccagatgagcaccaggttgctacagtcacactggaagtactgctgcttcggacagagctcagcctgctattgcaggtgagatgctcctctagtcttgatggacttatgcaccagggctggggagcccagcctaactcaaaatactcatccaagacagcaggcactggagcagctgttggaagacaaggttgaagatgatatgctgcagctttcagaatttgaccccctattgagagagattgctcctggccccctcaccacaccctctgtcccaggctccactcctggtccctgcttcctctgtggttctgccccaggcacactgcactgcccatcctgtaaacaggccctgtgtccagcctgtgaccacctgttccatggacacccatcccgtgctcatcacctccgccagaccctgcctggggtcctgcagggtacccacctgagccccagtttacctgcctcagcccaaccacggccccagtcgacctccctgctggccctgggagacagctctctttcttcccctaatcctgcaagtgctcatttgccctggcactgtgctgcctgtgccatgctaaatgagccttgggcagtgctctgtgtggcctgtgatcggccccgaggctgtaaggggttggggttgggaactgagggtccccaaggaactggaggcctagaacctgatcttgcacggggtcggtgggcctgccagagctgtacctttgagaatgaggcagctgctgtgctatgttccatatgtgagcgacctcggctggcccagcctcccagcttggtggtggattcccgagatgctggcatttgcctgcaaccccttcagcagggggatgctttgctggcctctgcccagagtcaagtctggtactgtattcactgtaccttctgcaactcgagccctggctgggtgtgtgttatgtgcaaccggactagtagccccattccagcacaacatgccccccggccctatgccagctctttggaaaagggaccccccaagcctgggcccccacgacgccttagtgcccccctgcccagttcctgtggagatcctgagaagcagcgccaagacaagatgcgggaagaaggcctccagctagtgagcatgatccgggaaggggaagccgcaggtgcctgtccagaggagatcttctcggctctgcagtactcgggcactgaggtgcctctgcagtggttgcgctcagaactgccctacgtcctggagatggtggctgagctggctggacagcaggaccctgggctgggtgccttttcctgtcaggaggcccggagagcctggctggatcgtcatggcaaccttgatgaagctgtggaggagtgtgtgaggaccaggcgaaggaaggtgcaggagctccagtctctaggctttgggcctgaggaggggtctctccaggcattgttccagcacggaggtgatgtgtcacgggccctgactgagctacagcgccaacgcctagagcccttccgccagcgcctctgggacagtggccctgagcccaccccttcctgggatgggccagacaagcagagcctggtcaggcggcttttggcagtctacgcactccccagctggggccgggcagagctggcactgtcactgctgcaggagacacccaggaactatgagttgggggatgtggtagaagctgtgaggcacagccaggaccgggccttcctgcgccgcttgcttgcccaggagtgtgccgtgtgtggctgggccctgccccacaaccggatgcaggccctgacttcctgtgagtgcaccatctgtcctgactgcttccgccagcacttcaccatcgccttgaaggagaagcacatcacagacatggtgtgccctgcctgtggccgccccgacctcaccgatgacacacagttgctcagctacttctctacccttgacatccagcttcgcgagagcctagagccagatgcctatgcgttgttccataagaagctgaccgagggtgtgctgatgcgggaccccaagttcttgtggtgtgcccagtgctcctttggcttcatatatgagcgtgagcagctggaggcaacttgtccccagtgtcaccagaccttctgtgtgcgctgcaagcgccagtgggaggagcagcaccgaggtcggagctgtgaggacttccagaactggaaacgcatgaacgacccagaataccaggcccagggcctagcaatgtatcttcaggaaaacggcattgactgccccaaatgcaagttctcgtacgccctggcccgaggaggctgcatgcactttcactgtacccagtgccgccaccagttctgcagcggctgctacaatgccttttacgccaagaataaatgtccagagcctaactgcagggtgaaaaagtccctgcacggccaccaccctcgagactgcctcttctacctgcgggactggactgctctccggcttcagaagctgctacaggacaataacgtcatgtttaatacagagcctccagctggggcccgggcagtccctggaggcggctgccgagtgatagagcagaaggaggttcccaatgggctcagggacgaagcttgtggcaaggaaactccagctggctatgccggcctgtgccaggcacactacaaagagtatcttgtgagcctcatcaatgcccactcgctggacccagccaccttgtatgaggtggaagagctggagacggccactgagcgctacctgcacgtacgcccccagcctttggctggagaggatccccctgcttaccaggcccgcttgttacagaagctgacagaagaggtacccttgggacagagtatcccccgcaggcggaagtagctgagggcaagggtcccgatgagggtcccatggcctgctccctcaggaacagctccagcaccaataaagaggcatcttaccaccca

SEQ ID NO: 177457 - DNA, 1804 bp, Homo sapiens
  Payload ID: 14827
  Gene Symbol: RNF31
  Gene Name: ring finger protein 31
  ENST ID: ENST00000491351
  CDS Start-End: 200-562
agtacttcctgttctcggctaaccctggcgctgggccgggggctggagagtgaccgtggtctgagtgacctggggcggctgcgtgggccggggtgggcctcaaagccgggcaccagacgggaggggcggcgctcgggccgcgcgctgcccgcgccgggtcctggcgggcggcgaggctggggctgactcctgcctcaggatgccgggggaggaagaggagcgggccttcctggtggcccgcgaggagctggcgagcgccctgaggagggattccgggcaggcgttttccctggagcagctccggccgctactagccagctctctgccgctagccgcccgctacctgcagctggacgccgcacgccttgtccgctgcaacgctcatggggagccccgaaactacctcaacaccctcccaccccttcctgggatgggccagacaagcagagcctggtcaggcggcttttggcagtctacgcactccccagctggggccgggcagagctggcactgtcactgctgcaggagacacccaggaactatgagttgggggatgtggtagaagctgtgaggcacagccaggaccgggccttcctgcgccgcttgcttgcccaggagtgtgccgtgtgtggctgggccctgccccacaaccggatgcaggccctgacttcctgtgagtgcaccatctgtcctgactgcttccgccagcacttcaccatcgccttgaaggagaagcacatcacagacatggtgtgccctgcctgtggccgccccgacctcaccgatgacacacagttgctcagctacttctctacccttgacatccagcttcgcgagagcctagagccagatgcctatgcgttgttccataagaagctgaccgagggtgtgctgatgcgggaccccaagttcttgtggtgtgcccagtgctcctttggcttcatatatgagcgtgagcagctggaggcaacttgtccccagtgtcaccagaccttctgtgtgcgctgcaagcgccagctgtgaggacttccagaactggaaacgcatgaacgacccagaataccaggcccagggcctagcaatgtatcttcaggaaaacggcattgactgccccaaatgcaagttctcgtacgccctggcccgaggaggctgcatgcactttcactgtacccagtgccgccaccagttctgcagcggctgctacaatgccttttacgccaagaataaatgtccagagcctaactgcagggtgaaaaagtccctgcacggccaccaccctcgagactgcctcttctacctgcgggactggactgctctccggcttcagaagctgctacaggacaataacgtcatgtttaatacagagcctccagctggggcccgggcagtccctggaggcggctgccgagtgatagagcagaaggaggttcccaatgggctcagggacgaagcttgtggcaaggaaactccagctggctatgccggcctgtgccaggcacactacaaagagtatcttgtgagcctcatcaatgcccactcgctggacccagccaccttgtatgaggtggaagagctggagacggccactgagcgctacctgcacgtacgcccccagcctttggctggagaggatccccctgcttaccaggcccgcttgttacagaagctgacagaagaggtacccttgggacagagtatcccccgcaggcggaagtagctgagggcaagggtcccgatgagggtcccatggcctgctccctcaggaacagctccagcaccaataaagaggcatcttaccacccag

SEQ ID NO: 177458 - DNA, 777 bp, Homo sapiens
  Payload ID: 14827
  Gene Symbol: RNF31
  Gene Name: ring finger protein 31
  ENST ID: ENST00000558907
  CDS Start-End: 1-459
ccccgaaactacctcaacaccctgtccacggctctgaacatcctggagaaatacggccgcaaccttctcagccctcagcggcctcggtactggcgtggtgtcaagtttaataaccctgtctttcgcagcacggtggatgctgtgcaggggggccgagatgtgctgcgattatatggctacacagaggagcaaccagatgggttgagcttccccgaagggcaggaggagccagatgagcaccaggttgctacagtcacactggaagtactgctgcttcggacagagctcagcctgctattgcagaatactcatccaagacagcaggcactggagcagctgttggaagacaaggttgaagatgatatgctgcagctttcagaatttgaccccctattgagagagattgctcctggccccctcaccacaccctctgtcccaggccctgtgtccagcctgtgaccacctgttccatggacacccatcccgtgctcatcacctccgccagaccctgcctggggtcctgcagggtacccacctgagccccagtttacctgcctcagcccaaccacggccccagtcgacctccctgctggccctgggagacagctctctttcttcccctaatcctgcaagtgctcatttgccctggcactgtgctgcctgtgccatgctaaatgagccttgggcagtgctctgtgtggcctgtgatcggccccgaggctgtaaggggttggggttgggaactgagggtccccaaggaactggaggcctagaacc

SEQ ID NO: 177459 - DNA, 551 bp, Homo sapiens
  Payload ID: 14827
  Gene Symbol: RNF31
  Gene Name: ring finger protein 31
  ENST ID: ENST00000559260
  CDS Start-End: 456-551
agtacttcctgttctcggctaaccctggcgctgggccgggggctggagagtgaccgtggtctgagtgacctggggcggctgcgtgggccgggccccgaaactacctcaacaccctgtccacggctctgaacatcctggagaaatacggccgcaaccttctcagccctcagcggcctcggtactggcgtggtgtcaagtttaataaccctgtctttcgcagcacggtggatgctgtgcaggggggccgagatgtgctgcgattatatggctacacagaggagcaaccagatgggttgagcttccccgaagggcaggaggagccagatgagcaccaggttgctacagtcacactggaagtactgctgcttcggacagagctcagcctgctattgcagaatactcatccaagacagcaggcactggagcagctgttggaagacaaggttgaagatgatatgctgcagctttcagaatttgaccccctattgagagagattgctcctggccccctcaccacaccctctgtcccaggctccactcctggtccctgc

SEQ ID NO: 177460 - DNA, 660 bp, Homo sapiens
  Payload ID: 14827
  Gene Symbol: RNF31
  Gene Name: ring finger protein 31
  ENST ID: ENST00000483895
  CDS Start-End: 1-431
gggaggagcagcaccgaggtcggagctgtgaggacttccagaactggaaacgcatgaacgacccagaataccaggcccagggcctagcaatgtatcttcaggaaaacggcattgactgccccaaatgcaagttctcgtacgccctggcccgaggaggctgcatgcactttcactgtacccagtgccgccaccagttctgcagcggctgctacaatgccttttacgccaagaataaatgtccagagcctaactgcagggtgaaaaagtccctgcacggccaccaccctcgagactgcctcttctacctgcgggactggactgctctccggcttcagaagctgctacaggacaataacgtcatgtttaatacagagcctccagctggggcccgggcagtccctggagggcacactacaaagagtatcttgtgagcctcatcaatgcccactcgctggacccagccaccttgtatgaggtggaagagctggagacggccactgagcgctacctgcacgtacgcccccagcctttggctggagaggatccccctgcttaccaggcccgcttgttacagaagctgacagaagaggtacccttgggacagagtatcccccgcaggcggaagtagctgagggcaagggtcccgatgagggtcccatg

SEQ ID NO: 177461 - DNA, 576 bp, Homo sapiens
  Payload ID: 14827
  Gene Symbol: RNF31
  Gene Name: ring finger protein 31
  ENST ID: ENST00000560071
  CDS Start-End: 395-576
agctagggccaactggaagtccagggttgggccccgaaactacctcaacaccctgtccacggctctgaacatcctggagaaatacggccgcaaccttctcagccctcagcggcctcggtactggcgtggtgtcaagtttaataaccctgtctttcgcagcacggtggatgctgtgcaggggggccgagatgtgctgcgattatatggctacacagaggagcaaccagatgggttgagcttccccgaagggcaggaggagccagatgagcaccaggttgctacagtcacactggaagtactgctgcttcggacagagctcagcctgctattgcagaatactcatccaagacagcaggcactggagcagctgttggaagacaaggttgaagatgatatgctgcagctttcagaatttgaccccctattgagagagattgctcctggccccctcaccacaccctctgtcccaggctccactcctggtccctgcttcctctgtggttctgccccaggcacactgcactgcccatcctgtaaacaggccctgtgtccagcctgtgaccacctgttccatgg

SEQ ID NO: 177462 - DNA, 550 bp, Homo sapiens
  Payload ID: 14827
  Gene Symbol: RNF31
  Gene Name: ring finger protein 31
  ENST ID: ENST00000560875
  CDS Start-End: 382-550
ttctttccgcccccctcctcccgctggcaggccgcaagcagtaggtagcccctcagccattcccagccagttgccactaggagaggcggtgctggctgggtcacagtccaggggctgcccgagggaggggctaggccccgcccgttcctccgaaattgggtcgcagtcccaccctctctcctagtacttcctgttctcggctaaccctggcgctgggccgggggctggagagtgaccgtggtctgagtgacctggggcggctgcgtgggccggggtgggcctcaaagccgggcaccagacgggaggggcggcgctcgggccgcgcgctgcccgcgccgggtcctggcgggcggcgaggctggggctgactcctgcctcaggatgccgggggaggaagaggagcgggccttcctggtggcccgcgaggagctggcgagcgccctgaggagggattccgggcaggcgttttccctggagcagctccggccgctactagccagctctctgccgctagccgcccgctacctgcagctggacgccgcacgccttg

SEQ ID NO: 177463 - DNA, 889 bp, Homo sapiens
  Payload ID: 14827
  Gene Symbol: RNF31
  Gene Name: ring finger protein 31
  ENST ID: ENST00000559533
  CDS Start-End: 442-889
cattcccagccagttgccactaggagaggcggtgctggctgggtcacagtccaggggctgcccgagggaggggctaggccccgaaactacctcaacaccctgtccacggctctgaacatcctggagaaatacggccgcaaccttctcagccctcagcggcctcggtactggcgtggtgtcaagtttaataaccctgtctttcgcagcacggtggatgctgtgcaggggggccgagatgtgctgcgattatatggctacacagaggagcaaccagatgggttgagcttccccgaagggcaggaggagccagatgagcaccaggttgctacagtcacactggaagtactgctgcttcggacagagctcagcctgctattgcagaatactcatccaagacagcaggcactggagcagctgttggaagacaaggttgaagatgatatgctgcagctttcagaatttgaccccctattgagagagattgctcctggccccctcaccacaccctctgtcccaggctccactcctggtccctgcttcctctgtggttctgccccaggcacactgcactgcccatcctgtaaacaggccctgtgtccagcctgtgaccacctgttccatggacacccatcccgtgctcatcacctccgccagaccctgcctggggtcctgcagggtacccacctgagccccagtttacctgcctcagcccaaccacggccccagtcgacctccctgctggccctgggagacagctctctttcttcccctaatcctgcaagtgctcatttgccctggcactgtgctgcctgtgccatgctaaatgagccttgggcagtgctctgtgtggcctgtgatcggccccgaggctgtaaggggttggggttgg

SEQ ID NO: 177464 - DNA, 808 bp, Homo sapiens
  Payload ID: 14827
  Gene Symbol: RNF31
  Gene Name: ring finger protein 31
  ENST ID: ENST00000559449
  CDS Start-End: 1-422
ccttctgtgtgcgctgcaagcgccagtgggaggagcagcaccgaggtcggagctgtgaggacttccagaactggaaacgcatgaacgacccagaataccaggcccagggcctagcaatgtatcttcaggaaaacggcattgactgccccaaatgcaagttctcgtacgccctggcccgaggaggctgcatgcactttcactgtacccagtgccgccaccagttctgcagcggctgctacaatgccttttacgccaagaataaatgtccagagcctaactgcagggtgaaaaagtccctgcacggccaccaccctcgagactgcctcttctacctgcgggactggactgctctccggcttcagaagctgctacagagcctccagctggggcccgggcagtccctggaggcggctgccgagtgatagagcagaaggaggttcccaatgggctcagggacgaagcttgtggcaaggaaactccagctggctatgccggcctgtgccaggcacactacaaagagtatcttgtgagcctcatcaatgcccactcgctggacccagccaccttgtatgaggtggaagagctggagacggccactgagcgctacctgcacgtacgcccccagcctttggctggagaggatccccctgcttaccaggcccgcttgttacagaagctgacagaagaggtacccttgggacagagtatcccccgcaggcggaagtagctgagggcaagggtcccgatgagggtcccatggcctgctccctcaggaacagctccagcaccaataaagaggcatcttacc

SEQ ID NO: 177465 - DNA, 1842 bp, Homo sapiens
  Payload ID: 14828
  Gene Symbol: RNF32
  Gene Name: ring finger protein 32
  ENST ID: ENST00000311822
  CDS Start-End: 155-1087
tcggggtgagggccgtccgcggcctcgctttcgcctcctccgagccgggccggcgatggccgcagctgtgaggcgagcagaagaatagaaggaaggtgataggatgtgatgatagaatttgtgatagccaagcaacaacttttcctaattcggcatgttaaaaaataagggtcactcatctaagaaagataacttggcagtcaatgcagttgctttacaagatcacattttacatgatcttcaacttcgaaatctttcagttgcagatcattctaagacacaagtacaaaagaaagagaacaaatctctaaaaagagatacaaaggcaataatagatactggacttaaaaaaactacacagtgccccaaactagaagactcagaaaaagaatatgttcttgatcccaaaccgccgccgttgactttggcacagaagttgggcctcattgggcctccaccacctccactgtcatcagatgaatgggagaaggtgaaacagcgctctctcctgcaaggggactccgtgcaaccatgccccatctgtaaagaagaattcgagcttcgtcctcaggtgctgctttcatgctcccatgtgttccacaaagcatgtcttcaggcttttgaaaagttcacaaataagaaaacctgtcctctctgtagaaagaaccagtatcaaacccgagtgatacacgatggggcccgcctgttcagaatcaagtgtgtgaccagaatccaagcctactggagaggatgtgttgttagaaagtggtacagaaacctgaggaaaacagtacctcccacagatgccaagttaagaaaaaaattctttgaaaaaaagttcacagaaatcagccaccgcatcctgtgctcatacaacaccaacattgaagagctctttgcagaaatcgatcagtgcttggccataaatcgaagtgttcttcagcagttggaagaaaaatgtggccatgagatcacagaagaggaatgggagaaaatccaagtgcagaatgaaacttccgcatgtttcgaagacccatgtctcggggcacatggttcgcatttcagtttaagtaactttctgctgtgatgaaactaacccgcgtggcctcttcccgtcctgtgtgccgcaggctctgcgccgggagacccacgagtgctccatctgcctggcccctctctccgctgctggcggtcagcgcgtgggtgcaggcaggcgttccagagagatggccctcctgtcctgctcacatgtgttccaccatgcgtgtctgctggcactagaggagttctccgtgggagacaggcctcctttccatgcctgtcctctctgccgctcctgctaccagaagaagattcttgaatgttgaattcatagtcaaggaaagttaggtaattctgaggaaaaaagtttaccatcattttggatgaactgcatgagttctgggttaagtactacaatgtaatctgtttcccagggaaataagctattggtagttgtaggaaatcttagtatattttaaaagctgacatcccacctaattttaatctttggtctctaaaaagtaaatttcaaatttatgagtttaatcacttcaaatatgaatagcaaaaaatgagagcttgcttacttctaaaaattgaggttaagatatagctagtgtctgaacgacactccttaaagtaagttccaaatgtaaaacactccttaagttccaaatgttttccgctaatagtctgtcctaaagcctttgccattcctaatactcgttttgtaataattgctgtatttctgtgtaataaaatataaaaataaaatattcagtggtattcaacatcaaaaaa

SEQ ID NO: 177466 - DNA, 1682 bp, Homo sapiens
  Payload ID: 14828
  Gene Symbol: RNF32
  Gene Name: ring finger protein 32
  Uniprot ID: Q9H0A6
  ENST ID: ENST00000317955
  CDS Start-End: 119-1207
ggcagacgtccctgggttccggtgttcgcggaggagtcgagcagaagaatagaaggaaggtgataggatgtgatgatagaatttgtgatagccaagcaacaacttttcctaattcggcatgttaaaaaataagggtcactcatctaagaaagataacttggcagtcaatgcagttgctttacaagatcacattttacatgatcttcaacttcgaaatctttcagttgcagatcattctaagacacaagtacaaaagaaagagaacaaatctctaaaaagagatacaaaggcaataatagatactggacttaaaaaaactacacagtgccccaaactagaagactcagaaaaagaatatgttcttgatcccaaaccgccgccgttgactttggcacagaagttgggcctcattgggcctccaccacctccactgtcatcagatgaatgggagaaggtgaaacagcgctctctcctgcaaggggactccgtgcaaccatgccccatctgtaaagaagaattcgagcttcgtcctcaggtgctgctttcatgctcccatgtgttccacaaagcatgtcttcaggcttttgaaaagttcacaaataagaaaacctgtcctctctgtagaaagaaccagtatcaaacccgagtgatacacgatggggcccgcctgttcagaatcaagtgtgtgaccagaatccaagcctactggagaggatgtgttgttagaaagtggtacagaaacctgaggaaaacagtacctcccacagatgccaagttaagaaaaaaattctttgaaaaaaagttcacagaaatcagccaccgcatcctgtgctcatacaacaccaacattgaagagctctttgcagaaatcgatcagtgcttggccataaatcgaagtgttcttcagcagttggaagaaaaatgtggccatgagatcacagaagaggaatgggagaaaatccaagtgcaggctctgcgccgggagacccacgagtgctccatctgcctggcccctctctccgctgctggcggtcagcgcgtgggtgcaggcaggcgttccagagagatggccctcctgtcctgctcacatgtgttccaccatgcgtgtctgctggcactagaggagttctccgtgggagacaggcctcctttccatgcctgtcctctctgccgctcctgctaccagaagaagattcttgaatgttgaattcatagtcaaggaaagttaggtaattctgaggaaaaaagtttaccatcattttggatgaactgcatgagttctgggttaagtactacaatgtaatctgtttcccagggaaataagctattggtagttgtaggaaatcttagtatattttaaaagctgacatcccacctaattttaatctttggtctctaaaaagtaaatttcaaatttatgagtttaatcacttcaaatatgaatagcaaaaaatgagagcttgcttacttctaaaaattgaggttaagatatagctagtgtctgaacgacactccttaaagtaagttccaaatgtaaaacactccttaagttccaaatgttttccgctaatagtctgtcctaaagcctttgccattcctaatactcgttttgtaataattgctgtatttctgtgtaataaaatataaaaataaaatattcagtggtattcaacatcaaaaaa

SEQ ID NO: 177467 - DNA, 2260 bp, Homo sapiens
  Payload ID: 14828
  Gene Symbol: RNF32
  Gene Name: ring finger protein 32
  Uniprot ID: Q9H0A6
  ENST ID: ENST00000392741
  CDS Start-End: 89-796
cgtctttgcagcagaagaatagaaggaaggtgataggatgtgatgatagaatttgtgatagccaagcaacaacttttcctaattcggcatgttaaaaaataagggtcactcatctaagaaagataacttggcagtcaatgcagttgctttacaagatcacattttacatgatcttcaacttcgaaatctttcagttgcagatcattctaagacacaagtacaaaagaaagagaacaaatctctaaaaagagatacaaaggcaataatagatactggacttaaaaaaactacacagtgccccaaactagaagactcagaaaaagaatatgttcttgatcccaaaccgccgccgttgactttggcacagaagttgggcctcattgggcctccaccacctccactgtcatcagatgaatgggagaaggtgaaacagcgctctctcctgcaaggggactccgtgcaaccatgccccatctgtaaagaagaattcgagcttcgtcctcaggtgctgctttcatgctcccatgtgttccacaaagcatgtcttcaggcttttgaaaagttcacaaataagaaaacctgtcctctctgtagaaagaaccagtatcaaacccgagtgatacacgatggggcccgcctgttcagaatcaagtgtgtgaccagaatccaagcctactggagaggatgtgttgttagaaagtggtacagaaacctgaggaaaacagtacctcccacagatgccaagttaagaaaaaaattctttgaaaaaaagacacaagactggaaaccagcttaatttttcccatctcctgggctatatgtaaatgaagacatctgctgcacatctcatagtaatgaaaatagaagctgcctataaaaataaagcccccacatgctaccattgtattgagtacctcgtggggtcatcacaatgagctttagagctaacttccatgtctacccttcctcttaaccactatttatgctttagttttacttttgggggacttatttaacaatttcccattccttgtccccatatgaaaaggacagtcctaccccatcagcctgtggcttcaggcaaacagcagcagctccgaggctgtcatatgaaagccatcacttcttcctggcagtgttggcctgagaagagctgtagcatttataatggcccagcacacagtaggtgctggaaattctgtatttattatcactattaactcctttcctagaatatggagatgagttactgtgtgttctgttcctgagagcagtgtctctgatcttcagagatcattcgtctcgggtgttcattctcaatttggtaaaggaccgccatgcacgattgcgtcatccttcctttacattctttccagttttttatcttcagtcgttgacagtcagttgtgttctctgggctactcttagtaatttctaatatgtcatagtaggttgtctcttaaatcagaagtgattttttgtcacctcttatacaattttaattacagatttgatagtcattttaccttatatatataaatatttttcatgtgcacacatcattttataagaactcttgaagataaaggcccactgaaagtgttggtggtctcagcccattgaactggacgagaactggcccaggttgctggaaacaagtgaagcaaccattacaatgtgccttgtgttatcttgtaaagtagccagtgaaggttaagtttcagcgttcagtgctcaggtgttcaaatgctgcagccttcagcttcatggaaaaaggaaacgaaaaataacaaaaagcaagtgaccaagagcagtcggggcagggagacctgatcaaacaagttcctcagtttctaattcagtgtctcccacagagagatggaactttacaaggcagattcatagctctgtcccactggacgttgggtccgctgccctgtggccatcccacctccccacaaatactgttttttgttttatccttggttcatcccaactgctgcctcctcgtcctgagccctcatcgctcggaacgccccgctctgatccccgtgtctgcttttctgagcacactcttgcccgcccccgcatgtcctgcccgttcctactggttccctctgccttgcttaaaatgtgccagtttttcaaagcctagctgaagctttcttccaatttctttggtcttctctaaacctctattgtatgtttaaacaacaccatctaagagatcaagaagaacagaagtatgaatgctattcta

SEQ ID NO: 177468 - DNA, 1746 bp, Homo sapiens
  Payload ID: 14828
  Gene Symbol: RNF32
  Gene Name: ring finger protein 32
  Uniprot ID: Q9H0A6
  ENST ID: ENST00000392743
  CDS Start-End: 189-1277
tatattttgaatacatctgtcttcataaaatacaccatgtccaaaatctaaaagggccaattccaaattattccaccagctttgaagggaattgaagcaagaataacaagacagaagaatagaaggaaggtgataggatgtgatgatagaatttgtgatagccaagcaacaacttttcctaattcggcatgttaaaaaataagggtcactcatctaagaaagataacttggcagtcaatgcagttgctttacaagatcacattttacatgatcttcaacttcgaaatctttcagttgcagatcattctaagacacaagtacaaaagaaagagaacaaatctctaaaaagagatacaaaggcaataatagatactggacttaaaaaaactacacagtgccccaaactagaagactcagaaaaagaatatgttcttgatcccaaaccgccgccgttgactttggcacagaagttgggcctcattgggcctccaccacctccactgtcatcagatgaatgggagaaggtgaaacagcgctctctcctgcaaggggactccgtgcaaccatgccccatctgtaaagaagaattcgagcttcgtcctcaggtgctgctttcatgctcccatgtgttccacaaagcatgtcttcaggcttttgaaaagttcacaaataagaaaacctgtcctctctgtagaaagaaccagtatcaaacccgagtgatacacgatggggcccgcctgttcagaatcaagtgtgtgaccagaatccaagcctactggagaggatgtgttgttagaaagtggtacagaaacctgaggaaaacagtacctcccacagatgccaagttaagaaaaaaattctttgaaaaaaagttcacagaaatcagccaccgcatcctgtgctcatacaacaccaacattgaagagctctttgcagaaatcgatcagtgcttggccataaatcgaagtgttcttcagcagttggaagaaaaatgtggccatgagatcacagaagaggaatgggagaaaatccaagtgcaggctctgcgccgggagacccacgagtgctccatctgcctggcccctctctccgctgctggcggtcagcgcgtgggtgcaggcaggcgttccagagagatggccctcctgtcctgctcacatgtgttccaccatgcgtgtctgctggcactagaggagttctccgtgggagacaggcctcctttccatgcctgtcctctctgccgctcctgctaccagaagaagattcttgaatgttgaattcatagtcaaggaaagttaggtaattctgaggaaaaaagtttaccatcattttggatgaactgcatgagttctgggttaagtactacaatgtaatctgtttcccagggaaataagctattggtagttgtaggaaatcttagtatattttaaaagctgacatcccacctaattttaatctttggtctctaaaaagtaaatttcaaatttatgagtttaatcacttcaaatatgaatagcaaaaaatgagagcttgcttacttctaaaaattgaggttaagatatagctagtgtctgaacgacactccttaaagtaagttccaaatgtaaaacactccttaagttccaaatgttttccgctaatagtctgtcctaaagcctttgccattcctaatactcgttttgtaataattgctgtatttctgtgtaataaaatataaaaataaaatattcagtggtattcaacatc

SEQ ID NO: 177469 - DNA, 1748 bp, Homo sapiens
  Payload ID: 14828
  Gene Symbol: RNF32
  Gene Name: ring finger protein 32
  Uniprot ID: Q9H0A6
  ENST ID: ENST00000392747
  CDS Start-End: 78-365
cagaagaatagaaggaaggtgataggatgtgatgatagaatttgtgatagccaagcaacaacttttcctaattcggcatgttaaaaaataagggtcactcatctaagaaagataacttggcagtcaatgcagttgctttacaagatcacattttacatgatcttcaacttcgaaatctttcagttgcagatcattctaagacacaagtacaaaagaaagagaacaaatctctaaaaagagatacaaaggcaataatagatactggacttaaaaaaactacacagtgccccaaactagaagactcagaaaaagaatatgttcttgatcccaaaccgccgccgttgactttgggataccattcataggatgtacagccaactttaaaccagtatgacctcatcttaactacatctgcaaagaccctatttccaaataaggtcaacatccagaggttccagcacagaagttgggcctcattgggcctccaccacctccactgtcatcagatgaatgggagaaggtgaaacagcgctctctcctgcaaggggactccgtgcaaccatgccccatctgtaaagaagaattcgagcttcgtcctcaggtgctgctttcatgctcccatgtgttccacaaagcatgtcttcaggcttttgaaaagttcacaaataagaaaacctgtcctctctgtagaaagaaccagtatcaaacccgagtgatacacgatggggcccgcctgttcagaatcaagtgtgtgaccagaatccaagcctactggagaggatgtgttgttagaaagtggtacagaaacctgaggaaaacagtacctcccacagatgccaagttaagaaaaaaattctttgaaaaaaagttcacagaaatcagccaccgcatcctgtgctcatacaacaccaacattgaagagctctttgcagaaatcgatcagtgcttggccataaatcgaagtgttcttcagcagttggaagaaaaatgtggccatgagatcacagaagaggaatgggagaaaatccaagtgcaggctctgcgccgggagacccacgagtgctccatctgcctggcccctctctccgctgctggcggtcagcgcgtgggtgcaggcaggcgttccagagagatggccctcctgtcctgctcacatgtgttccaccatgcgtgtctgctggcactagaggagttctccgtgggagacaggcctcctttccatgcctgtcctctctgccgctcctgctaccagaagaagattcttgaatgttgaattcatagtcaaggaaagttaggtaattctgaggaaaaaagtttaccatcattttggatgaactgcatgagttctgggttaagtactacaatgtaatctgtttcccagggaaataagctattggtagttgtaggaaatcttagtatattttaaaagctgacatcccacctaattttaatctttggtctctaaaaagtaaatttcaaatttatgagtttaatcacttcaaatatgaatagcaaaaaatgagagcttgcttacttctaaaaattgaggttaagatatagctagtgtctgaacgacactccttaaagtaagttccaaatgtaaaacactccttaagttccaaatgttttccgctaatagtctgtcctaaagcctttgccattcctaatactcgttttgtaataattgctgtatttctgtgtaataaaatataaaaataaaatattcagtggtattcaacatcaaaaaa

SEQ ID NO: 177470 - DNA, 1938 bp, Homo sapiens
  Payload ID: 14828
  Gene Symbol: RNF32
  Gene Name: ring finger protein 32
  Uniprot ID: Q9H0A6
  ENST ID: ENST00000405335
  CDS Start-End: 410-1498
gggttccggtgttcgcggaggagtcgaggcacggagaggcttcgggggagggacggaaagaagggtggcccgccaggcgggcggggtccatggattcggggtgagggccgtccgcggcctcgctttcgcctcctccgagccgggccggcgatggccgcagctgtgaggcgaggtcgggtcccgtagcggcgcgcagcctccttgggggactcggggtcctgtatattttgaatacatctgtcttcataaaatacaccatgtccaaaatctaaaagggccaattccaaattattccaccagctttgaagggaattgaagcaagaataacaagacagaagaatagaaggaaggtgataggatgtgatgatagaatttgtgatagccaagcaacaacttttcctaattcggcatgttaaaaaataagggtcactcatctaagaaagataacttggcagtcaatgcagttgctttacaagatcacattttacatgatcttcaacttcgaaatctttcagttgcagatcattctaagacacaagtacaaaagaaagagaacaaatctctaaaaagagatacaaaggcaataatagatactggacttaaaaaaactacacagtgccccaaactagaagactcagaaaaagaatatgttcttgatcccaaaccgccgccgttgactttggcacagaagttgggcctcattgggcctccaccacctccactgtcatcagatgaatgggagaaggtgaaacagcgctctctcctgcaaggggactccgtgcaaccatgccccatctgtaaagaagaattcgagcttcgtcctcaggtgctgctttcatgctcccatgtgttccacaaagcatgtcttcaggcttttgaaaagttcacaaataagaaaacctgtcctctctgtagaaagaaccagtatcaaacccgagtgatacacgatggggcccgcctgttcagaatcaagtgtgtgaccagaatccaagcctactggagaggatgtgttgttagaaagtggtacagaaacctgaggaaaacagtacctcccacagatgccaagttaagaaaaaaattctttgaaaaaaagttcacagaaatcagccaccgcatcctgtgctcatacaacaccaacattgaagagctctttgcagaaatcgatcagtgcttggccataaatcgaagtgttcttcagcagttggaagaaaaatgtggccatgagatcacagaagaggaatgggagaaaatccaagtgcaggctctgcgccgggagacccacgagtgctccatctgcctggcccctctctccgctgctggcggtcagcgcgtgggtgcaggcaggcgttccagagagatggccctcctgtcctgctcacatgtgttccaccatgcgtgtctgctggcactagaggagttctccgtgggagacaggcctcctttccatgcctgtcctctctgccgctcctgctaccagaagaagattcttgaatgttgaattcatagtcaaggaaagttaggtaattctgaggaaaaaagtttaccatcattttggatgaactgcatgagttctgggttaagtactacaatgtaatctgtttcccagggaaataagctattggtagttgtaggaaatcttagtatattttaaaagctgacatcccacctaattttaatctttggtctctaaaaagtaaatttcaaatttatgagtttaatcacttcaaatatgaatagcaaaaaatgagagcttgcttacttctaaaaattgaggttaagatatagctagtgtctgaacgacactccttaaagtaagttccaaatgtaaaacactccttaagttccaaatgttttccgctaatagtctgtcctaaagcctttgccattcctaatactcgttttgtaataattgctgtatttctgtgtaataaaatataa

SEQ ID NO: 177471 - DNA, 793 bp, Homo sapiens
  Payload ID: 14828
  Gene Symbol: RNF32
  Gene Name: ring finger protein 32
  ENST ID: ENST00000404282
  CDS Start-End: 131-793
ggaacgggaacgaccacagccaccgcagggaaacaaccggggcccaggcccagcagaagaatagaaggaaggtgataggatgtgatgatagaatttgtgatagccaagcaacaacttttcctaattcggcatgttaaaaaataagggtcactcatctaagaaagataacttggcagtcaatgcagttgctttacaagatcacattttacatgatcttcaacttcgaaatctttcagttgcagatcattctaagacacaagtacaaaagaaagagaacaaatctctaaaaagagatacaaaggcaataatagatactggacttaaaaaaactacacagtgccccaaactagaagactcagaaaaagaatatgttcttgatcccaaaccgccgccgttgactttggcacagaagttgggcctcattgggcctccaccacctccactgtcatcagatgaatgggagaaggtgaaacagcgctctctcctgcaaggggactccgtgcaaccatgccccatctgtaaagaagaattcgagcttcgtcctcaggtgctgctttcatgctcccatgtgttccacaaagcatgtcttcaggcttttgaaaagttcacaaataagaaaacctgtcctctctgtagaaagaaccagtatcaaacccgagtgatacacgatggggcccgcctgttcagaatcaagtgtgtgaccagaatccaagcctactggagaggatgtgttgttagaaagtggtacagaaacctgaggaaaacagtacctcccacagatgccaagttaaga

SEQ ID NO: 177472 - DNA, 308 bp, Homo sapiens
  Payload ID: 14828
  Gene Symbol: RNF32
  Gene Name: ring finger protein 32
  ENST ID: ENST00000439609
  CDS Start-End: 253-308
ggggcagggctggtgagcaagcccgcggggagcgagcgcggaggcgggcgttgctacggcaacgtatattttgaatacatctgtcttcataaaatacaccatgtccaaaatctaaaagggccaattccaaattattccaccagctttgaagggaattgaagcaagaataacaagacagaagaatagaaggaaggtgataggatgtgatgatagaatttgtgatagccaagcaacaacttttcctaattcggcatgttaaaaaataagggtcactcatctaagaaagataacttggcagtcaatgcagt

SEQ ID NO: 177473 - DNA, 1893 bp, Homo sapiens
  Payload ID: 14828
  Gene Symbol: RNF32
  Gene Name: ring finger protein 32
  Uniprot ID: Q9H0A6
  ENST ID: ENST00000432459
  CDS Start-End: 336-1424
cagggagttgcctgagggaaaaggggcagacgtccctgggttccggtgttcgcggaggagtcgaggcacggagaggcttcgggggagggacggaaagaagggtggcccgccaggcgggcggggtccatggattcggggtgagggccgtccgcggcctcgctttcgcctcctccgagccgggccggcgatggccgcagctgtgaggcgaggtcgggtcccgtagcggcgcgcagcctccttgggggactcggggtcctgcagaagaatagaaggaaggtgataggatgtgatgatagaatttgtgatagccaagcaacaacttttcctaattcggcatgttaaaaaataagggtcactcatctaagaaagataacttggcagtcaatgcagttgctttacaagatcacattttacatgatcttcaacttcgaaatctttcagttgcagatcattctaagacacaagtacaaaagaaagagaacaaatctctaaaaagagatacaaaggcaataatagatactggacttaaaaaaactacacagtgccccaaactagaagactcagaaaaagaatatgttcttgatcccaaaccgccgccgttgactttggcacagaagttgggcctcattgggcctccaccacctccactgtcatcagatgaatgggagaaggtgaaacagcgctctctcctgcaaggggactccgtgcaaccatgccccatctgtaaagaagaattcgagcttcgtcctcaggtgctgctttcatgctcccatgtgttccacaaagcatgtcttcaggcttttgaaaagttcacaaataagaaaacctgtcctctctgtagaaagaaccagtatcaaacccgagtgatacacgatggggcccgcctgttcagaatcaagtgtgtgaccagaatccaagcctactggagaggatgtgttgttagaaagtggtacagaaacctgaggaaaacagtacctcccacagatgccaagttaagaaaaaaattctttgaaaaaaagttcacagaaatcagccaccgcatcctgtgctcatacaacaccaacattgaagagctctttgcagaaatcgatcagtgcttggccataaatcgaagtgttcttcagcagttggaagaaaaatgtggccatgagatcacagaagaggaatgggagaaaatccaagtgcaggctctgcgccgggagacccacgagtgctccatctgcctggcccctctctccgctgctggcggtcagcgcgtgggtgcaggcaggcgttccagagagatggccctcctgtcctgctcacatgtgttccaccatgcgtgtctgctggcactagaggagttctccgtgggagacaggcctcctttccatgcctgtcctctctgccgctcctgctaccagaagaagattcttgaatgttgaattcatagtcaaggaaagttaggtaattctgaggaaaaaagtttaccatcattttggatgaactgcatgagttctgggttaagtactacaatgtaatctgtttcccagggaaataagctattggtagttgtaggaaatcttagtatattttaaaagctgacatcccacctaattttaatctttggtctctaaaaagtaaatttcaaatttatgagtttaatcacttcaaatatgaatagcaaaaaatgagagcttgcttacttctaaaaattgaggttaagatatagctagtgtctgaacgacactccttaaagtaagttccaaatgtaaaacactccttaagttccaaatgttttccgctaatagtctgtcctaaagcctttgccattcctaatactcgttttgtaataattgctgtatttctgtgtaataaaatataaaaataaaatattcagtggtattcaacatc

SEQ ID NO: 177474 - DNA, 2066 bp, Homo sapiens
  Payload ID: 14829
  Gene Symbol: RNF34
  Gene Name: ring finger protein 34, E3 ubiquitin protein ligase
  Uniprot ID: Q969K3
  ENST ID: ENST00000361234
  CDS Start-End: 173-1291
gcgcttttaccggggcacgcggcgagcgtgaccacgccccttacgtccggacgctcggtcgcctcccggggcgcggtaatcaccgcccagagggaaggaggtcggcagtgtgaggagctgctatggtgctgagtttcctggtagagccggccgagctgaggcggtcgcggccatgaaggcgggtgccacgtctatgtgggcttcgtgctgtgggctgctgaatgaagtcatgggaactggagctgtcaggggccagcagtcagcatttgcaggagccaccggtccattcagatttacaccaaaccctgagttttccacctacccaccagcagctacggaagggcccaacatagtttgtaaagcctgtgggctttcattttcagtctttagaaagaagcatgtttgctgtgactgcaagaaggatttttgctccgtttgttcagtcttacaagaaaatctccgtagatgttctacttgtcacttattacaagagacagcatttcagcgccctcagttaatgcgactgaaggtgaaggacctgcggcagtatctcattctgagaaatatacccatagatacttgtcgtgagaaagaagacttggtggatctagtactgtgccatcatggactaggctctgaggacgacatggacacaagcagtctgaattcttcaaggtcccagacttctagcttttttacacgttcgtttttttcaaactatacagccccctctgctactatgtcttcgtttcagggagagcttatggatggagaccaaacatccagatctggagtgccggcacaggtacaaagtgaaatcacttcagcaaacacagaagatgatgatgacgacgatgatgaggatgatgatgatgaagaagaaaacgcagaggatcggaaccccgggctctccaaggagagagtgagagcttcactgtctgacttgtcaagccttgatgatgtggaaggaatgagcgtgcgccagctgaaggaaattctggctcggaattttgtcaactattctggctgttgtgaaaaatgggaactggtagagaaagtaaaccggttatacaaagagaatgaagaaaaccaaaagtcctatggcgagcggctgcagctgcaggatgaggaagacgacagcctgtgtcgcatctgcatggatgccgtcatcgactgtgtcctactggagtgtgggcacatggttacctgcaccaagtgcggcaagcgcatgagtgagtgtcccatctgccggcagtatgtggtgcgagccgtgcacgtgttcaagtcctgaaacaggctcccctcaccaggacagtcacccccaaacttgacccccaacatttcaatgcacagaagggactggaaagttatgttcaaaggctgaagctattttaaaacattattttgactactaagtggggacagaaagatccatcctgagttgtggaaacattggtccatgccgtgagcctgtctgcctgtggacacgtgagcttcccgggctcagctgggctttatcacacatcccgtgaacactcattgaagtcagcctgtttgcgccatgtgggcatcagccactgctgtcttgggaggacacttatcctgttctcttatttccccttcatcctatttttaacttaaactgctcagatgtttgaaacttctgtcctctttggatgagatcagtgtccacaagtggccgacatggaacatgctgagcagtggctcctctgaatgttcactttattagtcatgtatattttaaatgctaacatttgatgaatgtaagtttccacattgttgctgtttctgcatttaaacataattgggaacaactgacattctctagtcgactgccagggccttagactccacatgtccatttttgttcaggtatagctttttatagcaagggctgcatctagcttcttttattagaagtgtgtgtgctaaattccttattaatgtgtaatcagtttacattgttttgtatagtgaaggtgtattttcagtgctacccgctagctgattttaactttaggaataaaattagttttaaaagcttt

SEQ ID NO: 177475 - DNA, 1722 bp, Homo sapiens
  Payload ID: 14829
  Gene Symbol: RNF34
  Gene Name: ring finger protein 34, E3 ubiquitin protein ligase
  ENST ID: ENST00000392464
  CDS Start-End: 70-1593
ggcagtgtgaggagctgctatggtgctgagtttcctggtagagccggccgagctgaggcggtcgcggccatgaaggcgggtgccacgtctatgtgggcttcgtgctgtgggctgctgaatgaagtcatgggaactggagctgtcaggggccagcagtcagcatttgcaggagccaccggtccattcagatttacaccaaaccctgagttttccacctacccaccagcagctacggaagggcccaacatagtttgtaaagcctgtgggctttcattttcagtctttagaaagaagcatgtttgctgtgactgcaagaaggatttttgctccgtttgttcagtcttacaagaaaatctccgtagatgttctacttgtcacttattacaagagacagcatttcagcgccctcagttaatgcgactgaaggtgaaggacctgcggcagtatctcattctgagaaatatacccatagatacttgtcgtgagaaagaagacttggtggatctagtactgtgccatcatggactaggctctgaggacgacatggacacaagcagtctgaattcttcaaggtcccagacttctagcttttttacacgttcgtttttttcaaactatacagccccctctgctactatgtcttcgtttcagggagagcttatggatggagaccaaacatccagatctggagtgccggcacaggtacaaagtgaaatcacttcagcaaacacagaagatgatgatgacgacgatgatgaggatgatgatgatgaagaagaaaacgcagaggatcggaaccccgggctctccaaggagagagtgagagcttcactgtctgacttgtcaagccttgatgatgtggaaggaatgagcgtgcgccagctgaaggaaattctggctcggaattttgtcaactattctggctgttgtgaaaaatgggaactggtagagaaagtaaaccggttatacaaagagaatgaagaaaaccaaaagtcctatggcgagcggctgcagctgcaggatgaggaagacgacagcctgtgtcgcatctgcatggatgccgtcatcgactgtgtcctactggagtgtgggcacatggttacctgcaccaagtgcggcaagcgcatgagaatgtcttcttgtaaaggccgccttagaaatggtccagaaagcagtgcagttacgattcagaaagaccaaaggaaagtgtcggctcactcatcccccaaacgggtggttgaacagcttctcccttggaaagacttgcaaaatggaattgcgttgtggtctgttgtcccacgttccaaatggaaaataaaagccctcatttttgtaaagtctctcccctcccagagcccgccccgtatttacatacttatccttggactaactcagtttttgcaggagtttttcttctacttgcccaaactggacactcacagacatctcggctatgaactgctcacagccttccttggtgacttgcttgcagtacctcaggtcaatatgacagatgtttccacagcgtttgaagaaggacaggcactgatcagtgaccttattgcagtctgcagagaagaaatagtaatgtgaggtgtgaaggccaggagccagaagcccccccgccgccagacccaggcactcagcagtggggacaggtcagagctctacatattccagtccctgctgtgctgcactaaataaaatgttatttgcttaaaa

SEQ ID NO: 177476 - DNA, 2051 bp, Homo sapiens
  Payload ID: 14829
  Gene Symbol: RNF34
  Gene Name: ring finger protein 34, E3 ubiquitin protein ligase
  Uniprot ID: Q969K3
  ENST ID: ENST00000392465
  CDS Start-End: 158-1279
atcaccgcccagagggaaggaggtcggcagtgtgaggagctgctatggtgctgagtttcctggtagagccggccgagctgaggcggtcgcggccatgaaggtgggggagtggtactaaggatcaagtatactgttaaaagaaaacaaaaacccaagcatgaggaaggcgggtgccacgtctatgtgggcttcgtgctgtgggctgctgaatgaagtcatgggaactggagctgtcaggggccagcagtcagcatttgcaggagccaccggtccattcagatttacaccaaaccctgagttttccacctacccaccagcagctacggaagggcccaacatagtttgtaaagcctgtgggctttcattttcagtctttagaaagaagcatgtttgctgtgactgcaagaaggatttttgctccgtttgttcagtcttacaagaaaatctccgtagatgttctacttgtcacttattacaagagacagcatttcagcgccctcagttaatgcgactgaaggtgaaggacctgcggcagtatctcattctgagaaatatacccatagatacttgtcgtgagaaagaagacttggtggatctagtactgtgccatcatggactaggctctgaggacgacatggacacaagcagtctgaattcttcaaggtcccagacttctagcttttttacacgttcgtttttttcaaactatacagccccctctgctactatgtcttcgtttcagggagagcttatggatggagaccaaacatccagatctggagtgccggcacaggtacaaagtgaaatcacttcagcaaacacagaagatgatgatgacgacgatgatgaggatgatgatgatgaagaagaaaacgcagaggatcggaaccccgggctctccaaggagagagtgagagcttcactgtctgacttgtcaagccttgatgatgtggaaggaatgagcgtgcgccagctgaaggaaattctggctcggaattttgtcaactattctggctgttgtgaaaaatgggaactggtagagaaagtaaaccggttatacaaagagaatgaagaaaaccaaaagtcctatggcgagcggctgcagctgcaggatgaggaagacgacagcctgtgtcgcatctgcatggatgccgtcatcgactgtgtcctactggagtgtgggcacatggttacctgcaccaagtgcggcaagcgcatgagtgagtgtcccatctgccggcagtatgtggtgcgagccgtgcacgtgttcaagtcctgaaacaggctcccctcaccaggacagtcacccccaaacttgacccccaacatttcaatgcacagaagggactggaaagttatgttcaaaggctgaagctattttaaaacattattttgactactaagtggggacagaaagatccatcctgagttgtggaaacattggtccatgccgtgagcctgtctgcctgtggacacgtgagcttcccgggctcagctgggctttatcacacatcccgtgaacactcattgaagtcagcctgtttgcgccatgtgggcatcagccactgctgtcttgggaggacacttatcctgttctcttatttccccttcatcctatttttaacttaaactgctcagatgtttgaaacttctgtcctctttggatgagatcagtgtccacaagtggccgacatggaacatgctgagcagtggctcctctgaatgttcactttattagtcatgtatattttaaatgctaacatttgatgaatgtaagtttccacattgttgctgtttctgcatttaaacataattgggaacaactgacattctctagtcgactgccagggccttagactccacatgtccatttttgttcaggtatagctttttatagcaagggctgcatctagcttcttttattagaagtgtgtgtgctaaattccttattaatgtgtaatcagtttacattgttttgtatagtgaaggtgtattttcagtgctacccgctagctgattttaactttaggaataaaattagttttaaaagc

SEQ ID NO: 177477 - DNA, 431 bp, Homo sapiens
  Payload ID: 14829
  Gene Symbol: RNF34
  Gene Name: ring finger protein 34, E3 ubiquitin protein ligase
  ENST ID: ENST00000557402
  CDS Start-End: 319-431
gtcccagctgaaacagtgtaggcaggaagaagacatcttccctttgactgagcaggtcttaagcttttaacctggcctgtatatcagaattacccagggagttttcaaaaaaattctggtgcccaggctgcaccacagaccagtgaaatcagaacctctgggcctgggaccccaggaatcagtatttttaaagacttgcctggtgagtccaacatgcagccaaggctgaaaaccattctcttaagggcagtttcacaaccctaggcaattccttagcaagaagtactgacagcagctacgaaggcgggtgccacgtctatgtgggcttcgtgctgtgggctgctgaatgaagtcatgggaactggagctgtcaggggccagcagtcagcatttgcaggagccaccggtccattcagatttacaccaaaccc

SEQ ID NO: 177478 - DNA, 913 bp, Homo sapiens
  Payload ID: 14829
  Gene Symbol: RNF34
  Gene Name: ring finger protein 34, E3 ubiquitin protein ligase
  ENST ID: ENST00000554606
  CDS Start-End: 424-913
tcggcagtgtgaggagctgctatggtgctgagtttcctggtagagccggccgagctgaggcggtcgcggccatgaaggtgggggagtggtactaaggatcaagtatactgttaaaagaaaacaaaaacccaagcatgaggaagggattctgaaaacatattagattatacacacacagaagcaaagacagctgaaccttgaggccatttgaaaatcctggcactgtgccagaaagagagctgggctgctgctcttgcaaagaaacagaacacctttcctcttgcttttgttgactgtaatgatgtttcatgggcttatattgtttgactctgactgaggaacctgagagagtccttataaccttattggctggaaactgtcattcctactcttacgcagattatttaggcgggtgccacgtctatgtgggcttcgtgctgtgggctgctgaatgaagtcatgggaactggagctgtcaggggccagcagtcagcatttgcaggagccaccggtccattcagatttacaccaaaccctgagttttccacctacccaccagcagctacggaagggcccaacatagtttgtaaagcctgtgggctttcattttcagtctttagaaagaagcatgtttgctgtgactgcaagaaggatttttgctccgtttgttcagtcttacaagaaaatctccgtagatgttctacttgtcacttattacaagagacagcatttcagcgccctcagttaatgcgactgaaggtgaaggacctgcggcagtatctcattctgagaaatatacccatagatacttgtcgtgagaaagaagacttggtggatctagtactgtgccatcatggactaggctctgaggacgacatggacacaagcagtctgaattcttcaaggtcccaga

SEQ ID NO: 177479 - DNA, 593 bp, Homo sapiens
  Payload ID: 14829
  Gene Symbol: RNF34
  Gene Name: ring finger protein 34, E3 ubiquitin protein ligase
  ENST ID: ENST00000555076
  CDS Start-End: 67-204
agtgtgaggagctgctatggtgctgagtttcctggtagagccggccgagctgaggcggtcgcggccatgaagatggcgagcggctgcagctgcaggatgaggaagacgacagcctgtgtcgcatctgcatggatgccgtcatcgactgtgtcctactggagtgtgggcacatggttacctgcaccaagtgcggcaagcgcatgagtgagtgtcccatctgccggcagtatgtggtgcgagccgtgcacgtgttcaagtcctgaaacaggctcccctcaccaggacagtcacccccaaacttgacccccaacatttcaatgcacagaagggactggaaagttatgttcaaaggctgaagctattttaaaacattattttgactactaagtggggacagaaagatccatcctgagttgtggaaacattggtccatgccgtgagcctgtctgcctgtggacacgtgagcttcccgggctcagctgggctttatcacacatcccgtgaacactcattgaagtcagcctgtttgcgccatgtgggcatcagccactgctgtcttgggaggacacttatcctgttctcttatttcccct

SEQ ID NO: 177480 - DNA, 459 bp, Homo sapiens
  Payload ID: 14829
  Gene Symbol: RNF34
  Gene Name: ring finger protein 34, E3 ubiquitin protein ligase
  ENST ID: ENST00000554868
  CDS Start-End: 238-459
aggaatttgtggagggtgatgtcccagctgaaacagtgtaggcaggaagaagacatcttccctttgactgagcaggtcttaagcttttaacctggcctgtatatcagaattacccagggagttttcaaaaaaattctggtgcccaggctgcaccacagaccagtgaaatcagaacctctgggcctgggaccccaggaatcagtatttttaaagacttgcctggcgggtgccacgtctatgtgggcttcgtgctgtgggctgctgaatgaagtcatgggaactggagctgtcaggggccagcagtcagcatttgcaggagccaccggtccattcagatttacaccaaaccctgagttttccacctacccaccagcagctacggaagggcccaacatagtttgtaaagcctgtgggctttcattttcagtctttagaaagaagcatgtttgctgtgactgc

SEQ ID NO: 177481 - DNA, 1449 bp, Homo sapiens
  Payload ID: 14829
  Gene Symbol: RNF34
  Gene Name: ring finger protein 34, E3 ubiquitin protein ligase
  ENST ID: ENST00000613529
  CDS Start-End: 131-673
acgtccggacgctcggtcgcctcccggggcgcggtaatcaccgcccagagggaaggaggtcggcagtgtgaggagctgctatggtgctgagtttcctggtagagccggccgagctgaggcggtcgcggccatgaagggagagcttatggatggagaccaaacatccagatctggagtgccggcacaggtacaaagtgaaatcacttcagcaaacacagaagatgatgatgacgacgatgatgaggatgatgatgatgaagaagaaaacgcagaggatcggaaccccgggctctccaaggagagagtgagagcttcactgtctgacttgtcaagccttgatgatgtggaaggaatgagcgtgcgccagctgaaggaaattctggctcggaattttgtcaactattctggctgttgtgaaaaatgggaactggtagagaaagtaaaccggttatacaaagagaatgaagaaaaccaaaagtcctatggcgagcggctgcagctgcaggatgaggaagacgacagcctgtgtcgcatctgcatggatgccgtcatcgactgtgtcctactggagtgtgggcacatggttacctgcaccaagtgcggcaagcgcatgagtgagtgtcccatctgccggcagtatgtggtgcgagccgtgcacgtgttcaagtcctgaaacaggctcccctcaccaggacagtcacccccaaacttgacccccaacatttcaatgcacagaagggactggaaagttatgttcaaaggctgaagctattttaaaacattattttgactactaagtggggacagaaagatccatcctgagttgtggaaacattggtccatgccgtgagcctgtctgcctgtggacacgtgagcttcccgggctcagctgggctttatcacacatcccgtgaacactcattgaagtcagcctgtttgcgccatgtgggcatcagccactgctgtcttgggaggacacttatcctgttctcttatttccccttcatcctatttttaacttaaactgctcagatgtttgaaacttctgtcctctttggatgagatcagtgtccacaagtggccgacatggaacatgctgagcagtggctcctctgaatgttcactttattagtcatgtatattttaaatgctaacatttgatgaatgtaagtttccacattgttgctgtttctgcatttaaacataattgggaacaactgacattctctagtcgactgccagggccttagactccacatgtccatttttgttcaggtatagctttttatagcaagggctgcatctagcttcttttattagaagtgtgtgtgctaaattccttattaatgtgtaatcagtttacattgttttgtatagtgaaggtgtattttcagtgctacccgctagctgattttaactttaggaataaaattagttttaaaagctttt

SEQ ID NO: 177482 - DNA, 5012 bp, Homo sapiens
  Payload ID: 14830
  Gene Symbol: RNF38
  Gene Name: ring finger protein 38
  Uniprot ID: Q9H0F5
  ENST ID: ENST00000259605
  CDS Start-End: 109-1656
gcaagttcttcctttcagggttgaagcgtgagagaggttggtttttgaaacgggagtgtttcaggttattgaggtccaaaaagaaataaagtttttgtttacgtctgtatggcttgtaagatatctcccggggccaattcagcatctctacctggccatcctaacaaggtgatttgtgaaagggtgagacttcagagcctgttccctctcctcccaagtgatcagaacactaccgttcaagaggatgctcacttcaaagctttcttccagagtgaagatagtccaagtcctaagagacagcgcctctctcattcagtctttgattatacatcagcatcaccagctccctcaccaccaatgcgaccatgggagatgacatcaaataggcagcccccttcagttcgaccaagccaacatcacttctcaggggaacgatgcaacacacctgcacgcaacagaagaagtcctcctgtcaggcgccagagaggaagaagggatcgtctgtctcgacataattccattagtcaagatgaaaactatcaccatctcccttacgcacagcagcaagcaatagaggagcctcgagccttccaccctccgaatgtatctccccgtctgctacatcctgctgctcatccaccccagcagaatgcagtcatggttgacatacatgatcagctccatcaaggaacagtccctgtttcttacacagtaacaacagtggcaccacatgggattccactctgcacaggccagcacatccctgcttgtagtacacagcaggtcccaggatgctctgtggttttcagtggacagcacctccctgtctgtagtgtgcctcctccaatgcttcaggcatgttcagttcagcacttaccagtaccatatgctgcattcccaccccttatttctagtgatccatttcttatacatcctcctcacctttctccccatcatcctcctcatttgccaccaccaggccagtttgtccctttccaaacacagcaatcacgatcgcctctgcaaaggatagaaaatgaagtggaactcttaggagaacatcttccagtaggaggttttacttaccctccatcagcccaccccccaacattacctccatcagctcccttgcagttcttaacacatgatcctttgcatcaggaggtgtcctttggagtaccttatcctccatttatgcctcggaggcttacaggacgtagtagataccgatcccagcagccaataccacctcccccttatcatcccagcttactgccatatgtgttatcaatgcttccagtgccacctgcagtgggcccaactttcagctttgaattagatgtagaagatggagaagtagaaaattacgaggccctgttaaacctggcagagcgactgggagaggcaaagcctcgtggactgactaaagcagatattgaacaacttccttcttatcggttcaatcctaacaaccaccagtcagaacagactttgtgtgtagtatgcatgtgtgattttgagtcaaggcagctacttagagtcttaccctgtaaccacgagttccatgccaagtgtgttgacaaatggcttaaggcaaatcgtacttgcccaatttgccgagctgatgcttcagaagtgcatcgggattcagaatgaccaacctaagaagcacaaatttagtttgggtgttcctcatcacatgtatatacggactatccattgaacttaatctgtgtggcttccagccctccctttaccaaaagggtcaatggacctttctttgcactgtgtgacttaatcaactataaaagcttacaattagtcttcacagttatgggattgttatactaaccgtgtgattggaactccaaagactttttctttagcttaattttgtgtgtgcactaacattccctggtttttgtgtgatcattccgagtgttgctgcaagattacagtggacgtgatcttttagcatgtgcttttataaaaagtggtagctacagatgatatagcaatctaccttatatagagccttcagaaactgtgagtggaaatgaatgcgcagcgtatgactgttggtgataagtgtatctgtgtgagtgtgtgcaactacttgtgtgagggcatggtagctaacgtgtgtatgagatcctatataccagcatgtaccaagaatgtgtgtgtagttttaattatgctgcaatgtataatctggtgtgttatttaaacagcactagtactgtacactggtttttttcccttgtgtttgctgttgcacactgattgctgagggtgcatcaattacaagcattgaatactccatccccttccctcccagtgaatggaatgagaaaagccttcttcctttgcttcaggcagctgtcaccttctctttattggtggtcctaagtgggtcacttaagaaaaaaaagtgtaacaaattctcgctccatgaacctggtttttttttattctgttgtggaaatttttaaatctccaacttgctgtttccaaaaagaaggtgcaatatcatatatcatcagttagcaatattagcatttcaatcagtgatttgaatgttgatacttttttttcctttacatttccagtaagtttcttacagaaagtacctgtgattttttttaatgtttagatttgtagtctagtctattctgaagatatttgattaatatatttctaagaagaccactagtcccatgaagtctcaccttgttgacttccaccagaacaaaacctgttaattcagcttgacttctcatatgtgttctgtgttcaagctcctgtgggcaactcaattgttttaagaaaactctatttctgttcatattaattcacttgccagactccaattctgaaagttgtctagttcttccttcatcacacgtgcttctcatcgaaaccctggtttcaggatggatcaagtgctgttacagctcatgttccttagacctgatttgttttgatattttactgcctttccttttaatttttgtttgaatgagaaaagtttaatacaacaggtgtccagaatacttgcagtataaatgaagatttggtttttgtataaaaaaataatgctgttaaacaggagttgaccttcatttagttgatgtaatacatagctgtatggggttttttttagtaagttctttgagcataattcactttaaagtcatttttccagcaatgtttaaattactttctcattcttttagtgtattcaacattgtctgcctcttcctgcagttgatgtaattgctttgtttgcaatagcacaagctgcattattccagtcaggactgtgataacttgctgccagccccactcaactttcagttggctctgtgtcagttttccattcagtgttaactacttgttactgccatgctgcttgccctcccttgaagtgtctataagctcatcacagcctagagttaagtaaagtcaattcacagaagcacaattttgccctttgcgagacattgttgcctctatctagtcctacaagtagggttttgcatactgtgtttgcccctagggttgtcagtgcatcagaaatacttctaaatagtggtaaaaatgcacatggttaatgcacatgttacttttaaatcattaggatatccctcacctgttcctgatgaataaaaagtgtgttaaagaccaaaattcttggcataataatcagctacatacaaatcacatatagtttaatcttttttaatgaaaaaaaatcatgtttaaaatggcaaaagcccatcttatacacttttatatagctgcaaaaaatttatatctgtacagatctaacactacgacactcagtattcattttattgaagcatgcaagtaaagcactttttctaatttatatagaggtatctaattaacacagcacattgtactaatgactaggagtagcagctttttcttctctccctctatgaattcttataatgtccctttttctgtaagtttttgagaggcaattggcaatttaggaggcagcagggtctgttttggtcaaatcttgaatttcgttgttgcactctagtgactgatctttgggaatgtcttgtctttgcatggggctcatagagatgtgtgcagacttgcttattgtggttagtgtgtatcaggaacacacacacaggtgttctgaccagctcaggcttgccacagtgagcaactctgtggctagcaaaagagaagtttatttgtgcccagccattggtcaccttgggtgatgcaccagatagcaggcagatgttggttcattggccttcgtcctctttcctcctaaaataatattggctttaccatcttaactcagctgtgggttttttgtgggttcttgtttgttttttggcatgaattgtcatctttggtgtttttttaacccccagcccctcaaaaaaataaggcctccaggtatcaagatctcatattaggattttctgtccttaattttttgagcaaaatctggaaaatgtgaaagcatatttagattttatatactatctgaaatgtgatttgttaagattcttaaatttgggcctcttagaataattttgaatgagatctaccgactcacttgtgagaatatttttcacagattatctttgggccttttcattagaaagctgtttgtttgtccccctgttggtacatttggttacctcattttgccgtttcagattgtgaaagctcacaggggtgttttttggaatcatttgctgagtcattttctcaaatcatattccattgtatcagttaacatatagttttaaatgtatgtattataaatatctgtaaccaaatcatttgaaggcttgataaatttttaacaaagtttgtacattttttatgaaagttactagtaatgctttactaagtagtgcaatgaatttttatttttaatccctgtgcccaattttggagttgagagggttgttggtaataaatgtatgatgtacacttaaaacatc

SEQ ID NO: 177483 - DNA, 4945 bp, Homo sapiens
  Payload ID: 14830
  Gene Symbol: RNF38
  Gene Name: ring finger protein 38
  Uniprot ID: Q9H0F5
  ENST ID: ENST00000353739
  CDS Start-End: 192-1589
cggaacccggtcgaaagggtcctctctggcgtccttctgcttccgtgggtttctggataggctgcgttttgttctcaggggatgcaagttcttcctttcagggttgaagcgtgagagaggttggtttttgaaacgggagtgtttcaggttattgaggtccaaaaagaaataaagtttttgtttacgtctgtatggcttgtaagagtgaagatagtccaagtcctaagagacagcgcctctctcattcagtctttgattatacatcagcatcaccagctccctcaccaccaatgcgaccatgggagatgacatcaaataggcagcccccttcagttcgaccaagccaacatcacttctcaggggaacgatgcaacacacctgcacgcaacagaagaagtcctcctgtcaggcgccagagaggaagaagggatcgtctgtctcgacataattccattagtcaagatgaaaactatcaccatctcccttacgcacagcagcaagcaatagaggagcctcgagccttccaccctccgaatgtatctccccgtctgctacatcctgctgctcatccaccccagcagaatgcagtcatggttgacatacatgatcagctccatcaaggaacagtccctgtttcttacacagtaacaacagtggcaccacatgggattccactctgcacaggccagcacatccctgcttgtagtacacagcaggtcccaggatgctctgtggttttcagtggacagcacctccctgtctgtagtgtgcctcctccaatgcttcaggcatgttcagttcagcacttaccagtaccatatgctgcattcccaccccttatttctagtgatccatttcttatacatcctcctcacctttctccccatcatcctcctcatttgccaccaccaggccagtttgtccctttccaaacacagcaatcacgatcgcctctgcaaaggatagaaaatgaagtggaactcttaggagaacatcttccagtaggaggttttacttaccctccatcagcccaccccccaacattacctccatcagctcccttgcagttcttaacacatgatcctttgcatcaggaggtgtcctttggagtaccttatcctccatttatgcctcggaggcttacaggacgtagtagataccgatcccagcagccaataccacctcccccttatcatcccagcttactgccatatgtgttatcaatgcttccagtgccacctgcagtgggcccaactttcagctttgaattagatgtagaagatggagaagtagaaaattacgaggccctgttaaacctggcagagcgactgggagaggcaaagcctcgtggactgactaaagcagatattgaacaacttccttcttatcggttcaatcctaacaaccaccagtcagaacagactttgtgtgtagtatgcatgtgtgattttgagtcaaggcagctacttagagtcttaccctgtaaccacgagttccatgccaagtgtgttgacaaatggcttaaggcaaatcgtacttgcccaatttgccgagctgatgcttcagaagtgcatcgggattcagaatgaccaacctaagaagcacaaatttagtttgggtgttcctcatcacatgtatatacggactatccattgaacttaatctgtgtggcttccagccctccctttaccaaaagggtcaatggacctttctttgcactgtgtgacttaatcaactataaaagcttacaattagtcttcacagttatgggattgttatactaaccgtgtgattggaactccaaagactttttctttagcttaattttgtgtgtgcactaacattccctggtttttgtgtgatcattccgagtgttgctgcaagattacagtggacgtgatcttttagcatgtgcttttataaaaagtggtagctacagatgatatagcaatctaccttatatagagccttcagaaactgtgagtggaaatgaatgcgcagcgtatgactgttggtgataagtgtatctgtgtgagtgtgtgcaactacttgtgtgagggcatggtagctaacgtgtgtatgagatcctatataccagcatgtaccaagaatgtgtgtgtagttttaattatgctgcaatgtataatctggtgtgttatttaaacagcactagtactgtacactggtttttttcccttgtgtttgctgttgcacactgattgctgagggtgcatcaattacaagcattgaatactccatccccttccctcccagtgaatggaatgagaaaagccttcttcctttgcttcaggcagctgtcaccttctctttattggtggtcctaagtgggtcacttaagaaaaaaaagtgtaacaaattctcgctccatgaacctggtttttttttattctgttgtggaaatttttaaatctccaacttgctgtttccaaaaagaaggtgcaatatcatatatcatcagttagcaatattagcatttcaatcagtgatttgaatgttgatacttttttttcctttacatttccagtaagtttcttacagaaagtacctgtgattttttttaatgtttagatttgtagtctagtctattctgaagatatttgattaatatatttctaagaagaccactagtcccatgaagtctcaccttgttgacttccaccagaacaaaacctgttaattcagcttgacttctcatatgtgttctgtgttcaagctcctgtgggcaactcaattgttttaagaaaactctatttctgttcatattaattcacttgccagactccaattctgaaagttgtctagttcttccttcatcacacgtgcttctcatcgaaaccctggtttcaggatggatcaagtgctgttacagctcatgttccttagacctgatttgttttgatattttactgcctttccttttaatttttgtttgaatgagaaaagtttaatacaacaggtgtccagaatacttgcagtataaatgaagatttggtttttgtataaaaaaataatgctgttaaacaggagttgaccttcatttagttgatgtaatacatagctgtatggggttttttttagtaagttctttgagcataattcactttaaagtcatttttccagcaatgtttaaattactttctcattcttttagtgtattcaacattgtctgcctcttcctgcagttgatgtaattgctttgtttgcaatagcacaagctgcattattccagtcaggactgtgataacttgctgccagccccactcaactttcagttggctctgtgtcagttttccattcagtgttaactacttgttactgccatgctgcttgccctcccttgaagtgtctataagctcatcacagcctagagttaagtaaagtcaattcacagaagcacaattttgccctttgcgagacattgttgcctctatctagtcctacaagtagggttttgcatactgtgtttgcccctagggttgtcagtgcatcagaaatacttctaaatagtggtaaaaatgcacatggttaatgcacatgttacttttaaatcattaggatatccctcacctgttcctgatgaataaaaagtgtgttaaagaccaaaattcttggcataataatcagctacatacaaatcacatatagtttaatcttttttaatgaaaaaaaatcatgtttaaaatggcaaaagcccatcttatacacttttatatagctgcaaaaaatttatatctgtacagatctaacactacgacactcagtattcattttattgaagcatgcaagtaaagcactttttctaatttatatagaggtatctaattaacacagcacattgtactaatgactaggagtagcagctttttcttctctccctctatgaattcttataatgtccctttttctgtaagtttttgagaggcaattggcaatttaggaggcagcagggtctgttttggtcaaatcttgaatttcgttgttgcactctagtgactgatctttgggaatgtcttgtctttgcatggggctcatagagatgtgtgcagacttgcttattgtggttagtgtgtatcaggaacacacacacaggtgttctgaccagctcaggcttgccacagtgagcaactctgtggctagcaaaagagaagtttatttgtgcccagccattggtcaccttgggtgatgcaccagatagcaggcagatgttggttcattggccttcgtcctctttcctcctaaaataatattggctttaccatcttaactcagctgtgggttttttgtgggttcttgtttgttttttggcatgaattgtcatctttggtgtttttttaacccccagcccctcaaaaaaataaggcctccaggtatcaagatctcatattaggattttctgtccttaattttttgagcaaaatctggaaaatgtgaaagcatatttagattttatatactatctgaaatgtgatttgttaagattcttaaatttgggcctcttagaataattttgaatgagatctaccgactcacttgtgagaatatttttcacagattatctttgggccttttcattagaaagctgtttgtttgtccccctgttggtacatttggttacctcattttgccgtttcagattgtgaaagctcacaggggtgttttttggaatcatttgctgagtcattttctcaaatcatattccattgtatcagttaacatatagttttaaatgtatgtattataaatatctgtaaccaaatcatttgaaggcttgataaatttttaacaaagtttgtacattttttatgaaagttactagtaatgctttactaagtagtgcaatgaatttttatttttaatccctgtgcccaattttggagttgagagggttgttggtaataaatgtatgatgtacacttaaaacatc

SEQ ID NO: 177484 - DNA, 5104 bp, Homo sapiens
  Payload ID: 14830
  Gene Symbol: RNF38
  Gene Name: ring finger protein 38
  Uniprot ID: Q9H0F5
  ENST ID: ENST00000350199
  CDS Start-End: 458-1756
gcggcggggcgcggcggggcggggaggggcgtggccgggccgggcccctagtgcggtgttgcgggacggggccgaggcccggtcggttggggcgtgggggcggagaggatggagcctccgaggcgttaggcgactctgtcatctctgggcgtgcagccgtcgtttcctggcgcggcccgtgtgatggtgccgggaggaaggaagcgcagtgacagtgcctaagttggagccggggttccgggggtgaggaggcccgcggacggcggatctggcgagctggccgcgggctgggcgagcagtcacaataggaggcggcggcccagcgaggatccgcgggagctgcccggcagggcggagcctcccctcgcagagtgaagatagtccaagtcctaagagacagcgcctctctcattcagtctttgattatacatcagcatcaccagctccctcaccaccaatgcgaccatgggagatgacatcaaataggcagcccccttcagttcgaccaagccaacatcacttctcaggggaacgatgcaacacacctgcacgcaacagaagaagtcctcctgtcaggcgccagagaggaagaagggatcgtctgtctcgacataattccattagtcaagatgaaaactatcaccatctcccttacgcacagcagcaagcaatagaggagcctcgagccttccaccctccgaatgtatctccccgtctgctacatcctgctgctcatccaccccagcagaatgcagtcatggttgacatacatgatcagctccatcaaggaacagtccctgtttcttacacagtaacaacagtggcaccacatgggattccactctgcacaggccagcacatccctgcttgtagtacacagcaggtcccaggatgctctgtggttttcagtggacagcacctccctgtctgtagtgtgcctcctccaatgcttcaggcatgttcagttcagcacttaccagtaccatatgctgcattcccaccccttatttctagtgatccatttcttatacatcctcctcacctttctccccatcatcctcctcatttgccaccaccaggccagtttgtccctttccaaacacagcaatcacgatcgcctctgcaaaggatagaaaatgaagtggaactcttaggagaacatcttccagtaggaggttttacttaccctccatcagcccaccccccaacattacctccatcagctcccttgcagttcttaacacatgatcctttgcatcaggaggtgtcctttggagtaccttatcctccatttatgcctcggaggcttacaggacgtagtagataccgatcccagcagccaataccacctcccccttatcatcccagcttactgccatatgtgttatcaatgcttccagtgccacctgcagtgggcccaactttcagctttgaattagatgtagaagatggagaagtagaaaattacgaggccctgttaaacctggcagagcgactgggagaggcaaagcctcgtggactgactaaagcagatattgaacaacttccttcttatcggttcaatcctaacaaccaccagtcagaacagactttgtgtgtagtatgcatgtgtgattttgagtcaaggcagctacttagagtcttaccctgtaaccacgagttccatgccaagtgtgttgacaaatggcttaaggcaaatcgtacttgcccaatttgccgagctgatgcttcagaagtgcatcgggattcagaatgaccaacctaagaagcacaaatttagtttgggtgttcctcatcacatgtatatacggactatccattgaacttaatctgtgtggcttccagccctccctttaccaaaagggtcaatggacctttctttgcactgtgtgacttaatcaactataaaagcttacaattagtcttcacagttatgggattgttatactaaccgtgtgattggaactccaaagactttttctttagcttaattttgtgtgtgcactaacattccctggtttttgtgtgatcattccgagtgttgctgcaagattacagtggacgtgatcttttagcatgtgcttttataaaaagtggtagctacagatgatatagcaatctaccttatatagagccttcagaaactgtgagtggaaatgaatgcgcagcgtatgactgttggtgataagtgtatctgtgtgagtgtgtgcaactacttgtgtgagggcatggtagctaacgtgtgtatgagatcctatataccagcatgtaccaagaatgtgtgtgtagttttaattatgctgcaatgtataatctggtgtgttatttaaacagcactagtactgtacactggtttttttcccttgtgtttgctgttgcacactgattgctgagggtgcatcaattacaagcattgaatactccatccccttccctcccagtgaatggaatgagaaaagccttcttcctttgcttcaggcagctgtcaccttctctttattggtggtcctaagtgggtcacttaagaaaaaaaagtgtaacaaattctcgctccatgaacctggtttttttttattctgttgtggaaatttttaaatctccaacttgctgtttccaaaaagaaggtgcaatatcatatatcatcagttagcaatattagcatttcaatcagtgatttgaatgttgatacttttttttcctttacatttccagtaagtttcttacagaaagtacctgtgattttttttaatgtttagatttgtagtctagtctattctgaagatatttgattaatatatttctaagaagaccactagtcccatgaagtctcaccttgttgacttccaccagaacaaaacctgttaattcagcttgacttctcatatgtgttctgtgttcaagctcctgtgggcaactcaattgttttaagaaaactctatttctgttcatattaattcacttgccagactccaattctgaaagttgtctagttcttccttcatcacacgtgcttctcatcgaaaccctggtttcaggatggatcaagtgctgttacagctcatgttccttagacctgatttgttttgatattttactgcctttccttttaatttttgtttgaatgagaaaagtttaatacaacaggtgtccagaatacttgcagtataaatgaagatttggtttttgtataaaaaaataatgctgttaaacaggagttgaccttcatttagttgatgtaatacatagctgtatggggttttttttagtaagttctttgagcataattcactttaaagtcatttttccagcaatgtttaaattactttctcattcttttagtgtattcaacattgtctgcctcttcctgcagttgatgtaattgctttgtttgcaatagcacaagctgcattattccagtcaggactgtgataacttgctgccagccccactcaactttcagttggctctgtgtcagttttccattcagtgttaactacttgttactgccatgctgcttgccctcccttgaagtgtctataagctcatcacagcctagagttaagtaaagtcaattcacagaagcacaattttgccctttgcgagacattgttgcctctatctagtcctacaagtagggttttgcatactgtgtttgcccctagggttgtcagtgcatcagaaatacttctaaatagtggtaaaaatgcacatggttaatgcacatgttacttttaaatcattaggatatccctcacctgttcctgatgaataaaaagtgtgttaaagaccaaaattcttggcataataatcagctacatacaaatcacatatagtttaatcttttttaatgaaaaaaaatcatgtttaaaatggcaaaagcccatcttatacacttttatatagctgcaaaaaatttatatctgtacagatctaacactacgacactcagtattcattttattgaagcatgcaagtaaagcactttttctaatttatatagaggtatctaattaacacagcacattgtactaatgactaggagtagcagctttttcttctctccctctatgaattcttataatgtccctttttctgtaagtttttgagaggcaattggcaatttaggaggcagcagggtctgttttggtcaaatcttgaatttcgttgttgcactctagtgactgatctttgggaatgtcttgtctttgcatggggctcatagagatgtgtgcagacttgcttattgtggttagtgtgtatcaggaacacacacacaggtgttctgaccagctcaggcttgccacagtgagcaactctgtggctagcaaaagagaagtttatttgtgcccagccattggtcaccttgggtgatgcaccagatagcaggcagatgttggttcattggccttcgtcctctttcctcctaaaataatattggctttaccatcttaactcagctgtgggttttttgtgggttcttgtttgttttttggcatgaattgtcatctttggtgtttttttaacccccagcccctcaaaaaaataaggcctccaggtatcaagatctcatattaggattttctgtccttaattttttgagcaaaatctggaaaatgtgaaagcatatttagattttatatactatctgaaatgtgatttgttaagattcttaaatttgggcctcttagaataattttgaatgagatctaccgactcacttgtgagaatatttttcacagattatctttgggccttttcattagaaagctgtttgtttgtccccctgttggtacatttggttacctcattttgccgtttcagattgtgaaagctcacaggggtgttttttggaatcatttgctgagtcattttctcaaatcatattccattgtatcagttaacatatagttttaaatgtatgtattataaatatctgtaaccaaatcatttgaaggcttgataaatttttaacaaagtttgtacattttttatgaaagttactagtaatgctttactaagtagtgcaatgaatttttatttttaatccctgtgcccaattttggagttgagagggttgttggtaataaatgtatgatgtacactt

SEQ ID NO: 177485 - DNA, 5254 bp, Homo sapiens
  Payload ID: 14830
  Gene Symbol: RNF38
  Gene Name: ring finger protein 38
  Uniprot ID: Q9H0F5
  ENST ID: ENST00000357058
  CDS Start-End: 608-1906
gcggcggggcgcggcggggcggggaggggcgtggccgggccgggcccctagtgcggtgttgcgggacggggccgaggcccggtcggttggggcgtgggggcggagaggatggagcctccgaggcgttaggcgactctgtcatctctgggcgtgcagccgtcgtttcctggcgcggcccgtgtgatggtgccgggaggaaggaagcgcagtgacagtgcctaagttggagccggggttccgggggtgaggaggcccgcggacggcggatctggcgagctggccgcgggctgggcgagcagtcacaataggaggcggcggcccagcgaggatccgcgggagctgcccggcagggcggagcctcccctcgcagatatctcccggggccaattcagcatctctacctggccatcctaacaaggtgatttgtgaaagggtgagacttcagagcctgttccctctcctcccaagtgatcagaacactaccgttcaagaggatgctcacttcaaagctttcttccagagtgaagatagtccaagtcctaagagacagcgcctctctcattcagtctttgattatacatcagcatcaccagctccctcaccaccaatgcgaccatgggagatgacatcaaataggcagcccccttcagttcgaccaagccaacatcacttctcaggggaacgatgcaacacacctgcacgcaacagaagaagtcctcctgtcaggcgccagagaggaagaagggatcgtctgtctcgacataattccattagtcaagatgaaaactatcaccatctcccttacgcacagcagcaagcaatagaggagcctcgagccttccaccctccgaatgtatctccccgtctgctacatcctgctgctcatccaccccagcagaatgcagtcatggttgacatacatgatcagctccatcaaggaacagtccctgtttcttacacagtaacaacagtggcaccacatgggattccactctgcacaggccagcacatccctgcttgtagtacacagcaggtcccaggatgctctgtggttttcagtggacagcacctccctgtctgtagtgtgcctcctccaatgcttcaggcatgttcagttcagcacttaccagtaccatatgctgcattcccaccccttatttctagtgatccatttcttatacatcctcctcacctttctccccatcatcctcctcatttgccaccaccaggccagtttgtccctttccaaacacagcaatcacgatcgcctctgcaaaggatagaaaatgaagtggaactcttaggagaacatcttccagtaggaggttttacttaccctccatcagcccaccccccaacattacctccatcagctcccttgcagttcttaacacatgatcctttgcatcaggaggtgtcctttggagtaccttatcctccatttatgcctcggaggcttacaggacgtagtagataccgatcccagcagccaataccacctcccccttatcatcccagcttactgccatatgtgttatcaatgcttccagtgccacctgcagtgggcccaactttcagctttgaattagatgtagaagatggagaagtagaaaattacgaggccctgttaaacctggcagagcgactgggagaggcaaagcctcgtggactgactaaagcagatattgaacaacttccttcttatcggttcaatcctaacaaccaccagtcagaacagactttgtgtgtagtatgcatgtgtgattttgagtcaaggcagctacttagagtcttaccctgtaaccacgagttccatgccaagtgtgttgacaaatggcttaaggcaaatcgtacttgcccaatttgccgagctgatgcttcagaagtgcatcgggattcagaatgaccaacctaagaagcacaaatttagtttgggtgttcctcatcacatgtatatacggactatccattgaacttaatctgtgtggcttccagccctccctttaccaaaagggtcaatggacctttctttgcactgtgtgacttaatcaactataaaagcttacaattagtcttcacagttatgggattgttatactaaccgtgtgattggaactccaaagactttttctttagcttaattttgtgtgtgcactaacattccctggtttttgtgtgatcattccgagtgttgctgcaagattacagtggacgtgatcttttagcatgtgcttttataaaaagtggtagctacagatgatatagcaatctaccttatatagagccttcagaaactgtgagtggaaatgaatgcgcagcgtatgactgttggtgataagtgtatctgtgtgagtgtgtgcaactacttgtgtgagggcatggtagctaacgtgtgtatgagatcctatataccagcatgtaccaagaatgtgtgtgtagttttaattatgctgcaatgtataatctggtgtgttatttaaacagcactagtactgtacactggtttttttcccttgtgtttgctgttgcacactgattgctgagggtgcatcaattacaagcattgaatactccatccccttccctcccagtgaatggaatgagaaaagccttcttcctttgcttcaggcagctgtcaccttctctttattggtggtcctaagtgggtcacttaagaaaaaaaagtgtaacaaattctcgctccatgaacctggtttttttttattctgttgtggaaatttttaaatctccaacttgctgtttccaaaaagaaggtgcaatatcatatatcatcagttagcaatattagcatttcaatcagtgatttgaatgttgatacttttttttcctttacatttccagtaagtttcttacagaaagtacctgtgattttttttaatgtttagatttgtagtctagtctattctgaagatatttgattaatatatttctaagaagaccactagtcccatgaagtctcaccttgttgacttccaccagaacaaaacctgttaattcagcttgacttctcatatgtgttctgtgttcaagctcctgtgggcaactcaattgttttaagaaaactctatttctgttcatattaattcacttgccagactccaattctgaaagttgtctagttcttccttcatcacacgtgcttctcatcgaaaccctggtttcaggatggatcaagtgctgttacagctcatgttccttagacctgatttgttttgatattttactgcctttccttttaatttttgtttgaatgagaaaagtttaatacaacaggtgtccagaatacttgcagtataaatgaagatttggtttttgtataaaaaaataatgctgttaaacaggagttgaccttcatttagttgatgtaatacatagctgtatggggttttttttagtaagttctttgagcataattcactttaaagtcatttttccagcaatgtttaaattactttctcattcttttagtgtattcaacattgtctgcctcttcctgcagttgatgtaattgctttgtttgcaatagcacaagctgcattattccagtcaggactgtgataacttgctgccagccccactcaactttcagttggctctgtgtcagttttccattcagtgttaactacttgttactgccatgctgcttgccctcccttgaagtgtctataagctcatcacagcctagagttaagtaaagtcaattcacagaagcacaattttgccctttgcgagacattgttgcctctatctagtcctacaagtagggttttgcatactgtgtttgcccctagggttgtcagtgcatcagaaatacttctaaatagtggtaaaaatgcacatggttaatgcacatgttacttttaaatcattaggatatccctcacctgttcctgatgaataaaaagtgtgttaaagaccaaaattcttggcataataatcagctacatacaaatcacatatagtttaatcttttttaatgaaaaaaaatcatgtttaaaatggcaaaagcccatcttatacacttttatatagctgcaaaaaatttatatctgtacagatctaacactacgacactcagtattcattttattgaagcatgcaagtaaagcactttttctaatttatatagaggtatctaattaacacagcacattgtactaatgactaggagtagcagctttttcttctctccctctatgaattcttataatgtccctttttctgtaagtttttgagaggcaattggcaatttaggaggcagcagggtctgttttggtcaaatcttgaatttcgttgttgcactctagtgactgatctttgggaatgtcttgtctttgcatggggctcatagagatgtgtgcagacttgcttattgtggttagtgtgtatcaggaacacacacacaggtgttctgaccagctcaggcttgccacagtgagcaactctgtggctagcaaaagagaagtttatttgtgcccagccattggtcaccttgggtgatgcaccagatagcaggcagatgttggttcattggccttcgtcctctttcctcctaaaataatattggctttaccatcttaactcagctgtgggttttttgtgggttcttgtttgttttttggcatgaattgtcatctttggtgtttttttaacccccagcccctcaaaaaaataaggcctccaggtatcaagatctcatattaggattttctgtccttaattttttgagcaaaatctggaaaatgtgaaagcatatttagattttatatactatctgaaatgtgatttgttaagattcttaaatttgggcctcttagaataattttgaatgagatctaccgactcacttgtgagaatatttttcacagattatctttgggccttttcattagaaagctgtttgtttgtccccctgttggtacatttggttacctcattttgccgtttcagattgtgaaagctcacaggggtgttttttggaatcatttgctgagtcattttctcaaatcatattccattgtatcagttaacatatagttttaaatgtatgtattataaatatctgtaaccaaatcatttgaaggcttgataaatttttaacaaagtttgtacattttttatgaaagttactagtaatgctttactaagtagtgcaatgaatttttatttttaatccctgtgcccaattttggagttgagagggttgttggtaataaatgtatgatgtacactt

SEQ ID NO: 177486 - DNA, 1974 bp, Homo sapiens
  Payload ID: 14830
  Gene Symbol: RNF38
  Gene Name: ring finger protein 38
  Uniprot ID: Q9H0F5
  ENST ID: ENST00000377877
  CDS Start-End: 484-1803
tgcggtgttgcgggacggggccgaggcccggtcggttggggcgtgggggcggagaggatggagcctccgaggcgttaggcgactctgtcatctctgggcgtgcagccgtcgtttcctggcgcggcccgtgtgatggtgccgggaggaaggaagcgcagtgacagtgcctaagttggagccggggttccgggggtgaggaggcccgcggacggcggatctggcgagctggccgcgggctgggcgagcagtcacaataggaggcggcggcccagcgaggatccgcgggagctgcccggcagggcggagcctcccctcgcagagtgaagatagtccaagtcctaagagacagcgcctctctcattcagtctttgattatacatcagcatcaccagctccctcaccaccaatgcgaccatgggagatgacatcaaataggcagcccccttcagttcgaccaagccaacatcacttctcaggggaacgatgcaacacacctgcacgcaacagaagaaggttacctataagcatattgccagattttctcccagaaacaggctgtgccaagcagatgcagtttttaacaataatctagcaggatttcagttacagagtcctcctgtcaggcgccagagaggaagaagggatcgtctgtctcgacataattccattagtcaagatgaaaactatcaccatctcccttacgcacagcagcaagcaatagaggagcctcgagccttccaccctccgaatgtatctccccgtctgctacatcctgctgctcatccaccccagcagaatgcagtcatggttgacatacatgatcagctccatcaaggaacagtccctgtttcttacacagtaacaacagtggcaccacatgggattccactctgcacaggccagcacatccctgcttgtagtacacagcaggtcccaggatgctctgtggttttcagtggacagcacctccctgtctgtagtgtgcctcctccaatgcttcaggcatgttcagttcagcacttaccagtaccatatgctgcattcccaccccttatttctagtgatccatttcttatacatcctcctcacctttctccccatcatcctcctcatttgccaccaccaggccagtttgtccctttccaaacacagcaatcacgatcgcctctgcaaaggatagaaaatgaagtggaactcttaggagaacatcttccagtaggaggttttacttaccctccatcagcccaccccccaacattacctccatcagctcccttgcagttcttaacacatgatcctttgcatcaggaggtgtcctttggagtaccttatcctccatttatgcctcggaggcttacaggacgtagtagataccgatcccagcagccaataccacctcccccttatcatcccagcttactgccatatgtgttatcaatgcttccagtgccacctgcagtgggcccaactttcagctttgaattagatgtagaagatggagaagtagaaaattacgaggccctgttaaacctggcagagcgactgggagaggcaaagcctcgtggactgactaaagcagatattgaacaacttccttcttatcggttcaatcctaacaaccaccagtcagaacagactttgtgtgtagtatgcatgtgtgattttgagtcaaggcagctacttagagtcttaccctgtaaccacgagttccatgccaagtgtgttgacaaatggcttaaggcaaatcgtacttgcccaatttgccgagctgatgcttcagaagtgcatcgggattcagaatgaccaacctaagaagcacaaatttagtttgggtgttcctcatcacatgtatatacggactatccattgaacttaatctgtgtggcttccagccctccctttaccaaaagggtcaatggacctttctttgcactgtgtgacttaatcaactataaaagcttacaattagtcttc

SEQ ID NO: 177487 - DNA, 4985 bp, Homo sapiens
  Payload ID: 14830
  Gene Symbol: RNF38
  Gene Name: ring finger protein 38
  Uniprot ID: Q9H0F5
  ENST ID: ENST00000377885
  CDS Start-End: 339-1637
cttccccctcggggtggaaacaaagggggttcggcgcgcggtgcggagcctgggggaaaagggaggagcgctccggtggtctggcgcgctgggctcgctagatatctcccggggccaattcagcatctctacctggccatcctaacaaggtgatttgtgaaagggtgagacttcagagcctgttccctctcctcccaagtgatcagaacactaccgttcaagaggatgctcacttcaaagctttcttccagagtgaagatagtccaagtcctaagagacagcgcctctctcattcagtctttgattatacatcagcatcaccagctccctcaccaccaatgcgaccatgggagatgacatcaaataggcagcccccttcagttcgaccaagccaacatcacttctcaggggaacgatgcaacacacctgcacgcaacagaagaagtcctcctgtcaggcgccagagaggaagaagggatcgtctgtctcgacataattccattagtcaagatgaaaactatcaccatctcccttacgcacagcagcaagcaatagaggagcctcgagccttccaccctccgaatgtatctccccgtctgctacatcctgctgctcatccaccccagcagaatgcagtcatggttgacatacatgatcagctccatcaaggaacagtccctgtttcttacacagtaacaacagtggcaccacatgggattccactctgcacaggccagcacatccctgcttgtagtacacagcaggtcccaggatgctctgtggttttcagtggacagcacctccctgtctgtagtgtgcctcctccaatgcttcaggcatgttcagttcagcacttaccagtaccatatgctgcattcccaccccttatttctagtgatccatttcttatacatcctcctcacctttctccccatcatcctcctcatttgccaccaccaggccagtttgtccctttccaaacacagcaatcacgatcgcctctgcaaaggatagaaaatgaagtggaactcttaggagaacatcttccagtaggaggttttacttaccctccatcagcccaccccccaacattacctccatcagctcccttgcagttcttaacacatgatcctttgcatcaggaggtgtcctttggagtaccttatcctccatttatgcctcggaggcttacaggacgtagtagataccgatcccagcagccaataccacctcccccttatcatcccagcttactgccatatgtgttatcaatgcttccagtgccacctgcagtgggcccaactttcagctttgaattagatgtagaagatggagaagtagaaaattacgaggccctgttaaacctggcagagcgactgggagaggcaaagcctcgtggactgactaaagcagatattgaacaacttccttcttatcggttcaatcctaacaaccaccagtcagaacagactttgtgtgtagtatgcatgtgtgattttgagtcaaggcagctacttagagtcttaccctgtaaccacgagttccatgccaagtgtgttgacaaatggcttaaggcaaatcgtacttgcccaatttgccgagctgatgcttcagaagtgcatcgggattcagaatgaccaacctaagaagcacaaatttagtttgggtgttcctcatcacatgtatatacggactatccattgaacttaatctgtgtggcttccagccctccctttaccaaaagggtcaatggacctttctttgcactgtgtgacttaatcaactataaaagcttacaattagtcttcacagttatgggattgttatactaaccgtgtgattggaactccaaagactttttctttagcttaattttgtgtgtgcactaacattccctggtttttgtgtgatcattccgagtgttgctgcaagattacagtggacgtgatcttttagcatgtgcttttataaaaagtggtagctacagatgatatagcaatctaccttatatagagccttcagaaactgtgagtggaaatgaatgcgcagcgtatgactgttggtgataagtgtatctgtgtgagtgtgtgcaactacttgtgtgagggcatggtagctaacgtgtgtatgagatcctatataccagcatgtaccaagaatgtgtgtgtagttttaattatgctgcaatgtataatctggtgtgttatttaaacagcactagtactgtacactggtttttttcccttgtgtttgctgttgcacactgattgctgagggtgcatcaattacaagcattgaatactccatccccttccctcccagtgaatggaatgagaaaagccttcttcctttgcttcaggcagctgtcaccttctctttattggtggtcctaagtgggtcacttaagaaaaaaaagtgtaacaaattctcgctccatgaacctggtttttttttattctgttgtggaaatttttaaatctccaacttgctgtttccaaaaagaaggtgcaatatcatatatcatcagttagcaatattagcatttcaatcagtgatttgaatgttgatacttttttttcctttacatttccagtaagtttcttacagaaagtacctgtgattttttttaatgtttagatttgtagtctagtctattctgaagatatttgattaatatatttctaagaagaccactagtcccatgaagtctcaccttgttgacttccaccagaacaaaacctgttaattcagcttgacttctcatatgtgttctgtgttcaagctcctgtgggcaactcaattgttttaagaaaactctatttctgttcatattaattcacttgccagactccaattctgaaagttgtctagttcttccttcatcacacgtgcttctcatcgaaaccctggtttcaggatggatcaagtgctgttacagctcatgttccttagacctgatttgttttgatattttactgcctttccttttaatttttgtttgaatgagaaaagtttaatacaacaggtgtccagaatacttgcagtataaatgaagatttggtttttgtataaaaaaataatgctgttaaacaggagttgaccttcatttagttgatgtaatacatagctgtatggggttttttttagtaagttctttgagcataattcactttaaagtcatttttccagcaatgtttaaattactttctcattcttttagtgtattcaacattgtctgcctcttcctgcagttgatgtaattgctttgtttgcaatagcacaagctgcattattccagtcaggactgtgataacttgctgccagccccactcaactttcagttggctctgtgtcagttttccattcagtgttaactacttgttactgccatgctgcttgccctcccttgaagtgtctataagctcatcacagcctagagttaagtaaagtcaattcacagaagcacaattttgccctttgcgagacattgttgcctctatctagtcctacaagtagggttttgcatactgtgtttgcccctagggttgtcagtgcatcagaaatacttctaaatagtggtaaaaatgcacatggttaatgcacatgttacttttaaatcattaggatatccctcacctgttcctgatgaataaaaagtgtgttaaagaccaaaattcttggcataataatcagctacatacaaatcacatatagtttaatcttttttaatgaaaaaaaatcatgtttaaaatggcaaaagcccatcttatacacttttatatagctgcaaaaaatttatatctgtacagatctaacactacgacactcagtattcattttattgaagcatgcaagtaaagcactttttctaatttatatagaggtatctaattaacacagcacattgtactaatgactaggagtagcagctttttcttctctccctctatgaattcttataatgtccctttttctgtaagtttttgagaggcaattggcaatttaggaggcagcagggtctgttttggtcaaatcttgaatttcgttgttgcactctagtgactgatctttgggaatgtcttgtctttgcatggggctcatagagatgtgtgcagacttgcttattgtggttagtgtgtatcaggaacacacacacaggtgttctgaccagctcaggcttgccacagtgagcaactctgtggctagcaaaagagaagtttatttgtgcccagccattggtcaccttgggtgatgcaccagatagcaggcagatgttggttcattggccttcgtcctctttcctcctaaaataatattggctttaccatcttaactcagctgtgggttttttgtgggttcttgtttgttttttggcatgaattgtcatctttggtgtttttttaacccccagcccctcaaaaaaataaggcctccaggtatcaagatctcatattaggattttctgtccttaattttttgagcaaaatctggaaaatgtgaaagcatatttagattttatatactatctgaaatgtgatttgttaagattcttaaatttgggcctcttagaataattttgaatgagatctaccgactcacttgtgagaatatttttcacagattatctttgggccttttcattagaaagctgtttgtttgtccccctgttggtacatttggttacctcattttgccgtttcagattgtgaaagctcacaggggtgttttttggaatcatttgctgagtcattttctcaaatcatattccattgtatcagttaacatatagttttaaatgtatgtattataaatatctgtaaccaaatcatttgaaggcttgataaatttttaacaaagtttgtacattttttatgaaagttactagtaatgctttactaagtagtgcaatgaatttttatttttaatccctgtgcccaattttggagttgagagggttgttggtaataaatgtatgatgtacactt

SEQ ID NO: 177488 - DNA, 5185 bp, Homo sapiens
  Payload ID: 14830
  Gene Symbol: RNF38
  Gene Name: ring finger protein 38
  Uniprot ID: Q9H0F5
  ENST ID: ENST00000611646
  CDS Start-End: 518-1837
cggaacccggtcgaaagggtcctctctggcgtccttctgcttccgtgggtttctggataggctgcgttttgttctcaggggatgcaagttcttcctttcagggttgaagcgtgagagaggttggtttttgaaacgggagtgtttcaggttattgaggtccaaaaagaaataaagtttttgtttacgtctgtatggcttgtaagatatctcccggggccaattcagcatctctacctggccatcctaacaaggtgatttgtgaaagggtgagacttcagagcctgttccctctcctcccaagtgatcagaacactaccgttcaagaggatgctcacttcaaagctttcttccagagtgaagatagtccaagtcctaagagacagcgcctctctcattcagtctttgattatacatcagcatcaccagctccctcaccaccaatgcgaccatgggagatgacatcaaataggcagcccccttcagttcgaccaagccaacatcacttctcaggggaacgatgcaacacacctgcacgcaacagaagaaggttacctataagcatattgccagattttctcccagaaacaggctgtgccaagcagatgcagtttttaacaataatctagcaggatttcagttacagagtcctcctgtcaggcgccagagaggaagaagggatcgtctgtctcgacataattccattagtcaagatgaaaactatcaccatctcccttacgcacagcagcaagcaatagaggagcctcgagccttccaccctccgaatgtatctccccgtctgctacatcctgctgctcatccaccccagcagaatgcagtcatggttgacatacatgatcagctccatcaaggaacagtccctgtttcttacacagtaacaacagtggcaccacatgggattccactctgcacaggccagcacatccctgcttgtagtacacagcaggtcccaggatgctctgtggttttcagtggacagcacctccctgtctgtagtgtgcctcctccaatgcttcaggcatgttcagttcagcacttaccagtaccatatgctgcattcccaccccttatttctagtgatccatttcttatacatcctcctcacctttctccccatcatcctcctcatttgccaccaccaggccagtttgtccctttccaaacacagcaatcacgatcgcctctgcaaaggatagaaaatgaagtggaactcttaggagaacatcttccagtaggaggttttacttaccctccatcagcccaccccccaacattacctccatcagctcccttgcagttcttaacacatgatcctttgcatcaggaggtgtcctttggagtaccttatcctccatttatgcctcggaggcttacaggacgtagtagataccgatcccagcagccaataccacctcccccttatcatcccagcttactgccatatgtgttatcaatgcttccagtgccacctgcagtgggcccaactttcagctttgaattagatgtagaagatggagaagtagaaaattacgaggccctgttaaacctggcagagcgactgggagaggcaaagcctcgtggactgactaaagcagatattgaacaacttccttcttatcggttcaatcctaacaaccaccagtcagaacagactttgtgtgtagtatgcatgtgtgattttgagtcaaggcagctacttagagtcttaccctgtaaccacgagttccatgccaagtgtgttgacaaatggcttaaggcaaatcgtacttgcccaatttgccgagctgatgcttcagaagtgcatcgggattcagaatgaccaacctaagaagcacaaatttagtttgggtgttcctcatcacatgtatatacggactatccattgaacttaatctgtgtggcttccagccctccctttaccaaaagggtcaatggacctttctttgcactgtgtgacttaatcaactataaaagcttacaattagtcttcacagttatgggattgttatactaaccgtgtgattggaactccaaagactttttctttagcttaattttgtgtgtgcactaacattccctggtttttgtgtgatcattccgagtgttgctgcaagattacagtggacgtgatcttttagcatgtgcttttataaaaagtggtagctacagatgatatagcaatctaccttatatagagccttcagaaactgtgagtggaaatgaatgcgcagcgtatgactgttggtgataagtgtatctgtgtgagtgtgtgcaactacttgtgtgagggcatggtagctaacgtgtgtatgagatcctatataccagcatgtaccaagaatgtgtgtgtagttttaattatgctgcaatgtataatctggtgtgttatttaaacagcactagtactgtacactggtttttttcccttgtgtttgctgttgcacactgattgctgagggtgcatcaattacaagcattgaatactccatccccttccctcccagtgaatggaatgagaaaagccttcttcctttgcttcaggcagctgtcaccttctctttattggtggtcctaagtgggtcacttaagaaaaaaaagtgtaacaaattctcgctccatgaacctggtttttttttattctgttgtggaaatttttaaatctccaacttgctgtttccaaaaagaaggtgcaatatcatatatcatcagttagcaatattagcatttcaatcagtgatttgaatgttgatacttttttttcctttacatttccagtaagtttcttacagaaagtacctgtgattttttttaatgtttagatttgtagtctagtctattctgaagatatttgattaatatatttctaagaagaccactagtcccatgaagtctcaccttgttgacttccaccagaacaaaacctgttaattcagcttgacttctcatatgtgttctgtgttcaagctcctgtgggcaactcaattgttttaagaaaactctatttctgttcatattaattcacttgccagactccaattctgaaagttgtctagttcttccttcatcacacgtgcttctcatcgaaaccctggtttcaggatggatcaagtgctgttacagctcatgttccttagacctgatttgttttgatattttactgcctttccttttaatttttgtttgaatgagaaaagtttaatacaacaggtgtccagaatacttgcagtataaatgaagatttggtttttgtataaaaaaataatgctgttaaacaggagttgaccttcatttagttgatgtaatacatagctgtatggggttttttttagtaagttctttgagcataattcactttaaagtcatttttccagcaatgtttaaattactttctcattcttttagtgtattcaacattgtctgcctcttcctgcagttgatgtaattgctttgtttgcaatagcacaagctgcattattccagtcaggactgtgataacttgctgccagccccactcaactttcagttggctctgtgtcagttttccattcagtgttaactacttgttactgccatgctgcttgccctcccttgaagtgtctataagctcatcacagcctagagttaagtaaagtcaattcacagaagcacaattttgccctttgcgagacattgttgcctctatctagtcctacaagtagggttttgcatactgtgtttgcccctagggttgtcagtgcatcagaaatacttctaaatagtggtaaaaatgcacatggttaatgcacatgttacttttaaatcattaggatatccctcacctgttcctgatgaataaaaagtgtgttaaagaccaaaattcttggcataataatcagctacatacaaatcacatatagtttaatcttttttaatgaaaaaaaatcatgtttaaaatggcaaaagcccatcttatacacttttatatagctgcaaaaaatttatatctgtacagatctaacactacgacactcagtattcattttattgaagcatgcaagtaaagcactttttctaatttatatagaggtatctaattaacacagcacattgtactaatgactaggagtagcagctttttcttctctccctctatgaattcttataatgtccctttttctgtaagtttttgagaggcaattggcaatttaggaggcagcagggtctgttttggtcaaatcttgaatttcgttgttgcactctagtgactgatctttgggaatgtcttgtctttgcatggggctcatagagatgtgtgcagacttgcttattgtggttagtgtgtatcaggaacacacacacaggtgttctgaccagctcaggcttgccacagtgagcaactctgtggctagcaaaagagaagtttatttgtgcccagccattggtcaccttgggtgatgcaccagatagcaggcagatgttggttcattggccttcgtcctctttcctcctaaaataatattggctttaccatcttaactcagctgtgggttttttgtgggttcttgtttgttttttggcatgaattgtcatctttggtgtttttttaacccccagcccctcaaaaaaataaggcctccaggtatcaagatctcatattaggattttctgtccttaattttttgagcaaaatctggaaaatgtgaaagcatatttagattttatatactatctgaaatgtgatttgttaagattcttaaatttgggcctcttagaataattttgaatgagatctaccgactcacttgtgagaatatttttcacagattatctttgggccttttcattagaaagctgtttgtttgtccccctgttggtacatttggttacctcattttgccgtttcagattgtgaaagctcacaggggtgttttttggaatcatttgctgagtcattttctcaaatcatattccattgtatcagttaacatatagttttaaatgtatgtattataaatatctgtaaccaaatcatttgaaggcttgataaatttttaacaaagtttgtacattttttatgaaagttactagtaatgctttactaagtagtgcaatgaatttttatttttaatccctgtgcccaattttggagttgagagggttgttggtaataaatgtatgatgtacactt

SEQ ID NO: 177489 - DNA, 2206 bp, Homo sapiens
  Payload ID: 14831
  Gene Symbol: RNF39
  Gene Name: ring finger protein 39
  Uniprot ID: Q9H2S5
  ENST ID: ENST00000244360
  CDS Start-End: 99-1361
cccaaaccttacccgggaagcaggagaaccagatgaggcgttacgcaaggcctggtgtttacctcccgtgggagcctcctccctccctataaagcctgatgtggtggagagatttgacgagactgagactctggttgaagagagaggcaatcccaggagaggggcggaaagcggcaaaagttaatgcgggagtcggagagaagggcatctacacagcaagcagcaggggcggcccgccatctgcgcgctcgaaggcggtcacggtggtcgcggaaggggcggcgtccagatcctggctttccatggatgcgcccgagctgggcccggggctggtggagcgtctggagcagctggcgacgtgtcctctgtgcgggggctccttcgaggacccggtgcttctggcgtgcgagcacagcttctgccgcgcgtgtctggcccgccgctgggggactccgccggcgaccggcaccgaggcttcccccaccgcctgtccctgctgcggcctgccgtgtccccgccgcagcctgaggtctaatgtgcggctggcggtggaggtgcgaatcagccgcgagctgcgagagaagctggctgagcctggggcccgtgcggggagacgccgaggggggcgcatccccaccatgggctgcctggacctgcccggagaggatatgaggaagacatggagacgatttgaagtcccaacatccaagtcatctaattcagaggatgatctccctgaagattatccagtggtcaaaaaaatgcttcatagactgacagccgacctgaccctggaccctgggaccgcacaccgccgcctgctcatctccgccgaccgccgcagcgtacaactggccccaccagggacgcccgcgccccctgacggccccaagcgcttcgatcagctcccagctgtgctgggtgcgcagggcttcggggccggccgccactgctgggaggtggagactgcggacgccgcctcctgcagagactcttctggggaggatgcggacgacgaggagagccactatgcagtgggcgcggccggggaatcagtgcaacgcaagggctgcgtaaggctgtgccctgcgggggccgtgtgggccgtggagggccgcggcggccgcctgtgggccctcacggcacccgaacccaccctgctgggcggtgttgagcccccgccgcggcgcattcgcgtggacctggactgggagcggggccgcgtggccttctacgacggccgctcactcgacctgctttacgccttccaggcgcctggccccctgggggagcgcatcttcccgctgttctgcacctgcgaccctcgtgctccgctccgcattgtaccagcggaaagctgagtctcgtctccaactagaagtttggcccggccactggccctgcagctgctttttgggggtggaattccccactcatttctgggaacacattcacacgcccattgcaggagtattaatagcaacccacattttcgccccaaaataatgagacctcacctggtctccacgtttccacgtccctgctcaaaaccaaatccattcctgccttctggctctcagaatcttctctcccctacagctactacagtacttcctgacttctcccattcaaaccattctaggcctgcaatggggaacaggccctccccatcagtattggtaaagtgaccatgattcctacatagaggctctgctggtcaaatacttgactcccactcttgccactcctagctccagaagggctcagggccttccccacagatctaaggactgggctaccctgcctgtccactgaggtttctcctaaaacaagaggcttgactctggtctgggccctgtggccctctgggaagctttgtacctcttttgcaggatctgggggtggggagggacaagctagttccccaacctcctatgactgctttctatgctcacagccttttttccataagaaccttcttgaaacttctccccgcacatactcacggaaaggaaccaatggtgctatttcccctctctcctcctcaacctgggaatacttcagacatctccaaactcatccttgtgtatagtctcacacccttccccataagtataaatgggcccatatttaacacattttgtgattttgggttatttattttgtgcatctgtggcaataaatgagatctcagtggtggtatgga

SEQ ID NO: 177490 - DNA, 1961 bp, Homo sapiens
  Payload ID: 14831
  Gene Symbol: RNF39
  Gene Name: ring finger protein 39
  Uniprot ID: Q9H2S5
  ENST ID: ENST00000376750
  CDS Start-End: 61-1125
cgttacgcaaggcctggtgtttacctcccgtgggagcctcctccctccctataaagcctgatgtggtggagagatttgacgagactgagactctggttgaagagagaggcaatcccaggagaggggcggaaagcggcaaaagttaatgcgggagtcggagagaagggcatctacacagcaagcagcaggggcggcccgccatctgcgcgctcgaaggcggtcacggtggtcgcggaaggggcggcgtccagatcctggctttccatggatgcgcccgagctgggcccggggctggtggagcgtctggagcagctggcgacgtgtcctctgtgcgggggctccttcgaggacccggtgcttctggcgtgcgagcacagcttctgccgcgcgtgtctggcccgccgctgggggactccgccggcgaccggcaccgaggcttcccccaccgcctgtccgtgctgcggcctgccgtgtccccgccgcagcctgaggtctaatgtgcggctggcggtggaggtgcgaatcagccgcgagctgcgagagaagctggctgagcctggggcccgtgcggggagacgccgaggggggcgcatccccaccatgggctgcctggacctgcccggagaggatatgaggaagacatggagacgatttgaagtcccaacacccaagtcatctaattcagaggatgatctccctgaagattatccagtggtcaaaaaaatgcttcatagactgacagccgacctgaccctggaccctgggaccgcacaccgccgcctgctcatctccaccgaccgccgcagcgtacaactggccccaccagggacgcccgcgccccctgacggccccaagcgcttcgatcagctcccagctgtgctgggtgcgcagggcttcggggccggccgccactgctgggaggtggagactgcggacgccgcctcctgcagagactcttctggggaggatgaggacgacgaggagagccactatgcagtgggcgcggccggggaatcagtgcaacgcaagggctgcgcgcctggccccctgggggagcgcatcttcccgctgttctgcacctgcgaccctcgtgctccgctccgcattgtaccagcggaaagctgagtctcgtctccaactagaagtttggcccggccactggccctgcagctgctttttgggcgtggaattccccactcatttctgggaacacattcacacgcccattgcaggagtattaatagcaacccacattttcgccccaaaataatgagacctcacctggtctccacgtttccacatccctgctcaaaaccaaatccattcctgccttctggctctcagaatcttctctcccctacagctactacagtacttcctgacttctcccattcaaaccattctaggcctgcaatggggaacaggccctccccatcagtattggtaaagtgaccatgattcctacatagaggctctgctggtcaaatacttgactcccactcttgccactcctagctccagaagggctcagggccttccccacagatctaaggactgggctaccctgcctgtccactgaggtttctcctaaaacaagaggcttgactctggtctgggccctgtggccctctgggaagctttgtactcttttgcaggatctgggggtggggagggacaagctagttccccaacctcctatgactgctttctatgctcacagccttttttccataagaaccttcttgaaacttctccccgcacatacggaaaggaaccaatggtgctatttcccctctctcctcctcaacctgggaatacttcagacatctccaaactcatccttgtgtatagtctcacacccttccccataagtataaatgggcccatatttaacacattttgtgattttgggttatttattttgtgcatctgtggcaataaatgagatctcagtggtggta

SEQ ID NO: 177491 - DNA, 1970 bp, Homo sapiens
  Payload ID: 14831
  Gene Symbol: RNF39
  Gene Name: ring finger protein 39
  Uniprot ID: Q9H2S5
  ENST ID: ENST00000376751
  CDS Start-End: 61-1125
cgttacgcaaggcctggtgtttacctcccgtgggagcctcctccctccctataaagcctgatgtggtggagagatttgacgagactgagactctggttgaagagagaggcaatcccaggagaggggcggaaagcggcaaaagttaatgcgggagtcggagagaagggcatctacacagcaagcagcaggggcggcccgccatctgcgcgctcgaaggcggtcacggtggtcgcggaaggggcggcgtccagatcctggctttccatggatgcgcccgagctgggcccggggctggtggagcgtctggagcagctggcgacgtgtcctctgtgcgggggctccttcgaggacccggtgcttctggcgtgcgagcacagcttctgccgcgcgtgtctggcccgccgctgggggactccgccggcgaccggcaccgaggcttcccccaccgcctgtccctgctgcggcctgccgtgtccccgccgcagcctgaggtctaatgtgcggctggcggtggaggtgcgaatcagccgcgagctgcgagagaagctggctgagcctggggcccgtgcggggagacgccgaggggggcgcatccccaccatgggctgcctggacctgcccggagaggatatgaggaagacatggagacgatttgaagtcccaacatccaagtcatctaattcagaggatgatctccctgaagattatccagtggtcaaaaaaatgcttcatagactgacagccgacctgaccctggaccctgggaccgcacaccgccgcctgctcatctccgccgaccgccgcagcgtacaactggccccaccagggacgcccgcgccccctgacggccccaagcgcttcgatcagctcccagctgtgctgggtgcgcagggcttcggggccggccgccactgctgggaggtggagactgcggacgccgcctcctgcagagactcttctggggaggatgcggacgacgaggagagccactatgcagtgggcgcggccggggaatcagtgcaacgcaagggctgcgcgcctggccccctgggggagcgcatcttcccgctgttctgcacctgcgaccctcgtgctccgctccgcattgtaccagcggaaagctgagtctcgtctccaactagaagtttggcccggccactggccctgcagctgctttttgggggtggaattccccactcatttctgggaacacattcacacgcccattgcaggagtattaatagcaacccacattttcgccccaaaataatgagacctcacctggtctccacgtttccacgtccctgctcaaaaccaaatccattcctgccttctggctctcagaatcttctctcccctacagctactacagtacttcctgacttctcccattcaaaccattctaggcctgcaatggggaacaggccctccccatcagtattggtaaagtgaccatgattcctacatagaggctctgctggtcaaatacttgactcccactcttgccactcctagctccagaagggctcagggccttccccacagatctaaggactgggctaccctgcctgtccactgaggtttctcctaaaacaagaggcttgactctggtctgggccctgtggccctctgggaagctttgtacctcttttgcaggatctgggggtggggagggacaagctagttccccaacctcctatgactgctttctatgctcacagccttttttccataagaaccttcttgaaacttctccccgcacatactcacggaaaggaaccaatggtgctatttcccctctctcctcctcaacctgggaatacttcagacatctccaaactcatccttgtgtatagtctcacacccttccccataagtataaatgggcccatatttaacacattttgtgattttgggttatttattttgtgcatctgtggcaataaatgagatctcagtggtggtatgga

SEQ ID NO: 177492 - DNA, 2161 bp, Homo sapiens
  Payload ID: 14831
  Gene Symbol: RNF39
  Gene Name: ring finger protein 39
  ENST ID: ENST00000383611
  CDS Start-End: 63-1325
ggcgttacgcaaggcctggtgtttacctcccgtgggagcctcctccctccctataaagcctgatgtggtggagagatttgacgagactgagactctggttgaagagagaggcaatcccaggagaggggcggaaagcggcaaaagttaatgcgggagtcggagagaagggcatctacacagcaagcagcaggggcggcccgccatctgcgcgctcgaaggcggtcacggtggtcgcggaaggggcggcgtccagatcctggctttccatggatgcgcccgagctgggcccggggctggtggagcgtctggagcagctggcgacgtgtcctctgtgcgggggctccttcgaggacccggtgcttctggcgtgcgagcacagcttctgccgcgcgtgtctggcccgccgctgggggactccgccggcgaccggcaccgaggcttcccccaccgcctgtccgtgctgcggcctgccgtgtccccgccgcagcctgaggtctaatgtgcggctggcggtggaggtgcgaatcagccgcgagctgcgagagaagctggctgagcctggggcccgtgcggggagacgccgaggggggcgcatccccaccatgggctgcctggacctgcccggagaggatatgaggaagacatggagacgatttgaagtcccaacacccaagtcatctaattcagaggatgatctccctgaagattatccagtggtcaaaaaaatgcttcatagactgacagccgacctgaccctggaccctgggaccgcacaccgccgcctgctcatctccaccgaccgccgcagcgtacaactggccccaccagggacgcccgcgccccctgacggccccaagcgcttcgatcagctcccagctgtgctgggtgcgcagggcttcggggccggccgccactgctgggaggtggagactgcggacgccgcctcctgcagagactcttctggggaggatgaggacgacgaggagagccactatgcagtgggcgcggccggggaatcagtgcaacgcaagggctgcgtaaggctgtgccctgcgggggccgtgtgggccgtggagggccgcggcggccgcctgtgggccctcacggcacccgagcccaccctgctgggcggtgttgagcccccgccgcggcgcattcgcgtggacctggactgggagcggggccgcgtggccttctacgacggccgctcactcgacctgctttacgccttccaggcgcctggccccctgggggagcgcatcttcccgctgttctgcacctgcgaccctcgtgctccgctccgcattgtaccagcggaaagctgagtctcgtctccaactagaagtttggcccggccactggccctgcagctgctttttgggcgtggaattccccactcatttctgggaacacattcacacgcccattgcaggagtattaatagcaacccacattttcgccccaaaataatgagacctcacctggtctccacgtttccacatccctgctcaaaaccaaatccattcctgccttctggctctcagaatcttctctcccctacagctactacagtacttcctgacttctcccattcaaaccattctaggcctgcaatggggaacaggccctccccatcagtattggtaaagtgaccatgattcctacatagaggctctgctggtcaaatacttgactcccactcttgccactcctagctccagaagggctcagggccttccccacagatctaaggactgggctaccctgcctgtccactgaggtttctcctaaaacaagaggcttgactctggtctgggccctgtggccctctgggaagctttgtactcttttgcaggatctgggggtggggagggacaagctagttccccaacctcctatgactgctttctatgctcacagccttttttccataagaaccttcttgaaacttctccccgcacatacggaaaggaaccaatggtgctatttcccctctctcctcctcaacctgggaatacttcagacatctccaaactcatccttgtgtatagtctcacacccttccccataagtataaatgggcccatatttaacacattttgtgattttgggttatttattttgtgcatctgtggcaataaatgagatctcagtggtggta

SEQ ID NO: 177493 - DNA, 2206 bp, Homo sapiens
  Payload ID: 14831
  Gene Symbol: RNF39
  Gene Name: ring finger protein 39
  ENST ID: ENST00000420562
  CDS Start-End: 99-1361
cccaaaccttacccgggaagcaggagaaccagatgaggcgttacgcaaggcctggtgtttacctcccgtgggagcctcctccctccctataaagcctgatgtggtggagagatttgacgagactgagactctggttgaagagagaggcaatcccaggagaggggcggaaagcggcaaaagttaatgcgggagtcggagagaagggcatctacacagcaagcagcaggggcggcccgccatctgcgcgctcgaaggcggtcacggtggtcgcggaaggggcggcgtccagatcctggctttccatggatgcgcccgagctgggcccggggctggtggagcgtctggagcagctggcgacgtgtcctctgtgcgggggctccttcgaggacccggtgcttctggcgtgcgagcacagcttctgccgcgcgtgtctggcccgccgctgggggactccgccggcgaccggcaccgaggcttcccccaccgcctgtccctgctgcggcctgccgtgtccccgccgcagcctgaggtctaatgtgcggctggcggtggaggtgcgaatcagccgcgagctgcgagagaagctggctgagcctggggcccgtgcggggagacgccgaggggggcgcatccccaccatgggctgcctggacctgcccggagaggatatgaggaagacatggagacgatttgaagtcccaacatccaagtcatctaattcagaggatgatctccctgaagattatccagtggtcaaaaaaatgcttcatagactgacagccgacctgaccctggaccctgggaccgcacaccgccgcctgctcatctccgccgaccgccgcagcgtacaactggccccaccagggacgcccgcgccccctgacggccccaagcgcttcgatcagctcccagctgtgctgggtgcgcagggcttcggggccggccgccactgctgggaggtggagactgcggacgccgcctcctgcagagactcttctggggaggatgcggacgacgaggagagccactatgcagtgggcgcggccggggaatcagtgcaacgcaagggctgcgtaaggctgtgccctgcgggggccgtgtgggccgtggggggccgcggcggccgcctgtgggccctcacggcacccgaacccaccctgctgggcggtgttgagcccccgccgcggcgcattcgcgtggacctggactgggagcggggccgcgtggccttctacgacggccgctcactcgacctgctttacgccttccaggcgcctggccccctgggggagcgcatcttcccgctgttctgcacctgcgaccctcgtgctccgctccgcattgtaccagcggaaagctgagtctcgtctccaactagaagtttggcccggccactggccctgcagctgctttttgggggtggaattccccactcatttctgggaacacattcacacgcccattgcaggagtattaatagcaacccacattttcgccccaaaataatgagacctcacctggtctccacgtttccacgtccctgctcaaaaccaaatccattcctgccttctggctctcagaatcttctctcccctacagctactacagtacttcctgacttctcccattcaaaccattctaggcctgcaatggggaacaggccctccccatcagtattggtaaagtgaccatgattcctacatagaggctctgctggtcaaatacttgactcccactcttgccactcctagctccagaagggctcagggccttccccacagatctaaggactgggctaccctgcctgtccactgaggtttctcctaaaacaagaggcttgactctggtctgggccctgtggccctctgggaagctttgtacctcttttgcaggatctgggggtggggagggacaagctagttccccaacctcctatgactgctttctatgctcacagccttttttccataagaaccttcttgaaacttctccccgcacatactcacggaaaggaaccaatggtgctatttcccctctctcctcctcaacctgggaatacttcagacatctccaaactcatccttgtgtatagtctcacacccttccccataagtataaatgggcccatatttaacacattttgtgattttgggttatttattttgtgcatctgtggcaataaatgagatctcagtggtggtatgga

SEQ ID NO: 177494 - DNA, 1970 bp, Homo sapiens; identical to SEQ ID NO: 177491
  Payload ID: 14831
  Gene Symbol: RNF39
  Gene Name: ring finger protein 39
  Uniprot ID: Q9H2S5
  ENST ID: ENST00000451425
  CDS Start-End: 61-1125

SEQ ID NO: 177495 - DNA, 1970 bp, Homo sapiens
  Payload ID: 14831
  Gene Symbol: RNF39
  Gene Name: ring finger protein 39
  Uniprot ID: Q9H2S5
  ENST ID: ENST00000441449
  CDS Start-End: 61-1125
cgttacgcaaggcctggtgtttacctcccgtgggagcctcctccctccctataaagcctgatgtggtggagagatttgacgagactgagactctggttgaagagagaggcaatcccaggagaggggcggaaagcggcaaaagttaatgcgggagtcggagagaagggcatctacacagcaagcagcaggggcggcccgccatctgcgcgctcgaaggcggtcacggtggtcgcggaaggggcggcgtccagatcctggctttccatggatgcgcccgagctgggcccggggctggtggagcgtctggagcagctggcgacgtgtcctctgtgcgggggctccttcgaggacccggtgcttctggcgtgcgagcacagcttctgccgcgcgtgtctggcccgccgctgggggactccgccggcgaccggcaccgaggcttcccccaccgcctgtccctgctgcggcctgccgtgtccccgccgcagcctgaggtctaatgtgcggctggcggtggaggtgcgaatcagccgcgagctgcgagagaagctggctgagcctggggcccgtgcggggagacgccgaggggggcgcatccccaccatgggctgcctggacctgcccggagaggatatgaggaagacatggagacgatttgaagtcccaacatccaagtcatctaattcagaggatgatctccctgaagattatccagtggtcaaaaaaatgcttcatagactgacagccgacctgaccctggaccctgggaccgcacaccgccgcctgctcatctccgccgaccgccgcagcgtacaactggccccaccagggacgcccgcgccccctgacggccccaagcgcttcgatcagctcccagctgtgctgggtgcgcagggcttcggggccggccgccactgctgggaggtggagactgcggacgccgcctcctgcagagactcttctggggaggatgcggacgacgaggagagccactatgcagtgggcgcggccggggaatcagtgcaacgcaagggctgcgcgcctggccccctgggggagcgcatcttcccgctgttctgcacctgcgaccctcgtgctccgctccgcattgtaccagcggaaagctgagtctcgtctccaactagaagtttggcccggccactggccctgcagctgctttttgggggtggaattccccactcatttctgggaacacattcacacgcccattgcaggagtattaatagcaacccacattttcgccccaaaataatgagacctcacctggtctccacgtttccacgtccctgctcaaaaccaaatccattcctgccttctggctctcagaatcttctctcccctacagctactacagtacttcctgacttctcccattcaaaccattctaggcctgcaatggggaacaggccctccccatcagtattggtaaagtgaccatgattcctacatagaggctctgctggtcaaatacttgactcccactcttgccactcctagctccagaagggctcagggccttccccacagatctaaggactgggctaccctgcctgtccactgaggtttctcctaaaacaagaggcttgactctggtctgggccctgtggccctctgggaagctttgtacctcttttgcaggatccgggggtggggagggacaagctagttccccaacctcctatgactgctttctatgctcacagccttttttccataagaaccttcttgaaacttctccccgcacatactcacggaaaggaaccaatggtgctatttcccctctctcctcctcaacctgggaatacttcagacatctccaaactcatccttgtgtatagtctcacacccttccccataagtataaatgggcccatatttaacacattttgtgattttgggttatttattttgtgcatctgtggcaataaatgagatctcagtggtggtatgga

SEQ ID NO: 177496 - DNA, 2206 bp, Homo sapiens
  Payload ID: 14831
  Gene Symbol: RNF39
  Gene Name: ring finger protein 39
  Uniprot ID: Q9H2S5
  ENST ID: ENST00000425956
  CDS Start-End: 99-1361
cccaaaccttacccgggaagcaggagaaccagatgaggcgttacgcaaggcctggtgtttacctcccgtgggagcctcctccctccctataaagcctgatgtggtggagagatttgacgagactgagactctggttgaagagagaggcaatcccaggagaggggcggaaagcggcaaaagttaatgcgggagtcggagagaagggcatctacacagcaagcagcaggggcggcccgccatctgcgcgctcgaaggcggtcacggtggtcgcggaaggggcggcgtccagatcctggctttccatggatgcgcccgagctgggcccggggctggtggagcgtctggagcagctggcgacgtgtcctctgtgcgggggctccttcgaggacccggtgcttctggcgtgcgagcacagcttctgccgcgcgtgtctggcccgccgctgggggactccgccggcgaccggcaccgaggcttcccccaccgcctgtccctgctgcggcctgccgtgtccccgccgcagcctgaggtctaatgtgcggctggcggtggaggtgcgaatcagccgcgagctgcgagagaagctggctgagcctggggcccgtgcggggagacgccgaggggggcgcatccccaccatgggctgcctggacctgcccggagaggatatgaggaagacatggagacgatttgaagtcccaacatccaagtcatctaattcagaggatgatctccctgaagattatccagtggtcaaaaaaatgcttcatagactgacagccgacctgaccctggaccctgggaccgcacaccgccgcctgctcatctccgccgaccgccgcagcgtacaactggccccaccagggacgcccgcgccccctgacggccccaagcgcttcgatcagctcccagctgtgctgggtgcgcagggcttcggggccggccgccactgctgggaggtggagactgcggacgccgcctcctgcagagactcttctggggaggatgcggacgacgaggagagccactatgcagtgggcgcggccggggaatcagtgcaacgcaagggctgcgtaaggctgtgccctgcgggggccgtgtgggccgtggagggccgcggcggccgcctgtgggccctcacggcacccgaacccaccctgctgggcggtgttgagcccccgccgcggcgcattcgcgtggacctggactgggagcggggccgcgtggccttctacgacggccgctcactcgacctgctttacgccttccaggcgcctggccccctgggggagcgcatcttcccgctgttctgcacctgcgaccctcgtgctccgctccgcattgtaccagcggaaagctgagtctcgtctccaactagaagtttggcccggccactggccctgcagctgctttttgggggtggaattccccactcatttctgggaacacattcacacgcccattgcaggagtattaatagcaacccacattttcgccccaaaataatgagacctcacctggtctccacgtttccacgtccctgctcaaaaccaaatccattcctgccttctggctctcagaatcttctctcccctacagctgctacagtacttcctgacttctcccattcaaaccattctaggcctgcaatggggaacaggccctccccatcagtattggtaaagtgaccatgattcctacatagaggctctgctggtcaaatacttgactcccactcttgccactcctagctccagaagggctcagggccttccccacagatctaaggactgggctaccctgcctgtccactgaggtttctcctaaaacaagaggcttgactctggtctgggccctgtggccctctgggaagctttgtacctcttttgcaggatccgggggtggggagggacaagctagttccccaacctcctatgactgctttctatgctcacagccttttttccataagaaccttcttgaaacttctccccgcacatactcacggaaaggaaccaatggtgctatttcccctctctcctcctcaacctgggaatacttcagacatctccaaactcatccttgtgtatagtctcacacccttccccataagtataaatgggcccatatttaacacattttgtgattttgggttatttattttgtgcatctgtggcaataaatgagatctcagtggtggtatgga

SEQ ID NO: 177497 - DNA, 2206 bp, Homo sapiens
  Payload ID: 14831
  Gene Symbol: RNF39
  Gene Name: ring finger protein 39
  Uniprot ID: Q9H2S5
  ENST ID: ENST00000456156
  CDS Start-End: 99-1361
cccaaaccttacccgggaagcaggagaaccagatgaggcgttacgcaaggcctggtgtttacctcccgtgggagcctcctccctccctataaagcctgatgtggtggagagatttgacgagactgagactctggttgaagagagaggcaatcccaggagaggggcggaaagcggcaaaagttaatgcgggagtcggagagaagggcatctacacagcaagcagcaggggcggcccgccatctgcgcgctcgaaggcggtcacggtggtcgcggaaggggcggcgtccagatcctggctttccatggatgcgcccgagctgggcccggggctggtggagcgtctggagcagctggcgacgtgtcctctgtgcgggggctccttcgaggacccggtgcttctggcgtgcgagcacagcttctgccgcgcgtgtctggcccgccgctgggggactccgccggcgaccggcaccgaggcttcccccaccgcctgtccctgctgcggcctgccgtgtccccgccgcagcctgaggtctaatgtgcggctggcggtggaggtgcgaatcagccgcgagctgcgagagaagctggctgagcctggggcccgtgcggggagacgccgaggggggcgcatccccaccatgggctgcctggacctgcccggagaggatatgaggaagacatggagacgatttgaagtcccaacatccaagtcatctaattcagaggatgatctccctgaagattatccagtggtcaaaaaaatgcttcatagactgacagccgacctgaccctggaccctgggaccgcacaccgccgcctgctcatctccgccgaccgccgcagcgtacaactggccccaccagggacgcccgcgccccctgacggccccaagcgcttcgatcagctcccagctgtgctgggtgcgcagggcttcggggccggccgccactgctgggaggtggagactgcggacgccgcctcctgcagagactcttctggggaggatgcggacgacgaggagagccactatgcagtgggcgcggccggggaatcagtgcaacgcaagggctgcgtaaggctgtgccctgcgggggccgtgtgggccgtggagggccgcggcggccgcctgtgggccctcacggcacccgaacccaccctgctgggcggtgttgagcccccgccgcggcgcattcgcgtggacctggactgggagcggggccgcgtggccttctacgacggccgctcactcgacctgctttacgccttccaggcgcctggccccctgggggagcgcatcttcccgctgttctgcacctgcgaccctcgtgctccgctccgcattgtaccagcggaaagctgagtctcgtctccaactagaagtttggcccggccactggccctgcagctgctttttgggggtggaattccccactcatttctgggaacacattcacacgcccattgcaggagtattaatagcaacccacattttcgccccaaaataatgagacctcacctggtctccacgtttccacgtccctgctcaaaaccaaatccattcctgccttctggctctcagaatcttctctcccctacagctactacagtacttcctgacttctcccattcaaaccattctaggcctgcaatggggaacaggccctccccatcagtattggtaaagtgaccatgattcctacatagaggctctgctggtcaaatacttgactcccactcttgccactcctagctccagaagggctcagggccttccccacagatctaaggactgggctaccctgcctgtccactgaggtttctcctaaaacaagaggcttgactctggtctgggccctgtggccctctgggaagctttgtacctcttttgcaggatccgggggtggggagggacaagctagttccccaacctcctatgactgctttctatgctcacagccttttttccataagaaccttcttgaaacttctccccgcacatactcacggaaaggaaccaatggtgctatttcccctctctcctcctcaacctgggaatacttcagacatctccaaactcatccttgtgtatagtctcacacccttccccataagtataaatgggcccatatttaacacattttgtgattttgggttatttattttgtgcatctgtggcaataaatgagatctcagtggtggtatgga

SEQ ID NO: 177498 - DNA, 2206 bp, Homo sapiens; identical to SEQ ID NO: 177489
  Payload ID: 14831
  Gene Symbol: RNF39
  Gene Name: ring finger protein 39
  Uniprot ID: Q9H2S5
  ENST ID: ENST00000432647
  CDS Start-End: 99-1361

SEQ ID NO: 177499 - DNA, 1970 bp, Homo sapiens
  Payload ID: 14831
  Gene Symbol: RNF39
  Gene Name: ring finger protein 39
  Uniprot ID: Q9H2S5
  ENST ID: ENST00000442378
  CDS Start-End: 61-1125
cgttacgcaaggcctggtgtttacctcccgtgggagcctcctccctccctataaagcctgatgtggtggagagatttgacgagactgagactctggttgaagagagaggcaatcccaggagaggggcggaaagcggcaaaagttaatgcgggagtcggagagaagggcatctacacagcaagcagcaggggcggcccgccatctgcgcgctcgaaggcggtcacggtggtcgcggaaggggcggcgtccagatcctggctttccatggatgcgcccgagctgggcccggggctggtggagcgtctggagcagctggcgacgtgtcctctgtgcgggggctccttcgaggacccggtgcttctggcgtgcgagcacagcttctgccgcgcgtgtctggcccgccgctgggggactccgccggcgaccggcaccgaggcttcccccaccgcctgtccctgctgcggcctgccgtgtccccgccgcagcctgaggtctaatgtgcggctggcggtggaggtgcgaatcagccgcgagctgcgagagaagctggctgagcctggggcccgtgcggggagacgccgaggggggcgcatccccaccatgggctgcctggacctgcccggagaggatatgaggaagacatggagacgatttgaagtcccaacatccaagtcatctaattcagaggatgatctccctgaagattatccagtggtcaaaaaaatgcttcatagactgacagccgacctgaccctggaccctgggaccgcacaccgccgcctgctcatctccgccgaccgccgcagcgtacaactggccccaccagggacgcccgcgccccctgacggccccaagcgcttcgatcagctcccagctgtgctgggtgcgcagggcttcggggccggccgccactgctgggaggtggagactgcggacgccgcctcctgcagagactcttctggggaggatgcggacgacgaggagagccactatgcagtgggcgcggccggggaatcagtgcaacgcaagggctgcgcgcctggccccctgggggagcgcatcttcccgctgttctgcacctgcgaccctcgtgctccgctccgcattgtaccagcggaaagctgagtctcgtctccaactagaagtttggcccggccactggccctgcagctgctttttgggggtggaattccccactcatttctgggaacacattcacacgcccattgcaggagtattaatagcaacccacattttcgccccaaaataatgagacctcacctggtctccacgtttccacgtccctgctcaaaaccaaatccattcctgccttctggctctcagaatcttctctcccctacagctgctacagtacttcctgacttctcccattcaaaccattctaggcctgcaatggggaacaggccctccccatcagtattggtaaagtgaccatgattcctacatagaggctctgctggtcaaatacttgactcccactcttgccactcctagctccagaagggctcagggccttccccacagatctaaggactgggctaccctgcctgtccactgaggtttctcctaaaacaagaggcttgactctggtctgggccctgtggccctctgggaagctttgtacctcttttgcaggatccgggggtggggagggacaagctagttccccaacctcctatgactgctttctatgctcacagccttttttccataagaaccttcttgaaacttctccccgcacatactcacggaaaggaaccaatggtgctatttcccctctctcctcctcaacctgggaatacttcagacatctccaaactcatccttgtgtatagtctcacacccttccccataagtataaatgggcccatatttaacacattttgtgattttgggttatttattttgtgcatctgtggcaataaatgagatctcagtggtggtatgga

SEQ ID NO: 177500 - DNA, 1970 bp, Homo sapiens; identical to SEQ ID NO: 177491
  Payload ID: 14831
  Gene Symbol: RNF39
  Gene Name: ring finger protein 39
  Uniprot ID: Q9H2S5
  ENST ID: ENST00000457092
  CDS Start-End: 61-1125

SEQ ID NO: 177501 - DNA, 1970 bp, Homo sapiens
  Payload ID: 14831
  Gene Symbol: RNF39
  Gene Name: ring finger protein 39
  Uniprot ID: Q9H2S5
  ENST ID: ENST00000417541
  CDS Start-End: 61-1125
cgttacgcaaggcctggtgtttacctcccgtgggagcctcctccctccctataaagcctgatgtggtggagagatttgacgagactgagactctggttgaagagagaggcaatcccaggagaggggcggaaagcggcaaaagttaatgcgggagtcggagagaagggcatctacacagcaagcagcaggggcggcccgccatctgcgcgctcgaaggcggtcacggtggtcgcggaaggggcggcgtccagatcctggctttccatggatgcgcccgagctgggcccggggctggtggagcgtctggagcagctggcgacgtgtcctctgtgcgggggctccttcgaggacccggtgcttctggcgtgcgagcacagcttctgccgcgcgtgtctggcccgccgctgggggactccgccggcgaccggcaccgaggcttcccccaccgcctgtccctgctgcggcctgccgtgtccccgccgcagcctgaggtctaatgtgcggctggcggtggaggtgcgaatcagccgcgagctgcgagagaagctggctgagcctggggcccgtgcggggagacgccgaggggggcgcatccccaccatgggctgcctggacctgcccggagaggatatgaggaagacatggagacgatttgaagtcccaacatccaagtcatctaattcagaggatgatctccctgaagattatccagtggtcaaaaaaatgcttcatagactgacagccgacctgaccctggaccctgggaccgcacaccgccgcctgctcatctccgccgaccgccgcagcgtacaactggccccaccagggacgcccgcgccccctgacggccccaagcgcttcaatcagctcccagctgtgctgggtgcgcagggcttcggggccggccgccactgctgggaggtggagactgcggacgccgcctcctgcagagactcttctggggaggatgcggacgacgaggagagccactatgcagtgggcgcggccggggaatcagtgcaacgcaagggctgcgcgcctggccccctgggggagcgcatcttcccgctgttctgcacctgcgaccctcgtgctccgctccgcattgtaccagcggaaagctgagtctcgtctccaactagaagtttggcccggccactggccctgcagctgctttttgggggtggaattccccactcatttctgggaacacattcacacgcccattgcaggagtattaatagcaacccacattttcgccccaaaataatgagacctcacctggtctccacgtttccacgtccctgctcaaaaccaaatccattcctgccttctggctctcagaatcttctctcccctacagctactacagtacttcctgacttctcccattcaaaccattctaggcctgcaatggggaacaggccctccccatcagtattggtaaagtgaccatgattcctacatagaggctctgctggtcaaatacttgactcccactcttgccactcctagctccagaagggctcagggccttccccacagatctaaggactgggctaccctgcctgtccactgaggtttctcctaaaacaagaggcttgactctggtctgggccctgtggccctctgggaagctttgtacctcttttgcaggatctgggggtggggagggacaagctagttccccaacctcctatgactgctttctatgctcacagccttttttccataagaaccttcttgaaacttctccccgcacatactcacggaaaggaaccaatggtgctatttcccctctctcctcctcaacctgggaatacttcagacatctccaaactcatccttgtgtatagtctcacacccttccccataagtataaatgggcccatatttaacacattttgtgattttgggttatttattttgtgcatctgtggcaataaatgagatctcagtggtggtatgga

SEQ ID NO: 177502 - DNA, 2206 bp, Homo sapiens; identical to SEQ ID NO: 177497
  Payload ID: 14831
  Gene Symbol: RNF39
  Gene Name: ring finger protein 39
  Uniprot ID: Q9H2S5
  ENST ID: ENST00000450015
  CDS Start-End: 99-1361

SEQ ID NO: 177503 - DNA, 2206 bp, Homo sapiens
  Payload ID: 14831
  Gene Symbol: RNF39
  Gene Name: ring finger protein 39
  Uniprot ID: Q9H2S5
  ENST ID: ENST00000449145
  CDS Start-End: 99-1361
cccaaaccttacccgggaagcaggagaaccagatgaggcgttacgcaaggcctggtgtttacctcccgtgggagcctcctccctccctataaagcctgatgtggtggagagatttgacgagactgagactctggttgaagagagaggcaatcccaggagaggggcggaaagcggcaaaagttaatgcgggagtcggagagaagggcatctacacagcaagcagcaggggcggcccgccatctgcgcgctcgaaggcggtcacggtggtcgcggaaggggcggcgtccagatcctggctttccatggatgcgcccgagctgggcccggggctggtggagcgtctggagcagctggcgacgtgtcctctgtgcgggggctccttcgaggacccggtgcttctggcgtgcgagcacagcttctgccgcgcgtgtctggcccgccgctgggggactccgccggcgaccggcaccgaggcttcccccaccgcctgtccctgctgcggcctgccgtgtccccgccgcagcctgaggtctaatgtgcggctggcggtggaggtgcgaatcagccgcgagctgcgagagaagctggctgagcctggggcccgtgcggggagacgccgaggggggcgcatccccaccatgggctgcctggacctgcccggagaggatatgaggaagacatggagacgatttgaagtcccaacatccaagtcatctaattcagaggatgatctccctgaagattatccagtggtcaaaaaaatgcttcatagactgacagccgacctgaccctggaccctgggaccgcacaccgccgcctgctcatctccgccgaccgccgcagcgtacaactggccccaccagggacgcccgcgccccctgacggccccaagcgcttcaatcagctcccagctgtgctgggtgcgcagggcttcggggccggccgccactgctgggaggtggagactgcggacgccgcctcctgcagagactcttctggggaggatgcggacgacgaggagagccactatgcagtgggcgcggccggggaatcagtgcaacgcaagggctgcgtaaggctgtgccctgcgggggccgtgtgggccgtggagggccgcggcggccgcctgtgggccctcacggcacccgaacccaccctgctgggcggtgttgagcccccgccgcggcgcattcgcgtggacctggactgggagcggggccgcgtggccttctacgacggccgctcactcgacctgctttacgccttccaggcgcctggccccctgggggagcgcatcttcccgctgttctgcacctgcgaccctcgtgctccgctccgcattgtaccagcggaaagctgagtctcgtctccaactagaagtttggcccggccactggccctgcagctgctttttgggggtggaattccccactcatttctgggaacacattcacacgcccattgcaggagtattaatagcaacccacattttcgccccaaaataatgagacctcacctggtctccacgtttccacgtccctgctcaaaaccaaatccattcctgccttctggctctcagaatcttctctcccctacagctactacagtacttcctgacttctcccattcaaaccattctaggcctgcaatggggaacaggccctccccatcagtattggtaaagtgaccatgattcctacatagaggctctgctggtcaaatacttgactcccactcttgccactcctagctccagaagggctcagggccttccccacagatctaaggactgggctaccctgcctgtccactgaggtttctcctaaaacaagaggcttgactctggtctgggccctgtggccctctgggaagctttgtacctcttttgcaggatctgggggtggggagggacaagctagttccccaacctcctatgactgctttctatgctcacagccttttttccataagaaccttcttgaaacttctccccgcacatactcacggaaaggaaccaatggtgctatttcccctctctcctcctcaacctgggaatacttcagacatctccaaactcatccttgtgtatagtctcacacccttccccataagtataaatgggcccatatttaacacattttgtgattttgggttatttattttgtgcatctgtggcaataaatgagatctcagtggtggtatgga

SEQ ID NO: 177504 - DNA, 1970 bp, Homo sapiens; identical to SEQ ID NO: 177495
  Payload ID: 14831
  Gene Symbol: RNF39
  Gene Name: ring finger protein 39
  Uniprot ID: Q9H2S5
  ENST ID: ENST00000442063
  CDS Start-End: 61-1125

SEQ ID NO: 177505 - DNA, 3088 bp, Homo sapiens
  Payload ID: 14832
  Gene Symbol: RNF4
  Gene Name: ring finger protein 4
  Uniprot ID: P78317
  ENST ID: ENST00000314289
  CDS Start-End: 480-1052
agtgcgctcgattgtgggcgggggcggaaagaggcgcgttttaaagtggtaacagatggttttcttatccaataggattaaaaaatttgtccttacccggccgaccgcggaagtagagtaggcgggcggccaatggggacatgatggggggcggagccgaggcctccgaagcggaagtgggttgctgttgaggcggcggcatctttctcgaggagctctcctgggcggctgaagaaggagcttcttctccggagtgcgccggcggtggcgcctgcggacctaactagctccaggttaggccgagctttgcgggaaagcagcggacttgaaaatactggaaatctgtccggatccaaattattttgcaagccagatgagtaaccagagggcatgaaaggttgagaacatttgacttccctgcaaaccttggtatagatcacttccttttctgtaggaaaggaaaggcaccaaagagcacaatgagtacaagaaagcgtcgtggtggagcaataaattctagacaagctcagaagcgaactcgggaagcaacctccacccccgagatctccttggaagcagaacccatagaactcgtggaaactgctggagatgaaattgtggacctcacttgtgaatctttagagcctgtggtggttgatctgactcacaatgactctgttgtgattgttgacgaaagaagaagaccaaggaggaatgctaggaggctgccccaggaccatgctgacagctgtgtggtgagcagtgacgatgaggagttgtccagggacagagacgtatatgtgactacccatactcccagaaacgccagggatgagggcgctacaggcctcaggccctcaggtactgtcagttgtcccatctgcatggacggatactcagagatcgtgcagaatggacgtctcatcgtttccacagaatgcggccatgtcttctgtagccagtgcctccgtgattccctgaagaatgctaatacttgcccaacttgtaggaaaaagatcaaccacaaacggtaccaccccatttatatatgaagtattcagagccccccaggagagacggatggacagacagacagccaggttctccagtggtatctgcctccattttcctgagatcaaaaagactgtttcgaaaccaacatctgatatgtaaactgctcttttgtttccaaccccttccttttgttatctccagtttgatgctatggcgctggacccagggccctcccaggccatctctgttcctctggggtggtccagttctagagtgggagaaagggagtcaggcgcattgggaatcgtggttccagtctggttgcagaatctgcacatttgccaagaaattttccctgtttggaaagtttgccccagctttcccgggcacaccaccttttgtcccaagtgtctgccggtcgaccaatctgcctgccacacattgaccaagccagacccggttcacccagctcgaggatcccaggttgaagagtggccccttgaggccctggaaagaccaatcactggacttcttcccttgagagtcagaggtcacccgtgattctgcctgcaccttatcattgatctgcagtgatttctgcaaatcaagagaaactctgcagggcactcccctgtttcctaagaacgaaaaagtgcaataaaggccattcgttacctacttttcagcagcccacaagatgtagcactattagtgtccccctcagaggcttaatgttgcctgtggagcagtgcccatcccagcccgtttctgcccaccagttgttctcaggaaccttacccatgctccagcgtccttcacctggcacaggacatgcaagataaatagggcaggcacgtgtttgggtgtcctctcttttctgataaaatccatcccgtgtttgccacacgccctccagtcctcagttcccactgcctaacgtctgcccccgtgtagatactgagaggtggtggcagtaattgtggccttatcagccgctcagttccaggcttttgcccaggtcactgttgccccatgttcggagaacctggcccacctgtcttggctttctcatccttcccaacccagtgccgtttatttcagaagcttcctggccactgggcttggatgcttcgggcttctgactgctccataggttttgactggtgaaacaggggcccagatgacaacctctccttcgctccacaggtacgcgggagcctcaggttctctcaggggcagcaaagtggcccaagctgcccctgacagcacagggcctggggggtggctaacgagagaggccttacagtgccggcatgcctcctcttccactgtcgtccttcctcagagggcctcacgccaaacaaacggccttttcgtgtgaaacatcttcagggcgggaaaggggccacttctggctttgttagcaataactgaccttcagtttacccttctgaaggagcagggactcagcacagaattcactttagacggggctgaaggagtgtccctcctctatgtgaaaagaaaattgttttattcttcattctgactttttaactgtttggctcacttccagttagtttgaatgaaaataataattttctacttggagttgaagagggcagaatccgcagctctcatcattgtgatgtgtagcatgtctgccctctgactggacatcattgccattaactttcttctgggcatcacggcaatgtcacgatgcccagacttggagcaaggcaaccttggagtcagtccactcataaaatatggtaacacccattttaaaatttaagttttgtccttaaagacaacttcagtggttaattataaaagttgtgttacttcgtcctaaattaaattgatagaaagatttaaaaatgtgttttgtttctactattcagaaactgcgaactagggaaaggttggtatgaagaaatgtctttccttttttcaatgtacatagttcaactctttctttgttacatttaaactatatccatggatatcagtctgctttggactcctctgctagtgttacagatggaaataaaaccattaatttgaacca

SEQ ID NO: 177506 - DNA, 893 bp, Homo sapiens
  Payload ID: 14832
  Gene Symbol: RNF4
  Gene Name: ring finger protein 4
  ENST ID: ENST00000509258
  CDS Start-End: 311-580
agcggaagtgggttgctgttgaggcggcggcatctttctcgaggagctctcctgggcggctgaagaaggagcttcttctccggagtgcgccggcggtggcgcctgcggacctaactagctccaggttaggccgagctttgcgggaaagcagcggacttgaaaatactggaaatctgtccggatccaaattattttgcaagccagatgagtaaccagagggcatgaaaggttgagaacatttgacttccctgcaaaccttggtatagatcacttccttttctgtaggaaaggaaaggcaccaaagagcacaatgagtacaagaaagcgtcgtggtggagcaataaattctagacaagctcagaagcgaactcgggaagcaacctccacccccgagatctccttggaagcagaacccatagaactcgtggaaactgctggagatgaaattgtggacctcacttgtgaatctttagagcctgtggtggttgatctgactcacaatgactctgttgtgattgttgacggtgagtggtttcgtttcctttttcactgggtttggagaggaaactggcataggtgagagccgcggtgctgcaggtcttgccagaccatccccaagggcttggagcgctccaagcaggaagatgccttcgcagatgctgtggtcagacccacacagccagtcccccttgtgcctgctgaagaaacttcaccactatcattgagcactgagctatagtcctttcttgtggcctaccagattttggagaaggctggtagctcacagcaggggttggggggtttctcctgggaagataagatagtggcctccagagctgggcagaaccttctgggttatagctgagcatggcagcagtttgtctctgggggtc

SEQ ID NO: 177507 - DNA, 416 bp, Homo sapiens
  Payload ID: 14832
  Gene Symbol: RNF4
  Gene Name: ring finger protein 4
  ENST ID: ENST00000513450
  CDS Start-End: 253-416
gcttctgcttggctgcctagtccacagcctcccgattcaccattcacctggtcccagcaacagaagtctcagctggacacacaacatgctttagagacttgaaaatactggaaatctgtccggatccaaattattttgcaagccagatgagtaaccagagggcatgaaaggttgagaacatttgacttccctgcaaaccttggtatagatcacttccttttctgtaggaaaggaaaggcaccaaagagcacaatgagtacaagaaagcgtcgtggtggagcaataaattctagacaagctcagaagcgaactcgggaagcaacctccacccccgagatctccttggaagcagaacccatagaactcgtggaaactgctggagatgaaattgtggacctcacttgtgaatctttaga

SEQ ID NO: 177508 - DNA, 616 bp, Homo sapiens
  Payload ID: 14832
  Gene Symbol: RNF4
  Gene Name: ring finger protein 4
  ENST ID: ENST00000507247
  CDS Start-End: 312-616
aagcggaagtgggttgctgttgaggcggcggcatctttctcgaggagctctcctgggcggctgaagaaggagcttcttctccggagtgcgccggcggtggcgcctgcggacctaactagctccaggttaggccgagctttgcgggaaagcagcggacttgaaaatactggaaatctgtccggatccaaattattttgcaagccagatgagtaaccagagggcatgaaaggttgagaacatttgacttccctgcaaaccttggtatagatcacttccttttctgtaggaaaggaaaggcaccaaagagcacaatgagtacaagaaagcgtcgtggtggagcaataaattctagacaagctcagaagcgaactcgggaagcaacctccacccccgagatctccttggaagcagaacccatagaactcgtggaaactgctggagatgaaattgtggacctcacttgtgaatctttagagcctgtggtggttgatctgactcacaatgactctgttgtgattgttgacggccctcaggtactgtcagttgtcccatctgcatggacggatactcagagatcgtgcagaatggacgtctcatcgtttccacagaatgcggc

SEQ ID NO: 177509 - DNA, 545 bp, Homo sapiens
  Payload ID: 14832
  Gene Symbol: RNF4
  Gene Name: ring finger protein 4
  ENST ID: ENST00000513578
  CDS Start-End: 249-392
ctttctcgaggagctctcctgggcggctgaagaaggagcttcttctccggagtgcgccggcggtggcgcctgcggacctaactagctccaggacttgaaaatactggaaatctgtccggatccaaattattttgcaagccagatgagtaaccagagggcatgaaaggttgagaacatttgacttccctgcaaaccttggtatagatcacttccttttctgtaggaaaggaaaggcaccaaagagcacaatgagtacaagaaagcgtcgtggtggagcaataaattctagacaagctcagaagcgaactcgggaagcaacctccacccccgagatctccttggaagcagaacccatagaactcgtggaaactggctggggtgcagtggcgtgatctttgcatcccggggttcaagcaattctcctgcctcagcctcccgagtagctgggattacagctggagatgaaattgtggacctcacttgtgaatctttagagcctgtggtggttgatctgactcacaatgactctgttgtggtaagtgttg

SEQ ID NO: 177510 - DNA, 855 bp, Homo sapiens
  Payload ID: 14832
  Gene Symbol: RNF4
  Gene Name: ring finger protein 4
  ENST ID: ENST00000502316
  CDS Start-End: 291-855
ggcctccgaagcggaagtgggttgctgttgaggcggcggcatctttctcgaggagctctcctgggcggctgaagaaggagcttcttctccggagtgcgccggcggtggcgcctgcggacctaactagctccaggacttgaaaatactggaaatctgtccggatccaaattattttgcaagccagatgagtaaccagagggcatgaaaggttgagaacatttgacttccctgcaaaccttggtatagatcacttccttttctgtaggaaaggaaaggcaccaaagagcacaatgagtacaagaaagcgtcgtggtggagcaataaattctagacaagctcagaagcgaactcgggaagcaacctccacccccgagatctccttggaagcagaacccatagaactcgtggaaactgctggagatgaaattgtggacctcacttgtgaatctttagagcctgtggtggttgatctgactcacaatgactctgttgtgattgttgacgaaagaagaagaccaaggaggaatgctaggaggctgccccaggaccatgctgacagctgtgtggtgagcagtgacgatgaggagttgtccagggacagagacgtatatgtgactacccatactcccagaaacgccagggatgagggcgctacaggcctcaggccctcaggtactgtcagttgtcccatctgcatggacggatactcagagatcgtgcagaatggacgtctcatcgtttccacagaatgcggccatgtcttctgtagccagtgcctccgtgattccctgaagaatgctaatacttgcccaacttgtaggaaaaagatcaaccacaaacggtaccaccccattt

SEQ ID NO: 177511 - DNA, 558 bp, Homo sapiens
  Payload ID: 14832
  Gene Symbol: RNF4
  Gene Name: ring finger protein 4
  ENST ID: ENST00000503659
  CDS Start-End: 544-558
tagaagtgctggagactcccccaacccctccagcccctgagcggtggtactgtctaggagcgcgccgcggcccctgggcctcgctgtctgtcctaaatcattccggtgaacctctccggctgcgtagctccttgcccccgcgtcgcttggacacgggtggcatcctgggtctggcctgggcctcccgccggcctgctcctgagcccgccgcgtcgcccgccaggtgggaggaaaagaaggcccttgcggcggccccggcggcgccctcgcaggacgagcgcgtgcagcagctgcggcgcaggatctcggagagggcggccgagcgcagcaggcaggcggccttgctgcacgtgtcggcgccgcggaccgcgcgccccaagccccgggacttgaaaatactggaaatctgtccggatccaaattattttgcaagccagatgagtaaccagagggcatgaaaggttgagaacatttgacttccctgcaaaccttggtatagatcacttccttttctgtaggaaaggaaaggcaccaaagagcacaatgagtacaagaaag

SEQ ID NO: 177512 - DNA, 2098 bp, Homo sapiens
  Payload ID: 14832
  Gene Symbol: RNF4
  Gene Name: ring finger protein 4
  Uniprot ID: P78317
  ENST ID: ENST00000506706
  CDS Start-End: 871-1443
agaagttaggaggtctgcgtctgggtctcggctcaccctggggggccgcggccatggggcttagttcctagcctaggaagggaaactgagactctgggaggggcaggaacgcccccaaggtcacttggaaagtcgggcaggatgtgctgttagggggaagacccgggcagggtttttgttccccgctgacgacgcctcctttgtgtgttcgcgccgccgccccgccatcgtggggcctgcgagtttgccggggtgcgtgggccgcgtggcggggccttttgtaggtcgggaggatctgagtacgggtgcgggcctgaccgtgggggcgccgaggtcgcagtctaaaacttagtagggcctcgatttccgggcgcgcttccgggccccggctggtggttggtggaacgtgcgactgtgaggcttgcggcccagccctgcaccgctcgggcccttcaccgctctggcgcgcctatagacaggtgtatgaagattctcacgacccgaaacagagttgctagtaaacaccgcttttccgcctttgatccatcgagggaagagggaaaaggatagagcttgggcaagccgttttggtggaatctcactctgtcacccaggatgcagtgcactggcgtgttctcggtctcactgtaacctctgccatctgggctcaagtgattctcctgcctcagcctccggagtagctgggattacaggacttgaaaatactggaaatctgtccggatccaaattattttgcaagccagatgagtaaccagagggcatgaaaggttgagaacatttgacttccctgcaaaccttggtatagatcacttccttttctgtaggaaaggaaaggcaccaaagagcacaatgagtacaagaaagcgtcgtggtggagcaataaattctagacaagctcagaagcgaactcgggaagcaacctccacccccgagatctccttggaagcagaacccatagaactcgtggaaactgctggagatgaaattgtggacctcacttgtgaatctttagagcctgtggtggttgatctgactcacaatgactctgttgtgattgttgacgaaagaagaagaccaaggaggaatgctaggaggctgccccaggaccatgctgacagctgtgtggtgagcagtgacgatgaggagttgtccagggacagagacgtatatgtgactacccatactcccagaaacgccagggatgagggcgctacaggcctcaggccctcaggtactgtcagttgtcccatctgcatggacggatactcagagatcgtgcagaatggacgtctcatcgtttccacagaatgcggccatgtcttctgtagccagtgcctccgtgattccctgaagaatgctaatacttgcccaacttgtaggaaaaagatcaaccacaaacggtaccaccccatttatatatgaagtattcagagccccccaggagagacggatggacagacagacagccaggttctccagtggtatctgcctccattttcctgagatcaaaaagactgtttcgaaaccaacatctgatatgtaaactgctcttttgtttccaaccccttccttttgttatctccagtttgatgctatggcgctggacccagggccctcccaggccatctctgttcctctggggtggtccagttctagagtgggagaaagggagtcaggcgcattgggaatcgtggttccagtctggttgcagaatctgcacatttgccaagaaattttccctgtttggaaagtttgccccagctttcccgggcacaccaccttttgtcccaagtgtctgccggtcgaccaatctgcctgccacacattgaccaagccagacccggttcacccagctcgaggatcccaggttgaagagtggccccttgaggccctggaaagaccaatcactggacttcttcccttgagagtcagaggtcacccgtgattctgcctgcaccttatcattgatctgcagtgatttctgcaaatcaagagaaactctgcagggcactcccctgtttcctaagaacgaaaaagtgcaataaaggccattcgttacctacttttcagcagccca

SEQ ID NO: 177513 - DNA, 560 bp, Homo sapiens
  Payload ID: 14832
  Gene Symbol: RNF4
  Gene Name: ring finger protein 4
  ENST ID: ENST00000504224
  CDS Start-End: 357-560
gttgtgcggctggaaatctaggaatgggaaggttcggggcctgctcggctccggaggcagctggcgggtcgtccctggcggcgttggagcggtcagtggcagccgggcacgggcgaccgggtcgcccgggtcgccctcagaccgtgactcccgaaaaaccttgcgggcggggcgcgcccgcgccgtctcttgccggaaggacttgaaaatactggaaatctgtccggatccaaattattttgcaagccagatgagtaaccagagggcatgaaaggttgagaacatttgacttccctgcaaaccttggtatagatcacttccttttctgtaggaaaggaaaggcaccaaagagcacaatgagtacaagaaagcgtcgtggtggagcaataaattctagacaagctcagaagcgaactcgggaagcaacctccacccccgagatctccttggaagcagaacccatagaactcgtggaaactgctggagatgaaattgtggacctcacttgtgaatctttagagcctgtggtggttgatctgactcacaatgactctgttgtg

SEQ ID NO: 177514 - DNA, 517 bp, Homo sapiens
  Payload ID: 14832
  Gene Symbol: RNF4
  Gene Name: ring finger protein 4
  ENST ID: ENST00000513284
  CDS Start-End: 310-441
gcggaagtgggttgctgttgaggcggcggcatctttctcgaggagctctcctgggcggctgaagaaggagcttcttctccggagtgcgccggcggtggcgcctgcggacctaactagctccaggttaggccgagctttgcgggaaagcagcggacttgaaaatactggaaatctgtccggatccaaattattttgcaagccagatgagtaaccagagggcatgaaaggttgagaacatttgacttccctgcaaaccttggtatagatcacttccttttctgtaggaaaggaaaggcaccaaagagcacaatgagtacaagaaagcgtcgtggtggagcaataaattctagacaagctcagaagcgaactcgggaagcaacctccacccccgagatctccttggaagcagaacccatagaactcgtggaaactgattgttgacgaaagaagaagaccaaggaggaatgctaggaggctgccccaggaccatgctgacagctgtgtggtgagcagtgac

SEQ ID NO: 177515 - DNA, 4123 bp, Homo sapiens
  Payload ID: 14832
  Gene Symbol: RNF4
  Gene Name: ring finger protein 4
  Uniprot ID: P78317
  ENST ID: ENST00000511600
  CDS Start-End: 1516-2088
tttttctctttcaaaaacactctgccatcttttcaaggtatccgccatctctttcaagcatgtgaggagcttgataacttttgttgggggtcggtgttcagaatgacaagggtcttgcccaggctggagtgcagtagcacagtcataactcactctagcctcaacctcccagggcacaagcgatcctcccatcttagcctcctgagtaactgggactacaggcacgtgccaccacaccctgctaatttttttttttctttggtattaatattttgtagagaaggagtttcaccatgttgcccaggctggtccagaactcctgggctcaagcaatcctgccttggcttcccaaagtgctgggattacaggcatgagccaccatgcctggccctagagcttgataatttcattcattcattcttttttttttttttttttgagacaaagtctcagtctgtcacccaggttggagtgcaatggcgcaatcttggctcactgcaacttctgcctcccgagttcaaggggttctcctgcctcagcctcctgagtggcagggattacagatgcccaccaccatgcctggctaatttttgtatttttagtagaggtggggtttcaccatgttggccaggttggtctcaaactcccaacctcaggtaatctgcccaccttggcctcccagagtgctgggattacaggtgtgagctcagaccttgataatttcagtgaggaaaaaaaaaaaatctcatttacatgtttgtgccaagtgctgtgctagtgggtggggacaccatgataagtatttgataagttatgtttcttgatttaagggagtatagaagaaatggttaagtcaggactaggaggagtgagagaaatggaagcaacctttgaggtaggccctgaagaacgagcagaaattccctaaagcggggtgggagcggcaggaccaacctggccaacttcggaccttctttgaggtccaaagtcaggtactttgaactgacttccaggatacctggagtaaagtacagttctgtttgaagtgtttgtttggaaagatgagtttgttccagtgaggttgctgtattagagaaccacttgagagtttgctgcccacagtgtcatctgtgagaaatattaggtgaacgcaaaaagttgaggccagctgaaccaagccatgtaatatacacaccttccacatagatcagtcacctcagttgacttgtatgtgagccacatttgtgtccatctgatgttacagcattcactctctttgcctccacttctcaataactcacaatctgtaaactgactgaggcccgcttccacagagcaagcttcaggcctttttcaaggacttgaaaatactggaaatctgtccggatccaaattattttgcaagccagatgagtaaccagagggcatgaaaggttgagaacatttgacttccctgcaaaccttggtatagatcacttccttttctgtaggaaaggaaaggcaccaaagagcacaatgagtacaagaaagcgtcgtggtggagcaataaattctagacaagctcagaagcgaactcgggaagcaacctccacccccgagatctccttggaagcagaacccatagaactcgtggaaactgctggagatgaaattgtggacctcacttgtgaatctttagagcctgtggtggttgatctgactcacaatgactctgttgtgattgttgacgaaagaagaagaccaaggaggaatgctaggaggctgccccaggaccatgctgacagctgtgtggtgagcagtgacgatgaggagttgtccagggacagagacgtatatgtgactacccatactcccagaaacgccagggatgagggcgctacaggcctcaggccctcaggtactgtcagttgtcccatctgcatggacggatactcagagatcgtgcagaatggacgtctcatcgtttccacagaatgcggccatgtcttctgtagccagtgcctccgtgattccctgaagaatgctaatacttgcccaacttgtaggaaaaagatcaaccacaaacggtaccaccccatttatatatgaagtattcagagccccccaggagagacggatggacagacagacagccaggttctccagtggtatctgcctccattttcctgagatcaaaaagactgtttcgaaaccaacatctgatatgtaaactgctcttttgtttccaaccccttccttttgttatctccagtttgatgctatggcgctggacccagggccctcccaggccatctctgttcctctggggtggtccagttctagagtgggagaaagggagtcaggcgcattgggaatcgtggttccagtctggttgcagaatctgcacatttgccaagaaattttccctgtttggaaagtttgccccagctttcccgggcacaccaccttttgtcccaagtgtctgccggtcgaccaatctgcctgccacacattgaccaagccagacccggttcacccagctcgaggatcccaggttgaagagtggccccttgaggccctggaaagaccaatcactggacttcttcccttgagagtcagaggtcacccgtgattctgcctgcaccttatcattgatctgcagtgatttctgcaaatcaagagaaactctgcagggcactcccctgtttcctaagaacgaaaaagtgcaataaaggccattcgttacctacttttcagcagcccacaagatgtagcactattagtgtccccctcagaggcttaatgttgcctgtggagcagtgcccatcccagcccgtttctgcccaccagttgttctcaggaaccttacccatgctccagcgtccttcacctggcacaggacatgcaagataaatagggcaggcacgtgtttgggtgtcctctcttttctgataaaatccatcccgtgtttgccacacgccctccagtcctcagttcccactgcctaacgtctgcccccgtgtagatactgagaggtggtggcagtaattgtggccttatcagccgctcagttccaggcttttgcccaggtcactgttgccccatgttcggagaacctggcccacctgtcttggctttctcatccttcccaacccagtgccgtttatttcagaagcttcctggccactgggcttggatgcttcgggcttctgactgctccataggttttgactggtgaaacaggggcccagatgacaacctctccttcgctccacaggtacgcgggagcctcaggttctctcaggggcagcaaagtggcccaagctgcccctgacagcacagggcctggggggtggctaacgagagaggccttacagtgccggcatgcctcctcttccactgtcgtccttcctcagagggcctcacgccaaacaaacggccttttcgtgtgaaacatcttcagggcgggaaaggggccacttctggctttgttagcaataactgaccttcagtttacccttctgaaggagcagggactcagcacagaattcactttagacggggctgaaggagtgtccctcctctatgtgaaaagaaaattgttttattcttcattctgactttttaactgtttggctcacttccagttagtttgaatgaaaataataattttctacttggagttgaagagggcagaatccgcagctctcatcattgtgatgtgtagcatgtctgccctctgactggacatcattgccattaactttcttctgggcatcacggcaatgtcacgatgcccagacttggagcaaggcaaccttggagtcagtccactcataaaatatggtaacacccattttaaaatttaagttttgtccttaaagacaacttcagtggttaattataaaagttgtgttacttcgtcctaaattaaattgatagaaagatttaaaaatgtgttttgtttctactattcagaaactgcgaactagggaaaggttggtatgaagaaatgtctttccttttttcaatgtacatagttcaactctttctttgttacatttaaactatatccatggatatcagtctgctttggactcctctgctagtgttacagatggaaataaaaccattaatttgaacc

SEQ ID NO: 177516 - DNA, 1373 bp, Homo sapiens
  Payload ID: 14832
  Gene Symbol: RNF4
  Gene Name: ring finger protein 4
  Uniprot ID: P78317
  ENST ID: ENST00000511859
  CDS Start-End: 277-618
tttctcgaggagctctcctgggcggctgaagaaggagcttcttctccggagtgcgccggcggtggcgcctgcggacctaactagctccaggttaggccgagctttgcgggaaagcagcggacttgaaaatactggaaatctgtccggatccaaattattttgcaagccagatgagtaaccagagggcatgaaaggttgagaacatttgacttccctgcaaaccttggtatagatcacttccttttctgtaggaaaggaaaggcaccaaagagcacaatgagtacaagaaagcgtcgtggtggagcaataaattctagacaagctcagaagcgaactcgggaagcaacctccacccccgagatctccttggaagcagaacccatagaactcgtggaaactgctggagatgaaattgtggacctcacttgtgaatctttagagcctgtggtggttgatctgactcacaatgactctgttgtgattgttgacggccctcaggtactgtcagttgtcccatctgcatggacggatactcagagatcgtgcagaatggacgtctcatcgtttccacagaatgcggccatgtcttctgtagccagtgcctccgtgattccctgaagaatgctaatacttgcccaacttgtaggaaaaagatcaaccacaaacggtaccaccccatttatatatgaagtattcagagccccccaggagagacggatggacagacagacagccaggttctccagtggtatctgcctccattttcctgagatcaaaaagactgtttcgaaaccaacatctgatatgtaaactgctcttttgtttccaaccccttccttttgttatctccagtttgatgctatggcgctggacccagggccctcccaggccatctctgttcctctggggtggtccagttctagagtgggagaaagggagtcaggcgcattgggaatcgtggttccagtctggttgcagaatctgcacatttgccaagaaattttccctgtttggaaagtttgccccagctttcccgggcacaccaccttttgtcccaagtgtctgccggtcgaccaatctgcctgccacacattgaccaagccagacccggttcacccagctcgaggatcccaggttgaagagtggccccttgaggccctggaaagaccaatcactggacttcttcccttgagagtcagaggtcacccgtgattctgcctgcaccttatcattgatctgcagtgatttctgcaaatcaagagaaactctgcagggcactcccctgtttcctaagaacgaaaaagtgcaataaaggccattcgttacctacttttcagcagcccacaagatgtagcactattagtgtccccctc

SEQ ID NO: 177517 - DNA, 603 bp, Homo sapiens
  Payload ID: 14832
  Gene Symbol: RNF4
  Gene Name: ring finger protein 4
  ENST ID: ENST00000508235
  CDS Start-End: 1-320
aggaccatgctgacagctgtgtggtgagcagtgacgatgaggagttgtccagggacagagacgtatatgtgactacccatactcccagaaacgccagggatgagggcgctacaggcctcaggccctcaggtactgtcagttgtcccatctgcatggacggatactcagagatcgtgcagaatggacgtctcatcgtttccacagaatgcggccatgtcttctgtagccagtgcctccgtgattccctgaagaatgctaatacttgcccaacttgtaggaaaaagatcaaccacaaacgactccttttagttttggcatgaatcataggacaccaccctaccctgctggggattattgtcttctgtgcagaagtgaacggaaagactcatcattcttagagagtggaattaagactgcgagcaaattggccctttccatggctcccaagggcaacagcgtgctgcacctgccactgtgggtgtgcccggactgccgcaggaccgtggagaaggaggagaggcatggcggccttgaccagccagtgagccaagattttcttcttcactcctcgcttggtggctcccagccagaggccggcagtgg

SEQ ID NO: 177518 - DNA, 2796 bp, Homo sapiens
  Payload ID: 14832
  Gene Symbol: RNF4
  Gene Name: ring finger protein 4
  Uniprot ID: P78317
  ENST ID: ENST00000541204
  CDS Start-End: 349-690
aatggggacatgatggggggcggagccgaggcctccgaagcggaagtgggttgctgttgaggcggcggcatctttctcgaggagctctcctgggcggctgaagaaggagcttcttctccggagtgcgccggcggtggcgcctgcggacctaactagctccaggttaggccgagctttgcgggaaagcagcggacttgaaaatactggaaatctgtccggatccaaattattttgcaagccagatgagtaaccagagggcatgaaaggttgagaacatttgacttccctgcaaaccttggtatagatcacttccttttctgtaggaaaggaaaggcaccaaagagcacaatgagtacaagaaagcgtcgtggtggagcaataaattctagacaagctcagaagcgaactcgggaagcaacctccacccccgagatctccttggaagcagaacccatagaactcgtggaaactgctggagatgaaattgtggacctcacttgtgaatctttagagcctgtggtggttgatctgactcacaatgactctgttgtgattgttgacggccctcaggtactgtcagttgtcccatctgcatggacggatactcagagatcgtgcagaatggacgtctcatcgtttccacagaatgcggccatgtcttctgtagccagtgcctccgtgattccctgaagaatgctaatacttgcccaacttgtaggaaaaagatcaaccacaaacggtaccaccccatttatatatgaagtattcagagccccccaggagagacggatggacagacagacagccaggttctccagtggtatctgcctccattttcctgagatcaaaaagactgtttcgaaaccaacatctgatatgtaaactgctcttttgtttccaaccccttccttttgttatctccagtttgatgctatggcgctggacccagggccctcccaggccatctctgttcctctggggtggtccagttctagagtgggagaaagggagtcaggcgcattgggaatcgtggttccagtctggttgcagaatctgcacatttgccaagaaattttccctgtttggaaagtttgccccagctttcccgggcacaccaccttttgtcccaagtgtctgccggtcgaccaatctgcctgccacacattgaccaagccagacccggttcacccagctcgaggatcccaggttgaagagtggccccttgaggccctggaaagaccaatcactggacttcttcccttgagagtcagaggtcacccgtgattctgcctgcaccttatcattgatctgcagtgatttctgcaaatcaagagaaactctgcagggcactcccctgtttcctaagaacgaaaaagtgcaataaaggccattcgttacctacttttcagcagcccacaagatgtagcactattagtgtccccctcagaggcttaatgttgcctgtggagcagtgcccatcccagcccgtttctgcccaccagttgttctcaggaaccttacccatgctccagcgtccttcacctggcacaggacatgcaagataaatagggcaggcacgtgtttgggtgtcctctcttttctgataaaatccatcccgtgtttgccacacgccctccagtcctcagttcccactgcctaacgtctgcccccgtgtagatactgagaggtggtggcagtaattgtggccttatcagccgctcagttccaggcttttgcccaggtcactgttgccccatgttcggagaacctggcccacctgtcttggctttctcatccttcccaacccagtgccgtttatttcagaagcttcctggccactgggcttggatgcttcgggcttctgactgctccataggttttgactggtgaaacaggggcccagatgacaacctctccttcgctccacaggtacgcgggagcctcaggttctctcaggggcagcaaagtggcccaagctgcccctgacagcacagggcctggggggtggctaacgagagaggccttacagtgccggcatgcctcctcttccactgtcgtccttcctcagagggcctcacgccaaacaaacggccttttcgtgtgaaacatcttcagggcgggaaaggggccacttctggctttgttagcaataactgaccttcagtttacccttctgaaggagcagggactcagcacagaattcactttagacggggctgaaggagtgtccctcctctatgtgaaaagaaaattgttttattcttcattctgactttttaactgtttggctcacttccagttagtttgaatgaaaataataattttctacttggagttgaagagggcagaatccgcagctctcatcattgtgatgtgtagcatgtctgccctctgactggacatcattgccattaactttcttctgggcatcacggcaatgtcacgatgcccagacttggagcaaggcaaccttggagtcagtccactcataaaatatggtaacacccattttaaaatttaagttttgtccttaaagacaacttcagtggttaattataaaagttgtgttacttcgtcctaaattaaattgatagaaagatttaaaaatgtgttttgtttctactattcagaaactgcgaactagggaaaggttggtatgaagaaatgtctttccttttttcaatgtacatagttcaactctttctttgttacatttaaactatatccatggatatcagtctgctttggactcctctgctagtgttacagatggaaataaaaccattaatttgaacc

SEQ ID NO: 177519 - DNA, 5634 bp, Homo sapiens
  Payload ID: 14833
  Gene Symbol: RNF40
  Gene Name: ring finger protein 40, E3 ubiquitin protein ligase
  Uniprot ID: O75150
  ENST ID: ENST00000324685
  CDS Start-End: 436-3441
aacgcgcagatacgtgagaagttgcgagtgcccacctgggcgccctctcttccaggttgctaatacgagggccggtgctgtcctccaggctgggaagtgggagcgcggtgtcagttactatgggaactgcctcttggccaatcaccgagagaaagaggaggtgtttgggaagaagccagaggacccgagtggcgggaccaagcgtaaccaatagaagcagaagataaagaagtttcctcacatccggggctgcctttggcgcctgcgccctgcgcaccgttggggggggggcagtggcgtccagtgacgcccagtgacgtccggtgaaatccaagatggcggcgctaggctgaccctcctgctggtgacggaagtaccgcctcctcccgtttgacgcccctcaggggaccctgcatcgctccagccgccgcggccatgtctgggccaggcaacaaacgcgccgccggcgacgggggctcagggcccccggaaaagaagctgagtcgtgaggagaagaccaccacgactcttatcgagcccattcgtcttggaggcatctcttccacggaggagatggacctgaaggtactacagttcaagaacaagaaactggcagagcggctggaacaacggcaggcttgtgaagatgaactccgagaacgaattgagaagttggagaagcggcaggccacagatgatgccacactcctcatcgtcaatcgctactgggcccagctggatgaaactgtggaagcccttctccgatgccatgagagccagggggagctgtcttcagcgcctgaggcacctgggacccaggaggggccaacatgtgatgggactcctctcccagagccggggacatcagagctgagagaccccttgctgatgcagctgcggccccctctcagtgagccggccttggcttttgtggtggcactgggtgccagcagcagtgaggaggtggagctggagctgcaaggccgaatggagttctccaaggcagctgtgtctcgtgtggtagaggcctcagaccgcctacagcgccgggtggaggaactctgtcagcgagtgtacagccgaggggacagtgagcccctcagtgaggcggctcaggcacacacccgagagctgggccgtgagaaccggcgactgcaggacttggccactcagctgcaggagaaacaccaccgcatctcattggagtactccgagctccaggataaagtgacatcggcagagaccaaggtgctggagatggagacaacagtggaggacttgcagtgggacatcgagaagctgcggaagcgagagcaaaagctcaataagcacctggcagaggccttagagcagcttaactctggctactatgtatctgggagctcctcaggcttccaggggggccagatcacactcagcatgcagaagtttgagatgctgaatgcagagttagaggaaaaccaggaactggccaacagccgtatggcagagctggagaaactgcaggccgaacttcagggggctgtgcggaccaatgagcgcctcaaggtggccctgcggagccttcctgaggaggtagtgcgggagacgggggagtaccgcatgctgcaggcccaattctcactgctctacaacgagtctctgcaagtgaagacccagctagacgaggctcggggcctgctgctggccacaaagaactcccacctgcgacacatcgagcacatggagagcgacgagctggggctgcagaagaagctacgcacagaggtcattcagctggaggacacgctggcccaggtacgcaaggagtatgagatgctgcgcatcgagtttgagcagaatctggcggccaacgagcaggcggggcccatcaaccgtgagatgcgccacctgattagtagtcttcaaaaccacaaccaccagctaaaaggggacgcccagcgatacaagcggaagcttcgagaagtacaagctgagattggcaagctccgggcccaggccagtggctctgcccactccacccccaacctgggccacccagaggattctggcgtcagtgccccagccccagggaaagaggagggtgggccaggccctgtcagtacccccgacaacagaaaggagatggctccagtgcctggcaccaccactactaccacttcagtgaagaaggaggagctggtcccctctgaagaggacttccagggtataacccctggggcccagggcccttcctcccggggccgagaacctgaggccaggcccaagcgggagcttcgggaacgggaaggtcccagcctaggacctccacctgtagcctccgctctctcaagggctgatcgggagaaggccaaggtggaagaaaccaagcggaaggaatcagaactcctcaagggtctccgagcagagctcaagaaggcccaggagagccagaaggagatgaaactgctgctggatatgtacaagtcagcgcccaaggagcagcgggataaggtgcagctcatggcagcggaacgcaaggctaaggccgaggttgatgagctgcggagccgcatccgggaattggaggagagggatcgaagggagagcaagaagatcgcggatgaggatgccctgcggcgcattcggcaggcagaggagcagatagaacacctgcagcgcaagctgggtgccaccaagcaggaggaggaggctctgctctcagagatggatgtgacaggtcaggcttttgaggacatgcaggaacagaacgggcggctgctacagcagttgcgggaaaaggatgatgccaactttaagctaatgtcagagcggatcaaggccaaccagattcacaagctgctgcgggaggagaaggatgagttgggcgagcaggtccttggcctcaagtcccaggtggatgcccagctgctgactgtgcagaagctagaggagaaggagcgagccttgcagggcagcctcgggggtgtggagaaggagctgacgctgcgcagccaagccctggagctcaacaagcggaaggctgtagaagccgcccagctggccgaggacctgaaggtgcagctggagcacgtgcagactcggctgcgggagatccagccctgcctggcagagagccgggctgctcgtgagaaagagagcttcaacctcaagagggctcaggaggacatctcacggctgcggcgcaagctggaaaagcagaggaaggtggaggtctacgcagatgccgacgaaatcctccaggaggagatcaaggagtacaaggcgcggttgacctgcccctgctgtaacacccgcaagaaggatgcagtccttaccaagtgcttccacgttttctgcttcgagtgcgtgcggggccgctatgaggcccgccagaggaagtgccccaagtgcaacgcggcctttggtgcccacgacttccatcgtatctacatcagctgaacctgaaactcaggggactctggaacaccatggaccctgggggctgtgcccccatctcctccccaccccaggtctagtggccccaccctccattccggaccccatgggcccagcccctgcccatctagttggtttggggaccctggtgcatgctagtgggcatgggatcagccaagcttcgttccatcttttcctaaaggtcagagctgcagcctagggggcactgccctacagaaaaggtctgcctgagaggcctgaggagcccagagcacttgactgagcttcccggaaactggccctaacctgtctgtctccgtggatgcatcctaaccctaaggaaaattccccaggctgtgatctaccctagagaaggctcgctccctgcctactggctcacaaatgaggaccagtgagccatgtccttgttccttgtttgagactgggctgcaggccccaggaagactttccttcacccaccatccccctaacctcggcagggcttctgtcctgtggagttccctggacaccttggtctggctcttgtgccaagggctgaaggaggtaccctcttggcagatgggggcatcacttgcttcctttgggaagctctaaggttgctgcagtcaccttcctcatcttgcaggtgctgaaccaacatcatcagtttctattctaatcaggccccttcccaatctccatttctctgccaagcccatttacccccacctcatgcatcccaaggctctactgggtccctggacctaaccctgctttcatcctggtggccttaactacagtggaggtggaacttcccaggaggggaagggacagaccagccccagccgctgggccaacttccaatcattccagctagaagagcttccccctgacaccctgtgactgagcctgtgtcctgtctgcctgcccagccatgctccatcggctgtgagggcagtgcccggagaggccagagggttggagctgcagggacccgtttggacccacagcctctgttctagagatgcttgtataggctgttaattgtgatgaataaacgttcaaccctcggcctgcagccagagtagccaggccgcgcaccccaaatgtagtcccccgattttagctgcagcagctgagcagcactttgctggcttggtgtgagcctgggagggctcagacttaacggccggcagggatcccggactgggcctgaaggggagagcgtggtggtcgtcgcggagccgcctgtcctgctcccaccgaccccggtctgaccacgtccttggctgtcatggccgggggatgccgggactcctcgggctgcatcctgggaagtgtagttcctggtccgcacatggttaggaggttctcggagagagagctagtttcccggttgcgctggccaaaggccggcctgaactggatcctgcggaccgcttctcagcggcttcacccccacaccactcgaatgcacagatcgggacacctcagctgggtgacttccctcgttgcaatcggcctcgggagcggtgcggcgtgtaccgagcggcgcccctgggctcagcgcgctgcaggcgccccgggcggatccttcaccgaggcaggactggggctggcgccagagccggtgcggagcggtgttggttcaggcgctggcgacagtgctatggccacggcaggggccgcgtgcgtctcagcggtggcgccttcggaccctattggcgcccgggacttaagcggggccgccgctgctggaccaggacgaactggagaaggagacgcgggccgccacggtgacctcgggcgtagggccggcggcggcgggcacgctggtggaagcgcgggccgcggcaggggaggacatcgggccgcagagaaagtgccgatggcctggggcagcggtgcgagggtgggaaaaacgcaggatattgcatcatagagacgcggccaccttcgcccctggagagcgccagtctcaggagcgccgcaccggtcacgggtggaggtcagccaggcctccgtaagcgcggtccccttccaggagtagccttcgcctgggctcttgagtagatgccaagtaattccgcatcgtctctctagatatctgcgctaaaggccacccggtctccttatcagaggggcaaaactctcctcgtgggtcttcatacctaataaaagtcggcatcaaaccac

SEQ ID NO: 177520 - DNA, 3917 bp, Homo sapiens
  Payload ID: 14833
  Gene Symbol: RNF40
  Gene Name: ring finger protein 40, E3 ubiquitin protein ligase
  Uniprot ID: O75150
  ENST ID: ENST00000357890
  CDS Start-End: 111-2816
gaaatccaagatggcggcgctaggctgaccctcctgctggtgacggaagtaccgcctcctcccgtttgacgcccctcaggggaccctgcatcgctccagccgccgcggccatgtctgggccaggcaacaaacgcgccgccggcgacgggggctcagggcccccggaaaagaagctgagtcgtgaggagaagaccaccacgactcttatcgagcccattcgtcttggaggcatctcttccacggaggagatggacctgaaggtactacagttcaagaacaagaaactggcagagcggctggaacaacggcaggcttgtgaagatgaactccgagaacgaattgagaagttggagaagcggcaggccacagatgatgccacactcctcatcgtcaatcgctactgggcccagctggatgaaactgtggaagcccttctccgatgccatgagagccagggggagctgtcttcagcgcctgaggcacctgggacccaggaggggccaacatgtgatgggactcctctcccagagccggggacatcagagctgagagaccccttgctgatgcagctgcggccccctctcagtgagccggccttggcttttgtggtggcactgggtgccagcagcagtgaggaggtggagctggagctgcaaggccgaatggagttctccaaggcagctgtgtctcgtgtggtagaggcctcagaccgcctacagcgccgggtggaggaactctgtcagcgagtgtacagccgaggggacagtgagcccctcagtgaggcggctcaggcacacacccgagagctgggccgtgagaaccggcgactgcaggacttggccactcagctgcaggagaaacaccaccgcatctcattggagtactccgagctccaggataaagtgacatcggcagagaccaaggtgctggagatggagacaacagtggaggacttgcagtgggacatcgagaagctgcggaagcgagagcaaaagctcaataagcacctggcagaggccttagagcagcttaactctggctactatgtatctgggagctcctcaggcttccaggggggccagatcacactcagcatgcagaagagcgacgagctggggctgcagaagaagctacgcacagaggtcattcagctggaggacacgctggcccaggtacgcaaggagtatgagatgctgcgcatcgagtttgagcagaatctggcggccaacgagcaggcggggcccatcaaccgtgagatgcgccacctgattagtagtcttcaaaaccacaaccaccagctaaaaggggacgcccagcgatacaagcggaagcttcgagaagtacaagctgagattggcaagctccgggcccaggccagtggctctgcccactccacccccaacctgggccacccagaggattctggcgtcagtgccccagccccagggaaagaggagggtgggccaggccctgtcagtacccccgacaacagaaaggagatggctccagtgcctggcaccaccactactaccacttcagtgaagaaggaggagctggtcccctctgaagaggacttccagggtataacccctggggcccagggcccttcctcccggggccgagaacctgaggccaggcccaagcgggagcttcgggaacgggaaggtcccagcctaggacctccacctgtagcctccgctctctcaagggctgatcgggagaaggccaaggtggaagaaaccaagcggaaggaatcagaactcctcaagggtctccgagcagagctcaagaaggcccaggagagccagaaggagatgaaactgctgctggatatgtacaagtcagcgcccaaggagcagcgggataaggtgcagctcatggcagcggaacgcaaggctaaggccgaggttgatgagctgcggagccgcatccgggaattggaggagagggatcgaagggagagcaagaagatcgcggatgaggatgccctgcggcgcattcggcaggcagaggagcagatagaacacctgcagcgcaagctgggtgccaccaagcaggaggaggaggctctgctctcagagatggatgtgacaggtcaggcttttgaggacatgcaggaacagaacgggcggctgctacagcagttgcgggaaaaggatgatgccaactttaagctaatgtcagagcggatcaaggccaaccagattcacaagctgctgcgggaggagaaggatgagttgggcgagcaggtccttggcctcaagtcccaggtggatgcccagctgctgactgtgcagaagctagaggagaaggagcgagccttgcagggcagcctcgggggtgtggagaaggagctgacgctgcgcagccaagccctggagctcaacaagcggaaggctgtagaagccgcccagctggccgaggacctgaaggtgcagctggagcacgtgcagactcggctgcgggagatccagccctgcctggcagagagccgggctgctcgtgagaaagagagcttcaacctcaagagggctcaggaggacatctcacggctgcggcgcaagctggaaaagcagaggaaggtggaggtctacgcagatgccgacgaaatcctccaggaggagatcaaggagtacaaggcgcggttgacctgcccctgctgtaacacccgcaagaaggatgcagtccttaccaagtgcttccacgttttctgcttcgagtgcgtgcggggccgctatgaggcccgccagaggaagtgccccaagtgcaacgcggcctttggtgcccacgacttccatcgtatctacatcagctgaacctgaaactcaggggactctggaacaccatggaccctgggggctgtgcccccatctcctccccaccccaggtctagtggccccaccctccattccggaccccatgggcccagcccctgcccatctagttggtttggggaccctggtgcatgctagtgggcatgggatcagccaagcttcgttccatcttttcctaaaggtcagagctgcagcctagggggcactgccctacagaaaaggtctgcctgagaggcctgaggagcccagagcacttgactgagcttcccggaaactggccctaacctgtctgtctccgtggatgcatcctaaccctaaggaaaattccccaggctgtgatctaccctagagaaggctcgctccctgcctactggctcacaaatgaggaccagtgagccatgtccttgttccttgtttgagactgggctgcaggccccaggaagactttccttcacccaccatccccctaacctcggcagggcttctgtcctgtggagttccctggacaccttggtctggctcttgtgccaagggctgaaggaggtaccctcttggcagatgggggcatcacttgcttcctttgggaagctctaaggttgctgcagtcaccttcctcatcttgcaggtgctgaaccaacatcatcagtttctattctaatcaggccccttcccaatctccatttctctgccaagcccatttacccccacctcatgcatcccaaggctctactgggtccctggacctaaccctgctttcatcctggtggccttaactacagtggaggtggaacttcccaggaggggaagggacagaccagccccagccgctgggccaacttccaatcattccagctagaagagcttccccctgacaccctgtgactgagcctgtgtcctgtctgcctgcccagccatgctccatcggctgtgagggcagtgcccggagaggccagagggttggagctgcagggacccgtttggacccacagcctctgttctagagatgcttgtataggctgttaattgtgatgaataaacgttcaaccctcggcctgcagccagagtagccaggccgcgcacccc

SEQ ID NO: 177521 - DNA, 4063 bp, Homo sapiens
  Payload ID: 14833
  Gene Symbol: RNF40
  Gene Name: ring finger protein 40, E3 ubiquitin protein ligase
  ENST ID: ENST00000563683
  CDS Start-End: 111-2996
gaaatccaagatggcggcgctaggctgaccctcctgctggtgacggaagtaccgcctcctcccgtttgacgcccctcaggggaccctgcatcgctccagccgccgcggccatgtctgggccaggcaacaaacgcgccgccggcgacgggggctcagggcccccggaaaagaagctgagtcgtgaggagaagaccaccacgactcttatcgagcccattcgtcttggaggcatctcttccacggaggagatggacctgaaggtactacagttcaagaacaagaaactggcagagcggctggaacaacggcaggcttgtgaagatgaactccgagaacgaattgagaagttggagaagcggcaggccacagatgatgccacactcctcatcgtcaatcgctactgggcccagctggatgaaactgtggaagcccttctccgatgccatgagagccagggggagctgtcttcagcgcctgaggcacctgggacccaggaggggccaacatgtgatgggactcctctcccagagccggggacatcagagctgagagaccccttgctgatgcagctgcggccccctctcagtgagccggccttggcttttgtggtggcactgggtgccagcagcagtgaggaggtggagctggagctgcaaggccgaatggagttctccaaggcagctgtgtctcgtgtggtagaggcctcagaccgcctacagcgccgggtggaggaactctgtcagcgagtgtacagccgaggggacagtgagcccctcagtgaggcggctcaggcacacacccgagagctgggccgtgagaaccggcgactgcaggacttggccactcagctgcaggagaaacaccaccgcatctcattggagtactccgagctccaggataaagtgacatcggcagagaccaaggtgctggagatggagacaacagtggaggacttgcagtgggacatcgagaagctgcggaagcgagagcaaaagctcaataagcacctggcagaggccttagagcagcttaactctggctactatgtatctgggagctcctcaggcttccaggggggccagatcacactcagcatgcagaaggtggccctgcggagccttcctgaggaggtagtgcgggagacgggggagtaccgcatgctgcaggcccaattctcactgctctacaacgagtctctgcaagtgaagacccagctagacgaggctcggggcctgctgctggccacaaagaactcccacctgcgacacatcgagcacatggagagcgacgagctggggctgcagaagaagctacgcacagaggtcattcagctggaggacacgctggcccaggtacgcaaggagtatgagatgctgcgcatcgagtttgagcagaatctggcggccaacgagcaggcggggcccatcaaccgtgagatgcgccacctgattagtagtcttcaaaaccacaaccaccagctaaaaggggacgcccagcgatacaagcggaagcttcgagaagtacaagctgagattggcaagctccgggcccaggccagtggctctgcccactccacccccaacctgggccacccagaggattctggcgtcagtgccccagccccagggaaagaggagggtgggccaggccctgtcagtacccccgacaacagaaaggagatggctccagtgcctggcaccaccactactaccacttcagtgaagaaggaggagctggtcccctctgaagaggacttccagggtataacccctggggcccagggcccttcctcccggggccgagaacctgaggccaggcccaagcgggagcttcgggaacgggaaggtcccagcctaggacctccacctgtagcctccgctctctcaagggctgatcgggagaaggccaaggtggaagaaaccaagcggaaggaatcagaactcctcaagggtctccgagcagagctcaagaaggcccaggagagccagaaggagatgaaactgctgctggatatgtacaagtcagcgcccaaggagcagcgggataaggtgcagctcatggcagcggaacgcaaggctaaggccgaggttgatgagctgcggagccgcatccgggaattggaggagagggatcgaagggagagcaagaagatcgcggatgaggatgccctgcggcgcattcggcaggcagaggagcagatagaacacctgcagcgcaagctgggtgccaccaagcaggaggaggaggctctgctctcagagatggatgtgacaggtcaggcttttgaggacatgcaggaacagaacgggcggctgctacagcagttgcgggaaaaggatgatgccaactttaagctaatgtcagagcggatcaaggccaaccagattcacaagctgctgcgggaggagaaggatgagttgggcgagcaggtccttggcctcaagtcccaggtggatgcccagctgctgactgtgcagaagctagaggagaaggagcgagccttgcagggcagcctcgggggtgtggagaaggagctgacgctgcgcagccaagccctggagctcaacaagcggaaggctgtagaagccgcccagctggccgaggacctgaaggtgcagctggagcacgtgcagactcggctgcgggagatccagccctgcctggcagagagccgggctgctcgtgagaaagagagcttcaacctcaagagggctcaggaggacatctcacggctgcggcgcaagctggaaaagcagaggaaggtggaggtctacgcagatgccgacgaaatcctccaggaggagatcaaggagtacaaggcgcggttgacctgcccctgctgtaacacccgcaagaaggatgcagtccttaccaagtgcttccacgttttctgcttcgagtgcgtgcggggccgctatgaggcccgccagaggaagtgccccaagtgcaacgcggcctttggtgcccacgacttccatcgtatctacatcagctgaacctgaaactcaggggactctggaacaccatggaccctgggggctgtgcccccatctcctccccaccccaggtctagtggccccaccctccattccggaccccatgggcccagcccctgcccatctagttggtttggggaccctggtgcatgctagtgggcatgggatcagccaagcttcgttccatcttttcctaaaggtcagagctgcagcctagggggcactgccctacagaaaaggtctgcctgagaggcctgaggagcccagagcacttgactgagcttcccggaaactggccctaacctgtctgtctccgtggatgcatcctaaccctaaggaaaattccccaggctgtgatctaccctagagaaggctcgctccctgcctactggctcacaaatgaggaccagtgagccatgtccttgttccttgtttgagactgggctgcaggccccaggaagactttccttcacccaccatccccctaacctcggcagggcttctgtcctgtggagttccctggacaccttggtctggctcttgtgccaagggctgaaggaggtaccctcttggcagatgggggcatcacttgcttcctttgggaagctctaaggttgctgcagtcaccttcctcatcttgcaggtgctgaaccaacatcatcagtttctattctaatcaggccccttcccaatctccatttctctgccaagcccatttacccccacctcatgcatcccaaggctctactgggtccctggacctaaccctgctttcatcctggtggccttaactacagtggaggtggaacttcccaggaggggaagggacagaccagccccagccgctgggccaacttccaatcattccagctagaagagcttccccctgacaccctgtgactgagcctgtgtcctgtctgcctgcccagccatgctccatcggctgtgagggcagtgcccggagaggccagagggttggagctgcagggacccgtttggacccacagcctctgttctagagatgcttgtataggctgttaattgtgatgaataaacgttcaaccctc

SEQ ID NO: 177522 - DNA, 711 bp, Homo sapiens
  Payload ID: 14833
  Gene Symbol: RNF40
  Gene Name: ring finger protein 40, E3 ubiquitin protein ligase
  ENST ID: ENST00000563909
  CDS Start-End: 379-711
gcatctcgccgctcttccgtgccgcgaggcgccccgggctcccgccgcctaggttccaggacagccagcgctcggtcggcggctaccaaggccgggcccgttcgcctcgctccggccaatctacgcgcggagaggcgcggcggggcgaatccgtgggggcgtctccctccgtctcaacggcgacggttgccaagggggcttgtgagggaaggaaggcggaaagcgcaggctcacgccagtgggagcgaagagaacgcgcagatacgtgagaagttgcgagtgcccacctgggcgccctctcttccaggtgacggaagtaccgcctcctcccgtttgacgcccctcaggggaccctgcatcgctccagccgccgcggccatgtctgggccaggcaacaaacgcgccgccggcgacgggggctcagggcccccggaaaagaagctgagtcgtgaggagaagaccaccacgactcttatcgagcccattcgtcttggaggcatctcttccacggaggagatggacctgaaggtactacagttcaagaacaagaaactggcagagcggctggaacaacggcaggcttgtgaagatgaactccgagaacgaattgagaagttggagaagcggcaggccacagatgatgccacactcctcatcgtcaatcgctactgggcccagctggatgaaactgtggaagcccttctccgatgc

SEQ ID NO: 177523 - DNA, 586 bp, Homo sapiens
  Payload ID: 14833
  Gene Symbol: RNF40
  Gene Name: ring finger protein 40, E3 ubiquitin protein ligase
  ENST ID: ENST00000565995
  CDS Start-End: 64-586
gaaatccaagatggcggcgctaggctgaccctcctgctggtggagctggagctgcaaggccgaatggagttctccaaggcagctgtgtctcgtgtggtagaggcctcagaccgcctacagcgccgggtggaggaactctgtcagcgagtgtacagccgaggggacagtgagcccctcagtgaggcggctcaggcacacacccgagagctgggccgtgagaaccggcgactgcaggacttggccactcagctgcaggagaaacaccaccgcatctcattggagtactccgagctccaggataaagtgacatcggcagagaccaaggtgctggagatggagacaacagtggaggacttgcagtgggacatcgagaagctgcggaagcgagagcaaaagctcaataagcacctggcagaggccttagagcagcttaactctggctactatgtatctgggagctcctcaggcttccaggggggccagatcacactcagcatgcagaagtttgagatgctgaatgcagagttagaggaaaaccaggaactggccaacagccgtatggcagagctggagaaactgcaggccg

SEQ ID NO: 177524 - DNA, 569 bp, Homo sapiens
  Payload ID: 14833
  Gene Symbol: RNF40
  Gene Name: ring finger protein 40, E3 ubiquitin protein ligase
  ENST ID: ENST00000566811
  CDS Start-End: 182-569
agtggcgtccagtgacgcccagtgacgtccggtgaaatccaagatggcggcgctaggctgaccctcctgctggtgagggctctggcgccgggggggacgggatccagcaggtgacggaagtaccgcctcctcccgtttgacgcccctcaggggaccctgcatcgctccagccgccgcggccatgtctgggccaggcaacaaacgcgccgccggcgacgggggctcagggcccccggaaaagaagctgagtcgtgaggagaagaccaccacgactcttatcgagcccattcgtcttggaggcatctcttccacggaggagatggacctgaaggtactacagttcaagaacaagaaactggcagagcggctggaacaacggcaggcttgtgaagatgaactccgagaacgaattgagaagttggagaagcggcaggccacagatgatgccacactcctcatcgtcaatcgctactgggcccagctggatgaaactgtggaagcccttctccgatgccatgagagccagggggagctgtcttcagcgcctgaggcacctgggacccaggagg

SEQ ID NO: 177525 - DNA, 481 bp, Homo sapiens
  Payload ID: 14833
  Gene Symbol: RNF40
  Gene Name: ring finger protein 40, E3 ubiquitin protein ligase
  ENST ID: ENST00000565931
  CDS Start-End: 50-481
aaatccaagatggcggcgctaggctgaccctcctgctgccgccgcggccatgtctgggccaggcaacaaacgcgccgccggcgacgggggctcagggcccccggaaaagaagctgagtcgtgaggagaagaccaccacgactcttatcgagcccattcgtcttggaggcatctcttccacggaggagatggacctgaaggtactacagttcaagaacaagaaactggcagagcggctggaacaacggcaggcttgtgaagatgaactccgagaacgaattgagaagttggagaagcggcaggccacagatgatgccacactcctcatcgtcaatcgctactgggcccagctggatgaaactgtggaagcccttctccgatgccatgagagccagggggagctgtcttcagcgcctgaggcacctgggacccaggaggggccaacatgtgatgggactcctctcccagagccggggacatca

SEQ ID NO: 177526 - DNA, 991 bp, Homo sapiens
  Payload ID: 14833
  Gene Symbol: RNF40
  Gene Name: ring finger protein 40, E3 ubiquitin protein ligase
  ENST ID: ENST00000602784
  CDS Start-End: 1-45
gcggcctttggtgcccacgacttccatcgtatctacatcagctgaacctgaaactcaggggactctggaacaccatggaccctgggggctgtgcccccatctcctccccaccccaggtcagagctgcagcctagggggcactgccctacagaaaaggtctgcctgagaggcctgaggagcccagagcacttgactgagcttcccggaaactggccctaacctgtctgtctccgtggatgcatcctaaccctaaggaaaattccccaggctgtgatctaccctagagaaggctcgctccctgcctactggctcacaaatgaggaccagtgagccatgtccttgttccttgtttgagactgggctgcaggccccaggaagactttccttcacccaccatccccctaacctcggcagggcttctgtcctgtggagttccctggacaccttggtctggctcttgtgccaagggctgaaggaggtaccctcttggcagatgggggcatcacttgcttcctttgggaagctctaaggttgctgcagtcaccttcctcatcttgcaggtgctgaaccaacatcatcagtttctattctaatcaggccccttcccaatctccatttctctgccaagcccatttacccccacctcatgcatcccaaggctctactgggtccctggacctaaccctgctttcatcctggtggccttaactacagtggaggtggaacttcccaggaggggaagggacagaccagccccagccgctgggccaacttccaatcattccagctagaagagcttccccctgacaccctgtgactgagcctgtgtcctgtctgcctgcccagccatgctccatcggctgtgagggcagtgcccggagaggccagagggttggagctgcagggacccgtttggacccacagcctctgttctagagatgcttgtataggctgttaattgtgatgaataaacgttcaaccctcggcctgc

SEQ ID NO: 177527 - DNA, 597 bp, Homo sapiens
  Payload ID: 14833
  Gene Symbol: RNF40
  Gene Name: ring finger protein 40, E3 ubiquitin protein ligase
  ENST ID: ENST00000567365
  CDS Start-End: 1-534
aagctgctgcgggaggagaaggatgagttgggcgagcaggtccttggcctcaagtcccaggtggatgcccagctgctgactgtgcagaagctagaggagaaggagcgagccttgcagggcagcctcgggggtgtggagaaggagctgacgctgcgcagccaagccctggagctcaacaagcggaaggctgtagaagccgcccagctggccgaggacctgaaggtgcagctggagcacgtgcagactcggctgcgggagatccagccctgcctggcagagagccgggctgctcgtgagaaagagagcttcaacctcaagagggctcaggaggacatctcacggctgcggcgcaagctggaaaagcagaggaaggtggaggtctacgcagatgccgacgaaatcctccaggaggagatcaaggagtacaagggttatgggaggatgaggtgcagtctccagtgtggtgggcttggcctggactcctcctgctgtcagcttggggtctgggcactgtcagagttgttcccaagctgatgcctttgcctggcccaggcgcggttgacctgcccctgctgtaacacccgcaagaaggatgca

SEQ ID NO: 177528 - DNA, 5596 bp, Homo sapiens
  Payload ID: 14834
  Gene Symbol: RNF41
  Gene Name: ring finger protein 41, E3 ubiquitin protein ligase
  Uniprot ID: Q9H4P4
  ENST ID: ENST00000345093
  CDS Start-End: 371-1324
tctgaggcggcgacgagtggtaggagtcttctttcccctccttcccctttcccttcccttcccgggagaggctgggacccggcaccagggcagtactgtggccgctgcggcctcagctccgactgggtcaggttgcggagactccaggccgcttccagggcgagtactcctgattgtgacatcacattcatcccctgggcgatggagcttgtcactgggaaggaatactcagtcggagaatagccaacaagatgggttactgggagaatctcttcagtggcactgagtggaggcatcagggggttggagccttgtgaacagggaacctgccccccaacacttggaaggacctgggtttcagtgatgagacatggggtatgatgtaacccgtttccagggggatgttgacgaagatcttatctgccctatttgcagtggagtcttggaggagccagtacaggcacctcattgtgaacatgctttctgcaacgcctgcatcacccagtggttctctcagcaacagacatgtccagtggaccgtagtgttgtgacggtcgcccatctgcgcccagtacctcggatcatgcggaacatgttgtcaaagctgcagattgcctgtgacaacgctgtgttcggctgtagtgccgttgtccggcttgacaacctcatgtctcacctcagcgactgtgagcacaacccgaagcggcctgtgacctgtgaacagggctgtggcctggagatgcccaaagatgagctgcccaaccataactgcattaagcacctgcgctcagtggtacagcagcagcagacacgcatcgcagagctggagaagacgtcagctgaacacaaacaccagctggcggagcagaagcgagacatccagctgctaaaggcatacatgcgtgcaatccgcagtgtcaaccccaaccttcagaacctggaggagacaattgaatacaacgagatcctagagtgggtgaactcccttcagccagcaagagtgacccgctggggagggatgatctcgactcctgatgctgtgctccaggctgtaatcaagcgctccctggtggagagtggctgtcctgcttctattgtcaacgagctgattgaaaatgcccacgagcgtagctggccccagggtctggccacactagagactagacagatgaaccgacgctactatgagaactacgtggccaagcgcatccctggcaagcaggctgttgtcgtgatggcctgtgagaaccagcacatgggggatgacatggtgcaagagccaggccttgtcatgatatttgcgcatggcgtggaagagatataagagaactcgactggctatcaggaagagatggaaatcagaaaatcccatcactccagcagctgggacctgagtcctacccaccattcttaatactgtggcttatacctgagccacacatctccctgcccttctggcactgaagggccttggggtagtttgctcagcctttcaggtgggaaacccagatttcctccctttgccatattcccctaaaatgtctataaattatcagtctgggtgggaaagcccccacctccatccattttcctgcttagggtccctggttccagttattttcagaaagcacaaagagattcaatttccctggaggatcaggacagaggaaggaatctctaatcgtccctctcctccaaaaccagggaatcagagcagtcaggcctgttgactctaagcagcagacatcctgaagaaatggtaagggtggagccaaatctctagaaataagtagtgaggccgttaattggccatcactgatggcccttagggaaagactggacctctgtgccaagcagtatccctgttcagcccaccttaaaggtgtaggcacccactgggtctaccagtatgcaggttgggatactgaaaatttccagatgagctcttctttcctacaagttttcataattagggaatgccagggtttagggtaggggttaatctgttgggggttgatgtgtttagcaagaagctactcctagcttttgctaaaatatggttggcactgcctcttgtggcacaggccataattgttccatagacccctctctagccctgtgactgtagttagttactttgataattttctttggccattgtttgtttatatttcacaaactccacctactgcccccccccctcttttttttaagaatggcctgatcatggctatctcagccacattgttggcaatttaatttatttacttcctttttttttttttaagaaaggaaaaaagaaaaaaaaatcaaacttgaaacttttcttttgatgttcctattgtgggggttctggatagggtgggacagggatgggggtgtgttttatattttttccttttcagcacaacctttggctttaatataggaagagccaagggagtcctcggctgaacttacgatatctgccccaaacctctgtaaccccaactgaaatgaggagcttcctctcttcctgtgaaggatatgacagtccagcatcgatgcctgtgccctctggaaaaatttcctcctagcccttccagggccttatcataaaactctggatttagagtattcattttgaaggcaactcccccttccccaagtttccttggagctgtatagctgggttctaagcttcaccatgcaaatcagaaattttatctctaagtacaggctgtgccgtgtctcacccacacccccctggggacttcagttccatttcaggttacctggggtataccttgatccctagagtgactggcagagtaagagaaggggagagataataggtgtgattattttaatatggaggtgggagtgtggttggagatagaaaggctcctccccaccatgtaatggcttcctctcagaattttattccaggctagcttgctgcaggtctgggtagttggatcatggctccactgggattggggtggaaagcttgaggggagtagggttccagctctgggacattgtgctcaggaatttgaaaacgctgctatacttactctggttactacatttcttccactcccctttcccctacctgccttaaccaaggctcatactgtcctgtccttaccctcagatggagccaggaagctcagtgaaaggcttccctaccctttgcactagtgtctctgcaggttgctggttgtgttgtatgtgctgttccatggtgttgactgcactaataataaaccttttactcaactctctaaattcttcagcattactccctttcttgagaaggtttcccctctgcttttgcctttctctcaccttaattccctttcttccttactttgttacctacccttatcttagtgctaacttctctttcaggaggatgtctgggagtagtgtgcacttcacagctgctttcccatgtaccctcctgcattcttccctcctatctcctgttctgtagcagccaaagctctctagtgatctgaactgtgtgcttcccagggtctgcctttatcctaaattccatgtcttccctgagtggtcctgagtttttgggataatttctacagaagatatgtatatatctttttcctttgtcccacaagcaactttgctttagaatctagaattcctttgcaggcagagaagtctctacctcccagtgtttcctagctaagaacgtaaatgtgaggagggaaatgtacttgcagaggtttcataattatttacttataaaaatagtcttcatagccgggcgcggtggctcacgcctgtaatcccagcactttgggaggccgaggtgggtggatcacaaggtcaggagttcgagaccatcctggctaacacagtgaaaccccgtctctactaaaaatacaaaaaattagccgggcgtggtggcaggcacctgtagtcccagctacttaggaggctgaggcaggagaatggcgtgaacccgggaggcagagcttgcagtgagcagagattgggccactgcattccagcctgggcgacagagcaaggctccgtctaaaaaaaaaaaaaaaaaaaaaagtcttcataggccgggcacggtggctcacgtctgtaatcccagcactttgggaggccaaggtgggtggatcacaacgtcaggagatcgagaccatcctggctaacatggtgaaaccctgtctctactaaaaatataaataaattagccggacaggcgcctgtcctcccagctactcaggaggctgaggcaggagaatggtgtgaacctgggaggcggagcttgcagtgagctgagatcacgccactgcactccagcctgggcaacagagcaagactccgtctcaaaaaaaaaaaaaaaaaaaccagtcttcataagtatttgctgctacctttccctgtcataagaaaaaggatagccagacatggtgggacgccactatgatcccagctccttggaaggctaaggcacaagaatcgcttgaacctgggaggtggaggttgcagtgagctgagatcatgccactgcactccagcctggtgacagagcaagagcctgtctcaaaaaaaaaaaagaaaagaaaagaaaaagggatatcttttcctcctcccagaagtttgttttaaatttgagcatttatcatgcacctgatgtaaacctaatagtactcttgatactctagtggcttgaaaaaaaaaaaaaaggcatttctgtgctgagtctgcgcttctatgcacacaaggtatgtttataaaatactgataagcatgtcacagtatagagcataagaggcaatgtatgtatcctagtgacattagcagtgcttttccccccttaaactcctttaaaattacttttagaacttgctgctcattcttgtgaatgttatgaatggtgtcatattgtccttttacagaagatacgatttttagaaacaaatattcattgaatgtctgccctgtgagatactcactagagtgaacatgaggaggcttatgtagcaaaatggcacctacctgcaaagaacttagtccctaatggagatgaatatataataagggatcataaatgtgctaagtggatttactagtaatatgtgagccaaggacgataaagctcctgattctgatgggtatcaggaaaggcttttcaggaagtgttacttgttataggtcagaggtcagcaaactacaggttacaaccccactgcctgcttttgtaaaaaactttattggaatacagttatgcccacttgtttatatattgtctgtggctgctttcacattacaacagcagggttaagtagctggaacaaagcctaaaatacttggtcttttacagaaaaaaatttgccaacctgttctaaacttttaaggtcaggagaactgggggaaggagggagtagaaagaacactgtcacccagactggagtgcagtggcaccatcatatagctcactgtagcctcaaactcctgggctctagtggtcttcccacttcagcttctggagtagctggggctactgcacctggaattgtcttaatctgttttaatactagtaaaattttttttgtttcatctctttcagtga

SEQ ID NO: 177529 - DNA, 2452 bp, Homo sapiens
  Payload ID: 14834
  Gene Symbol: RNF41
  Gene Name: ring finger protein 41, E3 ubiquitin protein ligase
  Uniprot ID: Q9H4P4
  ENST ID: ENST00000394013
  CDS Start-End: 715-1455
acgagtggtaggagtcttctttcccctccttcccctttcccttcccttcccgggagaggctgggacccggcaccagggcagtactgtggccgctgcggcctcagctccgactgggtcaggttgcggagactccaggccgcttccagggcgagtactcctgattgtgacatcacattcatcccctgggcgatggagcttgtcactgggaaggaatactcagtcggagaatagccaacaagatgggttactgggagaatctcttcagtggcactgagtggaggcatcagggggttggagccttgtgaacagggaacctgccccccaacacttggaaggacctgggtttcagtgatgagacatggggtatgatgtaacccgtttccagggggatgttgacgaagatcttatctgccctatttgcagtggagtcttggaggagccagtacagaccagcttttgatacagccatgcactctgcattttgatgtgaaagctgccaccttcaataggtcatttctctgccagccttgccagaccagagtcagttgtatcatcctggggcaagtatgaggagaagctcacgattaccaggcacctcattgtgaacatgctttctgcaacgcctgcatcacccagtggttctctcagcaacagacatgtccagtggaccgtagtgttgtgacggtcgcccatctgcgcccagtacctcggatcatgcggaacatgttgtcaaagctgcagattgcctgtgacaacgctgtgttcggctgtagtgccgttgtccggcttgacaacctcatgtctcacctcagcgactgtgagcacaacccgaagcggcctgtgacctgtgaacagggctgtggcctggagatgcccaaagatgagctgcccaaccataactgcattaagcacctgcgctcagtggtacagcagcagcagacacgcatcgcagagctggagaagacgtcagctgaacacaaacaccagctggcggagcagaagcgagacatccagctgctaaaggcatacatgcgtgcaatccgcagtgtcaaccccaaccttcagaacctggaggagacaattgaatacaacgagatcctagagtgggtgaactcccttcagccagcaagagtgacccgctggggagggatgatctcgactcctgatgctgtgctccaggctgtaatcaagcgctccctggtggagagtggctgtcctgcttctattgtcaacgagctgattgaaaatgcccacgagcgtagctggccccagggtctggccacactagagactagacagatgaaccgacgctactatgagaactacgtggccaagcgcatccctggcaagcaggctgttgtcgtgatggcctgtgagaaccagcacatgggggatgacatggtgcaagagccaggccttgtcatgatatttgcgcatggcgtggaagagatataagagaactcgactggctatcaggaagagatggaaatcagaaaatcccatcactccagcagctgggacctgagtcctacccaccattcttaatactgtggcttatacctgagccacacatctccctgcccttctggcactgaagggccttggggtagtttgctcagcctttcaggtgggaaacccagatttcctccctttgccatattcccctaaaatgtctataaattatcagtctgggtgggaaagcccccacctccatccattttcctgcttagggtccctggttccagttattttcagaaagcacaaagagattcaatttccctggaggatcaggacagaggaaggaatctctaatcgtccctctcctccaaaaccagggaatcagagcagtcaggcctgttgactctaagcagcagacatcctgaagaaatggtaagggtggagccaaatctctagaaataagtagtgaggccgttaattggccatcactgatggcccttagggaaagactggacctctgtgccaagcagtatccctgttcagcccaccttaaaggtgtaggcacccactgggtctaccagtatgcaggttgggatactgaaaatttccagatgagctcttctttcctacaagttttcataattagggaatgccagggtttagggtaggggttaatctgttgggggttgatgtgtttagcaagaagctactcctagcttttgctaaaatatggttggcactgcctcttgtggcacaggccataattgttccatagacccctctctagccctgtgactgtagttagttactttgataattttctttggccattgtttgtttatatttcacaaactccacctactgcccccccccctcttttttttaagaatggcctgatcatggctatctcagccacattgttggcaatttaatttatttacttcctttttttttttttaagaaaggaaaaaagaaaaaaaaatcaaacttgaaa

SEQ ID NO: 177530 - DNA, 890 bp, Homo sapiens
  Payload ID: 14834
  Gene Symbol: RNF41
  Gene Name: ring finger protein 41, E3 ubiquitin protein ligase
  ENST ID: ENST00000549038
  CDS Start-End: 320-890
gatgtcccaggggtattggggcggggggttgaaataactggggttcaggaggagggatggtggtagagataaaaatgtgagaagggagcagcactggcgaggagtcgggagagtactcctgattgtgacatcacattcatcccctgggcgatggagcttgtcactgggaaggaatactcagtcggagaatagccaacaagatgggttactgggagaatctcttcagtggcactgagtggaggcatcagggggttggagccttgtgaacagggaacctgccccccaacacttggaaggacctgggtttcagtgatgagacatggggtatgatgtaacccgtttccagggggatgttgacgaagatcttatctgccctatttgcagtggagtcttggaggagccagtacaggcacctcattgtgaacatgctttctgcaacgcctgcatcacccagtggttctctcagcaacagacatgtccagtggaccgtagtgttgtgacggtcgcccatctgcgcccagtacctcggatcatgcggaacatgttgtcaaagctgcagattgcctgtgacaacgctgtgttcggctgtagtgccgttgtccggcttgacaacctcatgtctcacctcagcgactgtgagcacaacccgaagcggcctgtgacctgtgaacagggctgtggcctggagatgcccaaagatgagctgcccaaccataactgcattaagcacctgcgctcagtggtacagcagcagcagacacgcatcgcagagctggagaagacgtcagctgaacacaaacaccagctggcggagcagaagcgagacatccagctgctaaaggcatacatgcgtgcaatccgcagtgtcaaccccaaccttcagaacctgg

SEQ ID NO: 177531 - DNA, 1193 bp, Homo sapiens
  Payload ID: 14834
  Gene Symbol: RNF41
  Gene Name: ring finger protein 41, E3 ubiquitin protein ligase
  Uniprot ID: Q9H4P4
  ENST ID: ENST00000552656
  CDS Start-End: 240-1193
gcaaaggatccgtctgaggcggcgacgagtgagtactcctgattgtgacatcacattcatcccctgggcgatggagcttgtcactgggaaggaatactcagtcggagaatagccaacaagatgggttactgggagaatctcttcagtggcactgagtggaggcatcagggggttggagccttgtgaacagggaacctgccccccaacacttggaaggacctgggtttcagtgatgagacatggggtatgatgtaacccgtttccagggggatgttgacgaagatcttatctgccctatttgcagtggagtcttggaggagccagtacaggcacctcattgtgaacatgctttctgcaacgcctgcatcacccagtggttctctcagcaacagacatgtccagtggaccgtagtgttgtgacggtcgcccatctgcgcccagtacctcggatcatgcggaacatgttgtcaaagctgcagattgcctgtgacaacgctgtgttcggctgtagtgccgttgtccggcttgacaacctcatgtctcacctcagcgactgtgagcacaacccgaagcggcctgtgacctgtgaacagggctgtggcctggagatgcccaaagatgagctgcccaaccataactgcattaagcacctgcgctcagtggtacagcagcagcagacacgcatcgcagagctggagaagacgtcagctgaacacaaacaccagctggcggagcagaagcgagacatccagctgctaaaggcatacatgcgtgcaatccgcagtgtcaaccccaaccttcagaacctggaggagacaattgaatacaacgagatcctagagtgggtgaactcccttcagccagcaagagtgacccgctggggagggatgatctcgactcctgatgctgtgctccaggctgtaatcaagcgctccctggtggagagtggctgtcctgcttctattgtcaacgagctgattgaaaatgcccacgagcgtagctggccccagggtctggccacactagagactagacagatgaaccgacgctactatgagaactacgtggccaagcgcatccctggcaagcaggctgttgtcgtgatggcctgtgagaaccagcacatgggggatgacatggtgcaagagccaggccttgtcatgatatttgcgcatggcgtggaagagatataa

SEQ ID NO: 177532 - DNA, 716 bp, Homo sapiens
  Payload ID: 14834
  Gene Symbol: RNF41
  Gene Name: ring finger protein 41, E3 ubiquitin protein ligase
  ENST ID: ENST00000552244
  CDS Start-End: 108-713
ccggcaccagggcagtactgtggccgctgcggcctcagctccgactgggtcaggttgcggagactccaggccgcttccagggcggacctgggtttcagtgatgagacatggggtatgatgtaacccgtttccagggggatgttgacgaagatcttatctgccctatttgcagtggagtcttggaggagccagtacaggcacctcattgtgaacatgctttctgcaacgcctgcatcacccagtggttctctcagcaacagacatgtccagtggaccgtagtgttgtgacggtcgcccatctgcgcccagtacctcggatcatgcggaacatgttgtcaaagctgcagattgcctgtgacaacgctgtgttcggctgtagtgccgttgtccggcttgacaacctcatgtctcacctcagcgactgtgagcacaacccgaagcggcctgtgacctgtgaacagggctgtggcctggagatgcccaaagatgagctgcccaaccataactgcattaagcacctgcgctcagtggtacagcagcagcagacacgcatcgcagagctggagaagacgtcagctgaacacaaacaccagctggcggagcagaagcgagacatccagctgctaaaggcatacatgcgtgcaatccgcagtgtcaaccccaaccttcagaacctggaggagacaattgaatacaacgagatcctagagtgagtg

SEQ ID NO: 177533 - DNA, 796 bp, Homo sapiens
  Payload ID: 14834
  Gene Symbol: RNF41
  Gene Name: ring finger protein 41, E3 ubiquitin protein ligase
  ENST ID: ENST00000549119
  CDS Start-End: 202-387
ctgattgtgacatcacattcatcccctgggcgatggagcttgtcactgggaaggaatactcagtcggagaatagccaacaagatgggttactgggagaatctcttcagtggcactgagtggaggcatcagggggttggagccttgtgaacagggaacctgccccccaacacttggaaggacctgggtttcagtgatgagacatggggtatgatgtaacccgtttccagggggatgttgacgaagatcttatctgccctatttgcagtggagtcttggaggagccagtacaggtcatttctctgccagccttgccagaccagagtcagttgtatcatcctggggcaagtatgaggagaagctcacgattaccaggcacctcattgtgaacatgctttctgcaacgcctgcatcacccagtggttctctcagcaacagacatgtccagtggaccgtagtgttgtgacggtcgcccatctgcgcccagtacctcggatcatgcggaacatgttgtcaaagctgcagattgcctgtgacaacgctgtgttcggctgtagtgccgttgtccggcttgacaacctcatgtctcacctcagcgactgtgagcacaacccgaagcggcctgtgacctgtgaacagggctgtggcctggagatgcccaaagatgagctgcccaaccataactgcattaagcacctgcgctcagtggtacagcagcagcagacacgcatcgcagagctggagaagacgtcagctgaacacaaacaccagctggcggagcaggtaggccccaagaca

SEQ ID NO: 177534 - DNA, 2552 bp, Homo sapiens
  Payload ID: 14834
  Gene Symbol: RNF41
  Gene Name: ring finger protein 41, E3 ubiquitin protein ligase
  ENST ID: ENST00000547967
  CDS Start-End: 672-1064
cccttcccgggagaggctgggacccggcaccagggcagtactgtggccgctgcggcctcagctccgactgggtcaggttgcggagactccaggccgcttccagggcgagtactcctgattgtgacatcacattcatcccctgggcgatggagcttgtcactgggaaggaatactcagtcggagaatagccaacaagatgggttactgggagaatctcttcagtggcactgagtggaggcatcagggggttggagccttgtgaacagggaacctgccccccaacacttggaaggacctgggtttcagtgatgagacatggggtatgatgtaacccgtttccagggggatgttgacgaagatcttatctgccctatttgcagtggagtcttggaggagccagtacagaccagcttttgatacagccatgcactctgcattttgatgtgaaagctgccaccttcaataggtcatttctctgccagccttgccagaccagagtcagttgtatcatcctggggcaagtatgaggagaagctcacgattaccaggcacctcattgtgaacatgctttctgcaacgcctgcatcacccagtggttctctcagcaacagacatgtccagtggaccgtagtgttgtgacggtcgcccatctgcgcccagtacctcggatcatgcggaacatgttgtcaaagctgcagattgcctgtgacaacgctgtgttcggctgtagtgccgttgtccggcttgacaacctcatgtctcacctcagcgactgtgagcacaacccgaagcggcctgtgacctgtgaacagggctgtggcctggagatgcccaaagatgagctgcccaaccataactgcattaagcacctgcgctcagtggtacagcagcagcagacacgcatcgcagagctggagaagacgtcagctgaacacaaacaccagctggcggagcagaagcgagacatccagctgctaaaggcatacatgcgtgcaatccgcagtgtcaaccccaaccttcagaacctggaggagacaattgaatacaacgagatcctagagtagcttacaacccagagaagaggaggcagagtgcaagtccaggaaagtgatctctaaaatgcagcaaaaacaagcgaagtatacaagtgaagtctaagatctctttcagttctggagtcctatacagttcatagagtaaactgtgggtgaactcccttcagccagcaagagtgacccgctggggagggatgatctcgactcctgatgctgtgctccaggctgtaatcaagcgctccctggtggagagtggctgtcctgcttctattgtcaacgagctgattgaaaatgcccacgagcgtagctggccccagggtctggccacactagagactagacagatgaaccgacgctactatgagaactacgtggccaagcgcatccctggcaagcaggctgttgtcgtgatggcctgtgagaaccagcacatgggggatgacatggtgcaagagccaggccttgtcatgatatttgcgcatggcgtggaagagatataagagaactcgactggctatcaggaagagatggaaatcagaaaatcccatcactccagcagctgggacctgagtcctacccaccattcttaatactgtggcttatacctgagccacacatctccctgcccttctggcactgaagggccttggggtagtttgctcagcctttcaggtgggaaacccagatttcctccctttgccatattcccctaaaatgtctataaattatcagtctgggtgggaaagcccccacctccatccattttcctgcttagggtccctggttccagttattttcagaaagcacaaagagattcaatttccctggaggatcaggacagaggaaggaatctctaatcgtccctctcctccaaaaccagggaatcagagcagtcaggcctgttgactctaagcagcagacatcctgaagaaatggtaagggtggagccaaatctctagaaataagtagtgaggccgttaattggccatcactgatggcccttagggaaagactggacctctgtgccaagcagtatccctgttcagcccaccttaaaggtgtaggcacccactgggtctaccagtatgcaggttgggatactgaaaatttccagatgagctcttctttcctacaagttttcataattagggaatgccagggtttagggtaggggttaatctgttgggggttgatgtgtttagcaagaagctactcctagcttttgctaaaatatggttggcactgcctcttgtggcacaggccataattgttccatagacccctctctagccctgtgactgtagttagttactttgataattttctttggccattgtttgtttatatttcacaaactccacctactgcccccccccctcttttttttaagaatggcctgatcatggctatctcagccacattgttggcaatttaatttatttacttcctttttttttttttaagaaaggaaaaaagaaaaaaaaatcaaacttgaaa

SEQ ID NO: 177535 - DNA, 582 bp, Homo sapiens
  Payload ID: 14834
  Gene Symbol: RNF41
  Gene Name: ring finger protein 41, E3 ubiquitin protein ligase
  ENST ID: ENST00000551711
  CDS Start-End: 144-582
gtctgaggcggcgacgagtggcacctcattgtgaacatgctttctgcaacgcctgcatcacccagtggttctctcagcaacagacatgtccagtggaccgtagtgttgtgacggtcgcccatctgcgcccagtacctcggatcatgcggaacatgttgtcaaagctgcagattgcctgtgacaacgctgtgttcggctgtagtgccgttgtccggcttgacaacctcatgtctcacctcagcgactgtgagcacaacccgaagcggcctgtgacctgtgaacagggctgtggcctggagatgcccaaagatgagctgcccaaccataactgcattaagcacctgcgctcagtggtacagcagcagcagacacgcatcgcagagctggagaagacgtcagctgaacacaaacaccagctggcggagcagaagcgagacatccagctgctaaaggcatacatgcgtgcaatccgcagtgtcaaccccaaccttcagaacctggaggagacaattgaatacaacgagatcctagagtgggtgaactcccttcagccagcaagagtgacccgctggggagggatga

SEQ ID NO: 177536 - DNA, 5216 bp, Homo sapiens
  Payload ID: 14834
  Gene Symbol: RNF41
  Gene Name: ring finger protein 41, E3 ubiquitin protein ligase
  Uniprot ID: Q9H4P4
  ENST ID: ENST00000615206
  CDS Start-End: 320-1273
gatgtcccaggggtattggggcggggggttgaaataactggggttcaggaggagggatggtggtagagataaaaatgtgagaagggagcagcactggcgaggagtcgggagagtactcctgattgtgacatcacattcatcccctgggcgatggagcttgtcactgggaaggaatactcagtcggagaatagccaacaagatgggttactgggagaatctcttcagtggcactgagtggaggcatcagggggttggagccttgtgaacagggaacctgccccccaacacttggaaggacctgggtttcagtgatgagacatggggtatgatgtaacccgtttccagggggatgttgacgaagatcttatctgccctatttgcagtggagtcttggaggagccagtacaggcacctcattgtgaacatgctttctgcaacgcctgcatcacccagtggttctctcagcaacagacatgtccagtggaccgtagtgttgtgacggtcgcccatctgcgcccagtacctcggatcatgcggaacatgttgtcaaagctgcagattgcctgtgacaacgctgtgttcggctgtagtgccgttgtccggcttgacaacctcatgtctcacctcagcgactgtgagcacaacccgaagcggcctgtgacctgtgaacagggctgtggcctggagatgcccaaagatgagctgcccaaccataactgcattaagcacctgcgctcagtggtacagcagcagcagacacgcatcgcagagctggagaagacgtcagctgaacacaaacaccagctggcggagcagaagcgagacatccagctgctaaaggcatacatgcgtgcaatccgcagtgtcaaccccaaccttcagaacctggaggagacaattgaatacaacgagatcctagagtgggtgaactcccttcagccagcaagagtgacccgctggggagggatgatctcgactcctgatgctgtgctccaggctgtaatcaagcgctccctggtggagagtggctgtcctgcttctattgtcaacgagctgattgaaaatgcccacgagcgtagctggccccagggtctggccacactagagactagacagatgaaccgacgctactatgagaactacgtggccaagcgcatccctggcaagcaggctgttgtcgtgatggcctgtgagaaccagcacatgggggatgacatggtgcaagagccaggccttgtcatgatatttgcgcatggcgtggaagagatataagagaactcgactggctatcaggaagagatggaaatcagaaaatcccatcactccagcagctgggacctgagtcctacccaccattcttaatactgtggcttatacctgagccacacatctccctgcccttctggcactgaagggccttggggtagtttgctcagcctttcaggtgggaaacccagatttcctccctttgccatattcccctaaaatgtctataaattatcagtctgggtgggaaagcccccacctccatccattttcctgcttagggtccctggttccagttattttcagaaagcacaaagagattcaatttccctggaggatcaggacagaggaaggaatctctaatcgtccctctcctccaaaaccagggaatcagagcagtcaggcctgttgactctaagcagcagacatcctgaagaaatggtaagggtggagccaaatctctagaaataagtagtgaggccgttaattggccatcactgatggcccttagggaaagactggacctctgtgccaagcagtatccctgttcagcccaccttaaaggtgtaggcacccactgggtctaccagtatgcaggttgggatactgaaaatttccagatgagctcttctttcctacaagttttcataattagggaatgccagggtttagggtaggggttaatctgttgggggttgatgtgtttagcaagaagctactcctagcttttgctaaaatatggttggcactgcctcttgtggcacaggccataattgttccatagacccctctctagccctgtgactgtagttagttactttgataattttctttggccattgtttgtttatatttcacaaactccacctactgcccccccccctcttttttttaagaatggcctgatcatggctatctcagccacattgttggcaatttaatttatttacttcctttttttttttttaagaaaggaaaaaagaaaaaaaaatcaaacttgaaacttttcttttgatgttcctattgtgggggttctggatagggtgggacagggatgggggtgtgttttatattttttccttttcagcacaacctttggctttaatataggaagagccaagggagtcctcggctgaacttacgatatctgccccaaacctctgtaaccccaactgaaatgaggagcttcctctcttcctgtgaaggatatgacagtccagcatcgatgcctgtgccctctggaaaaatttcctcctagcccttccagggccttatcataaaactctggatttagagtattcattttgaaggcaactcccccttccccaagtttccttggagctgtatagctgggttctaagcttcaccatgcaaatcagaaattttatctctaagtacaggctgtgccgtgtctcacccacacccccctggggacttcagttccatttcaggttacctggggtataccttgatccctagagtgactggcagagtaagagaaggggagagataataggtgtgattattttaatatggaggtgggagtgtggttggagatagaaaggctcctccccaccatgtaatggcttcctctcagaattttattccaggctagcttgctgcaggtctgggtagttggatcatggctccactgggattggggtggaaagcttgaggggagtagggttccagctctgggacattgtgctcaggaatttgaaaacgctgctatacttactctggttactacatttcttccactcccctttcccctacctgccttaaccaaggctcatactgtcctgtccttaccctcagatggagccaggaagctcagtgaaaggcttccctaccctttgcactagtgtctctgcaggttgctggttgtgttgtatgtgctgttccatggtgttgactgcactaataataaaccttttactcaactctctaaattcttcagcattactccctttcttgagaaggtttcccctctgcttttgcctttctctcaccttaattccctttcttccttactttgttacctacccttatcttagtgctaacttctctttcaggaggatgtctgggagtagtgtgcacttcacagctgctttcccatgtaccctcctgcattcttccctcctatctcctgttctgtagcagccaaagctctctagtgatctgaactgtgtgcttcccagggtctgcctttatcctaaattccatgtcttccctgagtggtcctgagtttttgggataatttctacagaagatatgtatatatctttttcctttgtcccacaagcaactttgctttagaatctagaattcctttgcaggcagagaagtctctacctcccagtgtttcctagctaagaacgtaaatgtgaggagggaaatgtacttgcagaggtttcataattatttacttataaaaatagtcttcatagccgggcgcggtggctcacgcctgtaatcccagcactttgggaggccgaggtgggtggatcacaaggtcaggagttcgagaccatcctggctaacacagtgaaaccccgtctctactaaaaatacaaaaaattagccgggcgtggtggcaggcacctgtagtcccagctacttaggaggctgaggcaggagaatggcgtgaacccgggaggcagagcttgcagtgagcagagattgggccactgcattccagcctgggcgacagagcaaggctccgtctaaaaaaaaaaaaaaaaaaaaaagtcttcataggccgggcacggtggctcacgtctgtaatcccagcactttgggaggccaaggtgggtggatcacaacgtcaggagatcgagaccatcctggctaacatggtgaaaccctgtctctactaaaaatataaataaattagccggacaggcgcctgtcctcccagctactcaggaggctgaggcaggagaatggtgtgaacctgggaggcggagcttgcagtgagctgagatcacgccactgcactccagcctgggcaacagagcaagactccgtctcaaaaaaaaaaaaaaaaaaaccagtcttcataagtatttgctgctacctttccctgtcataagaaaaaggatagccagacatggtgggacgccactatgatcccagctccttggaaggctaaggcacaagaatcgcttgaacctgggaggtggaggttgcagtgagctgagatcatgccactgcactccagcctggtgacagagcaagagcctgtctcaaaaaaaaaaaagaaaagaaaagaaaaagggatatcttttcctcctcccagaagtttgttttaaatttgagcatttatcatgcacctgatgtaaacctaatagtactcttgatactctagtggcttgaaaaaaaaaaaaaaggcatttctgtgctgagtctgcgcttctatgcacacaaggtatgtttataaaatactgataagcatgtcacagtatagagcataagaggcaatgtatgtatcctagtgacattagcagtgcttttccccccttaaactcctttaaaattacttttagaacttgctgctcattcttgtgaatgttatgaatggtgtcatattgtccttttacagaagatacgatttttagaaacaaatattcattgaatgtctgccctgtgagatactcactagagtgaacatgaggaggcttatgtagcaaaatggcacctacctgcaaagaacttagtccctaatggagatgaatatataataagggatcataaatgtgctaagtggatttactagtaatatgtgagccaaggacgataaagctcctgattctgatgggtatcaggaaaggcttttcaggaagtgttacttgttataggtcagaggtcagcaaactacaggttacaaccccactgcctgcttttgtaaaaaactttattggaatacagttatgcccacttgtttata

SEQ ID NO: 177537 - DNA, 5516 bp, Homo sapiens
  Payload ID: 14835
  Gene Symbol: RNF43
  Gene Name: ring finger protein 43
  Uniprot ID: Q68DV7
  ENST ID: ENST00000407977
  CDS Start-End: 722-3073
atatgctgtttggagaaaaaaagaacttttgttagcaaggaggtttcagaaatgattttggattttctgtaagtgtttaatttagttctaggggacagcatctctcatcccggagtaaatttctgcctttgacctgcatggattattttttcaggctgcggaatttctcggcacctacctgtagtatggggcacttggtttggttgcagagtaagaaggtggaagaatgagctgtacttggttaagcagttgaaaccttttttgagcaggatctgtaaaagcataattgaatttgtttcacccccgtggattccagtgggcccgacagcgcaacagtgcctggcaacttgatgcatatggaagagcaatgccaagtgatctgacataatacaaattcacgaagtgacattcaatcacaagcaaagttggaaattccaaagagaagtggtgagatctttactagtcacagtgaagatgggagaaaatgacatacctgcagcagatgtgggctgaaaatatcctcttctctgcccaatcaggaatgctacctgtttttgggaataaactttagagaaaggaagggccaaaactacgacttggctttctgaaacggaagcataaatgttcttttcctccatttgtctggatctgagaacctgcatttggtattagctagtggaagcagtatgtatggttgaagtgcattgctgcagctggtagcatgagtggtggccaccagctgcagctggctgccctctggccctggctgctgatggctaccctgcaggcaggctttggacgcacaggactggtactggcagcagcggtggagtctgaaagatcagcagaacagaaagctattatcagagtgatccccttgaaaatggaccccacaggaaaactgaatctcactttggaaggtgtgtttgctggtgttgctgaaataactccagcagaaggaaaattaatgcagtcccacccgctgtacctgtgcaatgccagtgatgacgacaatctggagcctggattcatcagcatcgtcaagctggagagtcctcgacgggccccccgcccctgcctgtcactggctagcaaggctcggatggcgggtgagcgaggagccagtgctgtcctctttgacatcactgaggatcgagctgctgctgagcagctgcagcagccgctggggctgacctggccagtggtgttgatctggggtaatgacgctgagaagctgatggagtttgtgtacaagaaccaaaaggcccatgtgaggattgagctgaaggagcccccggcctggccagattatgatgtgtggatcctaatgacagtggtgggcaccatctttgtgatcatcctggcttcggtgctgcgcatccggtgccgcccccgccacagcaggccggatccgcttcagcagagaacagcctgggccatcagccagctggccaccaggaggtaccaggccagctgcaggcaggcccggggtgagtggccagactcagggagcagctgcagctcagcccctgtgtgtgccatctgtctggaggagttctctgaggggcaggagctacgggtcatttcctgcctccatgagttccatcgtaactgtgtggacccctggttacatcagcatcggacttgccccctctgcatgttcaacatcacagagggagattcattttcccagtccctgggaccctctcgatcttaccaagaaccaggtcgaagactccacctcattcgccagcatcccggccatgcccactaccacctccctgctgcctacctgttgggcccttcccggagtgcagtggctcggcccccacgacctggtcccttcctgccatcccaggagccaggcatgggccctcggcatcaccgcttccccagagctgcacatccccgggctccaggagagcagcagcgcctggcaggagcccagcacccctatgcacaaggctggggactgagccacctccaatccacctcacagcaccctgctgcttgcccagtgcccctacgccgggccaggccccctgacagcagtggatctggagaaagctattgcacagaacgcagtgggtacctggcagatgggccagccagtgactccagctcagggccctgtcatggctcttccagtgactctgtggtcaactgcacggacatcagcctacagggggtccatggcagcagttctactttctgcagctccctaagcagtgactttgaccccctagtgtactgcagccctaaaggggatccccagcgagtggacatgcagcctagtgtgacctctcggcctcgttccttggactcggtggtgcccacaggggaaacccaggtttccagccatgtccactaccaccgccaccggcaccaccactacaaaaagcggttccagtggcatggcaggaagcctggcccagaaaccggagtcccccagtccaggcctcctattcctcggacacagccccagccagagccaccttctcctgatcagcaagtcaccagatccaactcagcagccccttcggggcggctctctaacccacagtgccccagggccctccctgagccagcccctggcccagttgacgcctccagcatctgccccagtaccagcagtctgttcaacttgcaaaaatccagcctctctgcccgacacccacagaggaaaaggcgggggggtccctccgagcccacccctggctctcggccccaggatgcaactgtgcacccagcttgccagatttttccccattacacccccagtgtggcatatccttggtccccagaggcacaccccttgatctgtggacctccaggcctggacaagaggctgctaccagaaaccccaggcccctgttactcaaattcacagccagtgtggttgtgcctgactcctcgccagcccctggaaccacatccacctggggaggggccttctgaatggagttctgacaccgcagagggcaggccatgcccttatccgcactgccaggtgctgtcggcccagcctggctcagaggaggaactcgaggagctgtgtgaacaggctgtgtgagatgttcaggcctagctccaaccaagagtgtgctccagatgtgtttgggccctacctggcacagagtcctgctcctgggaaaggaaaggaccacagcaaacaccattctttttgccgtacttcctagaagcactggaagaggactggtgatggtggagggtgagagggtgccgtttcctgctccagctccagaccttgtctgcagaaaacatctgcagtgcagcaaatccatgtccagccaggcaaccagctgctgcctgtggcgtgtgtgggctggatcccttgaaggctgagtttttgagggcagaaagctagctatgggtagccaggtgttacaaaggtgctgctccttctccaacccctacttggtttccctcaccccaagcctcatgttcataccagccagtgggttcagcagaacgcatgacaccttatcacctccctccttgggtgagctctgaacaccagctttggcccctccacagtaaggctgctacatcaggggcaaccctggctctatcattttccttttttgccaaaaggaccagtagcataggtgagccctgagcactaaaaggaggggtccctgaagctttcccactatagtgtggagttctgtccctgaggtgggtacagcagccttggttcctctgggggttgagaataagaatagtggggagggaaaaactcctccttgaagatttcctgtctcagagtcccagagaggtagaaaggaggaatttctgctggactttatctgggcagaggaaggatggaatgaaggtagaaaaggcagaattacagctgagcggggacaacaaagagttcttctctgggaaaagttttgtcttagagcaaggatggaaaatggggacaacaaaggaaaagcaaagtgtgacccttgggtttggacagcccagaggcccagctccccagtataagccatacaggccagggacccacaggagagtggattagagcacaagtctggcctcactgagtggacaagagctgatgggcctcatcagggtgacattcaccccagggcagcctgaccactcttggcccctcaggcattatcccatttggaatgtgaatgtggtggcaaagtgggcagaggaccccacctgggaacctttttccctcagttagtggggagactagcacctaggtacccacatgggtatttatatctgaaccagacagacgcttgaatcaggcactatgttaagaaatatatttatttgctaatatatttatccacaaatgtggtctggtcttgtggttttgttctgtcgtgactgtcactcagggtaacaacgtcatctctttctacatcaagagaagtaaattatttatgttatcagaggctaggctccgattcatgaaaggatagggtagagtagagggcttggcaataagaactggtttgtaagcccctaaaagtgtggcttagtgagatcagggaaggagaaagcatgactggattcttactgtgcttcagtcattattattatactgttcacttcacacattatcatacttcagtgactcagaccttgggcaaatactctgtgcctcgctttttcagtccataaaatgggcctacttaatagttgttgcaggacttacatgagataatagagtgtagaaaatatgttccaaagtggaaagttttattcagtgatagaaaacatccaaacctgtcacagagcccatctgaacacagcatgggaccgccaacaagaagaaagcccgcccggaagcagctcaatcaggaggctgggctggaatgacagcgcagcggggcctgaaactatttatatcccaaagctcctctcagataaacacaaatgactgcgttctgcctgcactcgggctattgcgaggacagagagctggtgctccattggcgtgaagtctccagggccagaaggggcctttgtcgcttcctcacaaggcacaagttccccttctgcttccccgagaaaggtttggtaggggtggtggtttagtgcctatagaacaaggcatttcgcttcctagacggtgaaatgaaagggaaaaaaaggacacctaatctcctacaaatggtctttagtaaaggaaccgtgtctaagcgctaagaactgcgcaaagtataaattatcagccggaacgagcaaacagacggagttttaaaagataaatacgcatttttttccgccgtagctcccaggccagcattcctgtgggaagcaagtggaaaccctatagcgctctcgcagttaggaaggaggggtggggctgtccctggatttcttctcggtctctgcagagacaatccagagggagacagtggattcactgcccccaatgcttctaaaacggggagacaaaacaaaaaaaaacaaacttcgggttaccatcggggaacaggaccgacgcccagggccaccagccc

SEQ ID NO: 177538 - DNA, 2610 bp, Homo sapiens
  Payload ID: 14835
  Gene Symbol: RNF43
  Gene Name: ring finger protein 43
  ENST ID: ENST00000581868
  CDS Start-End: 199-2427
aggatctgtaaaagcataattgaatttgtttcacccccgtggattccagtgggcccgacagcgcaacagtcccacccgctgtacctgtgcaatgccagtgatgacgacaatctggagcctggattcatcagcatcgtcaagctggagagtcctcgacgggccccccgcccctgcctgtcactggctagcaaggctcggatggcgggtgagcgaggagccagtgctgtcctctttgacatcactgaggatcgagctgctgctgagcagctgcagcagccgctggggctgacctggccagtggtgttgatctggggtaatgacgctgagaagctgatggagtttgtgtacaagaaccaaaaggcccatgtgaggattgagctgaaggagcccccggcctggccagattatgatgtgtggatcctaatgacagtggtgggcaccatctttgtgatcatcctggcttcggtgctgcgcatccggtgccgcccccgccacagcaggccggatccgcttcagcagagaacagcctgggccatcagccagctggccaccaggaggtaccaggccagctgcaggcaggcccggggtgagtggccagactcagggagcagctgcagctcagcccctgtgtgtgccatctgtctggaggagttctctgaggggcaggagctacgggtcatttcctgcctccatgagttccatcgtaactgtgtggacccctggttacatcagcatcggacttgccccctctgcatgttcaacatcacagagggagattcattttcccagtccctgggaccctctcgatcttaccaagaaccaggtcgaagactccacctcattcgccagcatcccggccatgcccactaccacctccctgctgcctacctgttgggcccttcccggagtgcagtggctcggcccccacgacctggtcccttcctgccatcccaggagccaggcatgggccctcggcatcaccgcttccccagagctgcacatccccgggctccaggagagcagcagcgcctggcaggagcccagcacccctatgcacaaggctggggactgagccacctccaatccacctcacagcaccctgctgcttgcccagtgcccctacgccgggccaggccccctgacagcagtggatctggagaaagctattgcacagaacgcagtgggtacctggcagatgggccagccagtgactccagctcagggccctgtcatggctcttccagtgactctgtggtcaactgcacggacatcagcctacagggggtccatggcagcagttctactttctgcagctccctaagcagtgactttgaccccctagtgtactgcagccctaaaggggatccccagcgagtggacatgcagcctagtgtgacctctcggcctcgttccttggactcggtggtgcccacaggggaaacccaggtttccagccatgtccactaccaccgccaccggcaccaccactacaaaaagcggttccagtggcatggcaggaagcctggcccagaaaccggagtcccccagtccaggcctcctattcctcggacacagccccagccagagccaccttctcctgatcagcaagtcaccagatccaactcagcagccccttcggggcggctctctaacccacagtgccccagggccctccctgagccagcccctggcccagttgacgcctccagcatctgccccagtaccagcagtctgttcaacttgcaaaaatccagcctctctgcccgacacccacagaggaaaaggcgggggggtccctccgagcccacccctggctctcggccccaggatgcaactgtgcacccagcttgccagatttttccccattacacccccagtgtggcatatccttggtccccagaggcacaccccttgatctgtggacctccaggcctggacaagaggctgctaccagaaaccccaggcccctgttactcaaattcacagccagtgtggttgtgcctgactcctcgccagcccctggaaccacatccacctggggaggggccttctgaatggagttctgacaccgcagagggcaggccatgcccttatccgcactgccaggtgctgtcggcccagcctggtgagttttcagagggaagtgggtgtggtagggagaggagactacagctgaatatttcaggacaggtgaagtcagccaacaaagggttgatggaagctgagaaggatacagcagagatgacaaccaaaatacttaaccatcgggacagcgtatcatgctggctagagtgcaggaacaccccacctctgccaggtgctacccctttagttggcagatcacagggaggtcccagggaggtgctggtgtggctgaggcatcagaaaggcacttggaaggccgggtgtgatggctcatgcctgtaatcccagaactttgggaggcctaggtgggtggatcccttgaggccaggagttcaagaccaacctggccaacatggtgaaaccctatctctactaaaaatacaaaaattagccgggtatggtggcgggcacttataatcccagctactcaggaggctgaggcaggagaatcgcgtgaacctaaga

SEQ ID NO: 177539 - DNA, 3560 bp, Homo sapiens
  Payload ID: 14835
  Gene Symbol: RNF43
  Gene Name: ring finger protein 43
  Uniprot ID: Q68DV7
  ENST ID: ENST00000583753
  CDS Start-End: 65-2293
tgcatttggtattagctagtggaagcagtatgtatggttgaagtgcattgctgcagctggtagcatgagtggtggccaccagctgcagctggctgccctctggccctggctgctgatggctaccctgcaggcaggctttggacgcacaggactggtactggcagcagcggtggagtctgaaagatcagcagaacagaaagctattatcagagtgatccccttgaaaatggaccccacaggaaaactgaatctcactttggaaggtgtgtttgctggtgttgctgaaataactccagcagaaggaaaattaatgcaggctcggatggcgggtgagcgaggagccagtgctgtcctctttgacatcactgaggatcgagctgctgctgagcagctgcagcagccgctggggctgacctggccagtggtgttgatctggggtaatgacgctgagaagctgatggagtttgtgtacaagaaccaaaaggcccatgtgaggattgagctgaaggagcccccggcctggccagattatgatgtgtggatcctaatgacagtggtgggcaccatctttgtgatcatcctggcttcggtgctgcgcatccggtgccgcccccgccacagcaggccggatccgcttcagcagagaacagcctgggccatcagccagctggccaccaggaggtaccaggccagctgcaggcaggcccggggtgagtggccagactcagggagcagctgcagctcagcccctgtgtgtgccatctgtctggaggagttctctgaggggcaggagctacgggtcatttcctgcctccatgagttccatcgtaactgtgtggacccctggttacatcagcatcggacttgccccctctgcatgttcaacatcacagagggagattcattttcccagtccctgggaccctctcgatcttaccaagaaccaggtcgaagactccacctcattcgccagcatcccggccatgcccactaccacctccctgctgcctacctgttgggcccttcccggagtgcagtggctcggcccccacgacctggtcccttcctgccatcccaggagccaggcatgggccctcggcatcaccgcttccccagagctgcacatccccgggctccaggagagcagcagcgcctggcaggagcccagcacccctatgcacaaggctggggactgagccacctccaatccacctcacagcaccctgctgcttgcccagtgcccctacgccgggccaggccccctgacagcagtggatctggagaaagctattgcacagaacgcagtgggtacctggcagatgggccagccagtgactccagctcagggccctgtcatggctcttccagtgactctgtggtcaactgcacggacatcagcctacagggggtccatggcagcagttctactttctgcagctccctaagcagtgactttgaccccctagtgtactgcagccctaaaggggatccccagcgagtggacatgcagcctagtgtgacctctcggcctcgttccttggactcggtggtgcccacaggggaaacccaggtttccagccatgtccactaccaccgccaccggcaccaccactacaaaaagcggttccagtggcatggcaggaagcctggcccagaaaccggagtcccccagtccaggcctcctattcctcggacacagccccagccagagccaccttctcctgatcagcaagtcaccagatccaactcagcagccccttcggggcggctctctaacccacagtgccccagggccctccctgagccagcccctggcccagttgacgcctccagcatctgccccagtaccagcagtctgttcaacttgcaaaaatccagcctctctgcccgacacccacagaggaaaaggcgggggggtccctccgagcccacccctggctctcggccccaggatgcaactgtgcacccagcttgccagatttttccccattacacccccagtgtggcatatccttggtccccagaggcacaccccttgatctgtggacctccaggcctggacaagaggctgctaccagaaaccccaggcccctgttactcaaattcacagccagtgtggttgtgcctgactcctcgccagcccctggaaccacatccacctggggaggggccttctgaatggagttctgacaccgcagagggcaggccatgcccttatccgcactgccaggtgctgtcggcccagcctggctcagaggaggaactcgaggagctgtgtgaacaggctgtgtgagatgttcaggcctagctccaaccaagagtgtgctccagatgtgtttgggccctacctggcacagagtcctgctcctgggaaaggaaaggaccacagcaaacaccattctttttgccgtacttcctagaagcactggaagaggactggtgatggtggagggtgagagggtgccgtttcctgctccagctccagaccttgtctgcagaaaacatctgcagtgcagcaaatccatgtccagccaggcaaccagctgctgcctgtggcgtgtgtgggctggatcccttgaaggctgagtttttgagggcagaaagctagctatgggtagccaggtgttacaaaggtgctgctccttctccaacccctacttggtttccctcaccccaagcctcatgttcataccagccagtgggttcagcagaacgcatgacaccttatcacctccctccttgggtgagctctgaacaccagctttggcccctccacagtaaggctgctacatcaggggcaaccctggctctatcattttccttttttgccaaaaggaccagtagcataggtgagccctgagcactaaaaggaggggtccctgaagctttcccactatagtgtggagttctgtccctgaggtgggtacagcagccttggttcctctgggggttgagaataagaatagtggggagggaaaaactcctccttgaagatttcctgtctcagagtcccagagaggtagaaaggaggaatttctgctggactttatctgggcagaggaaggatggaatgaaggtagaaaaggcagaattacagctgagcggggacaacaaagagttcttctctgggaaaagttttgtcttagagcaaggatggaaaatggggacaacaaaggaaaagcaaagtgtgacccttgggtttggacagcccagaggcccagctccccagtataagccatacaggccagggacccacaggagagtggattagagcacaagtctggcctcactgagtggacaagagctgatgggcctcatcagggtgacattcaccccagggcagcctgaccactcttggcccctcaggcattatcccatttggaatgtgaatgtggtggcaaagtgggcagaggaccccacctgggaacctttttccctcagttagtggggagactagcacctaggtacccacatgggtatttatatctgaaccagacagacgcttgaatcaggcactatgttaagaaatatatttatttgctaatatatttatccacaaa

SEQ ID NO: 177540 - DNA, 4367 bp, Homo sapiens
  Payload ID: 14835
  Gene Symbol: RNF43
  Gene Name: ring finger protein 43
  Uniprot ID: Q68DV7
  ENST ID: ENST00000577716
  CDS Start-End: 749-3100
ggagtcagagctagaacaccaattacaaaccacaggcttcctgctctagggagttgatccagaattgtctttctgaaaggaagcactcggaatccttccgaactttccaagtccatccatgattcagagatactgccttctctctctctgggattttatgtgtttctgatagtgaattgttgatgtatttgctactttgcttcttttctctttcaagacttgatcattttatatgctgtttggagaaaaaaagaacttttgttagcaaggaggtttcagaaatgattttggattttctgtaagtgtttaatttagttctaggggacagcatctctcatcccggagtaaatttctgcctttgacctgcatggattattttttcaggctgcggaatttctcggcacctacctgtagtatggggcacttggtttggttgcagagtaagaaggtggaagaatgagctgtacttggttaagcagttgaaaccttttttgagcaggatctgtaaaagcataattgaatttgtttcacccccgtggattccagtgggcccgacagcgcaacaggaatgctacctgtttttgggaataaactttagagaaaggaagggccaaaactacgacttggctttctgaaacggaagcataaatgttcttttcctccatttgtctggatctgagaacctgcatttggtattagctagtggaagcagtatgtatggttgaagtgcattgctgcagctggtagcatgagtggtggccaccagctgcagctggctgccctctggccctggctgctgatggctaccctgcaggcaggctttggacgcacaggactggtactggcagcagcggtggagtctgaaagatcagcagaacagaaagctattatcagagtgatccccttgaaaatggaccccacaggaaaactgaatctcactttggaaggtgtgtttgctggtgttgctgaaataactccagcagaaggaaaattaatgcagtcccacccgctgtacctgtgcaatgccagtgatgacgacaatctggagcctggattcatcagcatcgtcaagctggagagtcctcgacgggccccccgcccctgcctgtcactggctagcaaggctcggatggcgggtgagcgaggagccagtgctgtcctctttgacatcactgaggatcgagctgctgctgagcagctgcagcagccgctggggctgacctggccagtggtgttgatctggggtaatgacgctgagaagctgatggagtttgtgtacaagaaccaaaaggcccatgtgaggattgagctgaaggagcccccggcctggccagattatgatgtgtggatcctaatgacagtggtgggcaccatctttgtgatcatcctggcttcggtgctgcgcatccggtgccgcccccgccacagcaggccggatccgcttcagcagagaacagcctgggccatcagccagctggccaccaggaggtaccaggccagctgcaggcaggcccggggtgagtggccagactcagggagcagctgcagctcagcccctgtgtgtgccatctgtctggaggagttctctgaggggcaggagctacgggtcatttcctgcctccatgagttccatcgtaactgtgtggacccctggttacatcagcatcggacttgccccctctgcatgttcaacatcacagagggagattcattttcccagtccctgggaccctctcgatcttaccaagaaccaggtcgaagactccacctcattcgccagcatcccggccatgcccactaccacctccctgctgcctacctgttgggcccttcccggagtgcagtggctcggcccccacgacctggtcccttcctgccatcccaggagccaggcatgggccctcggcatcaccgcttccccagagctgcacatccccgggctccaggagagcagcagcgcctggcaggagcccagcacccctatgcacaaggctggggactgagccacctccaatccacctcacagcaccctgctgcttgcccagtgcccctacgccgggccaggccccctgacagcagtggatctggagaaagctattgcacagaacgcagtgggtacctggcagatgggccagccagtgactccagctcagggccctgtcatggctcttccagtgactctgtggtcaactgcacggacatcagcctacagggggtccatggcagcagttctactttctgcagctccctaagcagtgactttgaccccctagtgtactgcagccctaaaggggatccccagcgagtggacatgcagcctagtgtgacctctcggcctcgttccttggactcggtggtgcccacaggggaaacccaggtttccagccatgtccactaccaccgccaccggcaccaccactacaaaaagcggttccagtggcatggcaggaagcctggcccagaaaccggagtcccccagtccaggcctcctattcctcggacacagccccagccagagccaccttctcctgatcagcaagtcaccagatccaactcagcagccccttcggggcggctctctaacccacagtgccccagggccctccctgagccagcccctggcccagttgacgcctccagcatctgccccagtaccagcagtctgttcaacttgcaaaaatccagcctctctgcccgacacccacagaggaaaaggcgggggggtccctccgagcccacccctggctctcggccccaggatgcaactgtgcacccagcttgccagatttttccccattacacccccagtgtggcatatccttggtccccagaggcacaccccttgatctgtggacctccaggcctggacaagaggctgctaccagaaaccccaggcccctgttactcaaattcacagccagtgtggttgtgcctgactcctcgccagcccctggaaccacatccacctggggaggggccttctgaatggagttctgacaccgcagagggcaggccatgcccttatccgcactgccaggtgctgtcggcccagcctggctcagaggaggaactcgaggagctgtgtgaacaggctgtgtgagatgttcaggcctagctccaaccaagagtgtgctccagatgtgtttgggccctacctggcacagagtcctgctcctgggaaaggaaaggaccacagcaaacaccattctttttgccgtacttcctagaagcactggaagaggactggtgatggtggagggtgagagggtgccgtttcctgctccagctccagaccttgtctgcagaaaacatctgcagtgcagcaaatccatgtccagccaggcaaccagctgctgcctgtggcgtgtgtgggctggatcccttgaaggctgagtttttgagggcagaaagctagctatgggtagccaggtgttacaaaggtgctgctccttctccaacccctacttggtttccctcaccccaagcctcatgttcataccagccagtgggttcagcagaacgcatgacaccttatcacctccctccttgggtgagctctgaacaccagctttggcccctccacagtaaggctgctacatcaggggcaaccctggctctatcattttccttttttgccaaaaggaccagtagcataggtgagccctgagcactaaaaggaggggtccctgaagctttcccactatagtgtggagttctgtccctgaggtgggtacagcagccttggttcctctgggggttgagaataagaatagtggggagggaaaaactcctccttgaagatttcctgtctcagagtcccagagaggtagaaaggaggaatttctgctggactttatctgggcagaggaaggatggaatgaaggtagaaaaggcagaattacagctgagcggggacaacaaagagttcttctctgggaaaagttttgtcttagagcaaggatggaaaatggggacaacaaaggaaaagcaaagtgtgacccttgggtttggacagcccagaggcccagctccccagtataagccatacaggccagggacccacaggagagtggattagagcacaagtctggcctcactgagtggacaagagctgatgggcctcatcagggtgacattcaccccagggcagcctgaccactcttggcccctcaggcattatcccatttggaatgtgaatgtggtggcaaagtgggcagaggaccccacctgggaacctttttccctcagttagtggggagactagcacctaggtacccacatgggtatttatatctgaaccagacagacgcttgaatcaggcactatgttaagaaatatatttatttgctaatatatttatccacaaa

SEQ ID NO: 177541 - DNA, 5575 bp, Homo sapiens
  Payload ID: 14835
  Gene Symbol: RNF43
  Gene Name: ring finger protein 43
  Uniprot ID: Q68DV7
  ENST ID: ENST00000584437
  CDS Start-End: 1957-4308
ggagttgatccagaattgtctttctgaaaggaagcactcggaatccttccgaactttccaagtccatccatgattcagagatactgccttctctctctctgggattttatgtgtttctgatagtgaattgttgatgtatttgctactttgcttcttttctctttcaagacttgatcattttatatgctgtttggagaaaaaaagaacttttgttagcaaggaggtttcagaaatgattttggattttctgtaagtgtttaatttagttctaggggacagcatctctcatcccggagtaaatttctgcctttgacctgcatggattattttttcaggctgcggaatttctcggcacctacctgtagtatggggcacttggtttggttgcagagtaagaaggtggaagaatgagctgtacttggttaagcagttgaaaccttttttgagcaggatctgtaaaagcataattgaatttgtttcacccccgtggattccagtgggcccgacagcgcaacaggtttgcagatttcttttgaaattcctttttcccccctccctctgcctcagcaaaagaaaagaatccatataacaggttcatgttcaattgcttggcttttcagcacttattctgaagactttataatatttttaaacttgaccttggaacacagagggctttgtgggtgaggtgtatttatatttacttaagggtgcacattttaaaaatcttattctgtgtttgtacaaagacgcaaattttcatagtgcctagaaatagcacagatctattctactcaagattatttgtattttttcagggtattctacctagagcctgtggttaatcgcctccctgctccccctaccttttattccctaccccctcagggaatttggatacatgtgaggaatagtcctttgtttttcttatgaacctagaaaattacagatcataaaatctggatattaaagtagtttccaaaagcatctcatgggaaatcaaagtgctcggcatttccgagctggagaataaaatcaagaatccttaagagagaaaagaaaatggagatggaaatatgaattttaactgggaaaaataattggaaagctaaccttttcaaatactctaattatgaaagttggaaaaggttgtgatgctcaggattatcctgtaatgtgtgaagatacataaattagcacctaatttataggcaaattttggtaaaacacaaaaaattatggtatgtctaagttcatgaaaagtatgtaaatgcagtgggcctagaaacctggccacactgaaatacagtttaatgtggaaacttttctaaatacatattgtagcatctttggacatcaacgtgtggcctgaaatttttattattgttccctcttctcctccattaaaaaaaaaatctccttgtggtatttagtcatttaccattaacacatattatggcttaaaaagggccatcccttccttttctgagctggagttcttcacgctcacctttgatgcatggccttagctgtttactttgccttgttttgttcatgaacattgggtttagtgcctggcaacttgatgcatatggaagagcaatgccaagtgatctgacataatacaaattcacgaagtgacattcaatcacaagcaaagttggaaattccaaagagaagtggtgagatctttactagtcacagtgaagatgggagaaaatgacatacctgcagcagatgtgggctgaaaatatcctcttctctgcccaatcaggaatgctacctgtttttgggaataaactttagagaaaggaagggccaaaactacgacttggctttctgaaacggaagcataaatgttcttttcctccatttgtctggatctgagaacctgcatttggtattagctagtggaagcagtatgtatggttgaagtgcattgctgcagctggtagcatgagtggtggccaccagctgcagctggctgccctctggccctggctgctgatggctaccctgcaggcaggctttggacgcacaggactggtactggcagcagcggtggagtctgaaagatcagcagaacagaaagctattatcagagtgatccccttgaaaatggaccccacaggaaaactgaatctcactttggaaggtgtgtttgctggtgttgctgaaataactccagcagaaggaaaattaatgcagtcccacccgctgtacctgtgcaatgccagtgatgacgacaatctggagcctggattcatcagcatcgtcaagctggagagtcctcgacgggccccccgcccctgcctgtcactggctagcaaggctcggatggcgggtgagcgaggagccagtgctgtcctctttgacatcactgaggatcgagctgctgctgagcagctgcagcagccgctggggctgacctggccagtggtgttgatctggggtaatgacgctgagaagctgatggagtttgtgtacaagaaccaaaaggcccatgtgaggattgagctgaaggagcccccggcctggccagattatgatgtgtggatcctaatgacagtggtgggcaccatctttgtgatcatcctggcttcggtgctgcgcatccggtgccgcccccgccacagcaggccggatccgcttcagcagagaacagcctgggccatcagccagctggccaccaggaggtaccaggccagctgcaggcaggcccggggtgagtggccagactcagggagcagctgcagctcagcccctgtgtgtgccatctgtctggaggagttctctgaggggcaggagctacgggtcatttcctgcctccatgagttccatcgtaactgtgtggacccctggttacatcagcatcggacttgccccctctgcatgttcaacatcacagagggagattcattttcccagtccctgggaccctctcgatcttaccaagaaccaggtcgaagactccacctcattcgccagcatcccggccatgcccactaccacctccctgctgcctacctgttgggcccttcccggagtgcagtggctcggcccccacgacctggtcccttcctgccatcccaggagccaggcatgggccctcggcatcaccgcttccccagagctgcacatccccgggctccaggagagcagcagcgcctggcaggagcccagcacccctatgcacaaggctggggactgagccacctccaatccacctcacagcaccctgctgcttgcccagtgcccctacgccgggccaggccccctgacagcagtggatctggagaaagctattgcacagaacgcagtgggtacctggcagatgggccagccagtgactccagctcagggccctgtcatggctcttccagtgactctgtggtcaactgcacggacatcagcctacagggggtccatggcagcagttctactttctgcagctccctaagcagtgactttgaccccctagtgtactgcagccctaaaggggatccccagcgagtggacatgcagcctagtgtgacctctcggcctcgttccttggactcggtggtgcccacaggggaaacccaggtttccagccatgtccactaccaccgccaccggcaccaccactacaaaaagcggttccagtggcatggcaggaagcctggcccagaaaccggagtcccccagtccaggcctcctattcctcggacacagccccagccagagccaccttctcctgatcagcaagtcaccagatccaactcagcagccccttcggggcggctctctaacccacagtgccccagggccctccctgagccagcccctggcccagttgacgcctccagcatctgccccagtaccagcagtctgttcaacttgcaaaaatccagcctctctgcccgacacccacagaggaaaaggcgggggggtccctccgagcccacccctggctctcggccccaggatgcaactgtgcacccagcttgccagatttttccccattacacccccagtgtggcatatccttggtccccagaggcacaccccttgatctgtggacctccaggcctggacaagaggctgctaccagaaaccccaggcccctgttactcaaattcacagccagtgtggttgtgcctgactcctcgccagcccctggaaccacatccacctggggaggggccttctgaatggagttctgacaccgcagagggcaggccatgcccttatccgcactgccaggtgctgtcggcccagcctggctcagaggaggaactcgaggagctgtgtgaacaggctgtgtgagatgttcaggcctagctccaaccaagagtgtgctccagatgtgtttgggccctacctggcacagagtcctgctcctgggaaaggaaaggaccacagcaaacaccattctttttgccgtacttcctagaagcactggaagaggactggtgatggtggagggtgagagggtgccgtttcctgctccagctccagaccttgtctgcagaaaacatctgcagtgcagcaaatccatgtccagccaggcaaccagctgctgcctgtggcgtgtgtgggctggatcccttgaaggctgagtttttgagggcagaaagctagctatgggtagccaggtgttacaaaggtgctgctccttctccaacccctacttggtttccctcaccccaagcctcatgttcataccagccagtgggttcagcagaacgcatgacaccttatcacctccctccttgggtgagctctgaacaccagctttggcccctccacagtaaggctgctacatcaggggcaaccctggctctatcattttccttttttgccaaaaggaccagtagcataggtgagccctgagcactaaaaggaggggtccctgaagctttcccactatagtgtggagttctgtccctgaggtgggtacagcagccttggttcctctgggggttgagaataagaatagtggggagggaaaaactcctccttgaagatttcctgtctcagagtcccagagaggtagaaaggaggaatttctgctggactttatctgggcagaggaaggatggaatgaaggtagaaaaggcagaattacagctgagcggggacaacaaagagttcttctctgggaaaagttttgtcttagagcaaggatggaaaatggggacaacaaaggaaaagcaaagtgtgacccttgggtttggacagcccagaggcccagctccccagtataagccatacaggccagggacccacaggagagtggattagagcacaagtctggcctcactgagtggacaagagctgatgggcctcatcagggtgacattcaccccagggcagcctgaccactcttggcccctcaggcattatcccatttggaatgtgaatgtggtggcaaagtgggcagaggaccccacctgggaacctttttccctcagttagtggggagactagcacctaggtacccacatgggtatttatatctgaaccagacagacgcttgaatcaggcactatgttaagaaatatatttatttgctaatatatttatccacaaa

SEQ ID NO: 177542 - DNA, 2198 bp, Homo sapiens
  Payload ID: 14835
  Gene Symbol: RNF43
  Gene Name: ring finger protein 43
  Uniprot ID: Q68DV7
  ENST ID: ENST00000577625
  CDS Start-End: 212-2182
acagcctcatctctgggacctgaatagacaatttatcatttgaagaaaattaagactataactttaagaaattatcttctggtcccacccgctgtacctgtgcaatgccagtgatgacgacaatctggagcctggattcatcagcatcgtcaagctggagagtcctcgacgggccccccgcccctgcctgtcactggctagcaaggctcggatggcgggtgagcgaggagccagtgctgtcctctttgacatcactgaggatcgagctgctgctgagcagctgcagcagccgctggggctgacctggccagtggtgttgatctggggtaatgacgctgagaagctgatggagtttgtgtacaagaaccaaaaggcccatgtgaggattgagctgaaggagcccccggcctggccagattatgatgtgtggatcctaatgacagtggtgggcaccatctttgtgatcatcctggcttcggtgctgcgcatccggtgccgcccccgccacagcaggccggatccgcttcagcagagaacagcctgggccatcagccagctggccaccaggaggtaccaggccagctgcaggcaggcccggggtgagtggccagactcagggagcagctgcagctcagcccctgtgtgtgccatctgtctggaggagttctctgaggggcaggagctacgggtcatttcctgcctccatgagttccatcgtaactgtgtggacccctggttacatcagcatcggacttgccccctctgcatgttcaacatcacagagggagattcattttcccagtccctgggaccctctcgatcttaccaagaaccaggtcgaagactccacctcattcgccagcatcccggccatgcccactaccacctccctgctgcctacctgttgggcccttcccggagtgcagtggctcggcccccacgacctggtcccttcctgccatcccaggagccaggcatgggccctcggcatcaccgcttccccagagctgcacatccccgggctccaggagagcagcagcgcctggcaggagcccagcacccctatgcacaaggctggggactgagccacctccaatccacctcacagcaccctgctgcttgcccagtgcccctacgccgggccaggccccctgacagcagtggatctggagaaagctattgcacagaacgcagtgggtacctggcagatgggccagccagtgactccagctcagggccctgtcatggctcttccagtgactctgtggtcaactgcacggacatcagcctacagggggtccatggcagcagttctactttctgcagctccctaagcagtgactttgaccccctagtgtactgcagccctaaaggggatccccagcgagtggacatgcagcctagtgtgacctctcggcctcgttccttggactcggtggtgcccacaggggaaacccaggtttccagccatgtccactaccaccgccaccggcaccaccactacaaaaagcggttccagtggcatggcaggaagcctggcccagaaaccggagtcccccagtccaggcctcctattcctcggacacagccccagccagagccaccttctcctgatcagcaagtcaccagatccaactcagcagccccttcggggcggctctctaacccacagtgccccagggccctccctgagccagcccctggcccagttgacgcctccagcatctgccccagtaccagcagtctgttcaacttgcaaaaatccagcctctctgcccgacacccacagaggaaaaggcgggggggtccctccgagcccacccctggctctcggccccaggatgcaactgtgcacccagcttgccagatttttccccattacacccccagtgtggcatatccttggtccccagaggcacaccccttgatctgtggacctccaggcctggacaagaggctgctaccagaaaccccaggcccctgttactcaaattcacagccagtgtggttgtgcctgactcctcgccagcccctggaaccacatccacctggggaggggccttctgaatggagttctgacaccgcagagggcaggccatgcccttatccgcactgccaggtgctgtcggcccagcctggctcagaggaggaactcgaggagctgtgtgaacaggctgtgtgagatgttcaggcctagc

SEQ ID NO: 177543 - DNA, 4155 bp, Homo sapiens
  Payload ID: 14836
  Gene Symbol: RNF44
  Gene Name: ring finger protein 44
  Uniprot ID: Q7L0R7
  ENST ID: ENST00000274811
  CDS Start-End: 526-1824
gcggggcggggcccctgcgggcttgcagcgggctactgtttgccggagcctcccggcgcgcccccgcgagccccctcccgtctggcgcgcgaccccgccgcttcgaatgttgtgaatcaaatgtggggtttgttacattccgctgccgccgcggacagttcttaaagggccagccgccggctgccgcgcagacccagctgcgtcctgcgccgcctcccgctccctgagggcctgggccgagagagactgatcgcgcgtgggcctcgcgaggcagacgccgtcgggcggacaacaaagagagaggccccggaaggagccgggctgcccccggacccgggggtggggaggggagcacattgttccgcagggcgggagctcttaaaggatccagacaggcaccccccccctcccccgccccctgcccagtttggccgtcctagatcgggaacaaaggagtcaacgtgtggccgggcggccaaagggttgtgagtcccggcccagcccctccacccccctgcccccccgatgcgaccatgggctctggcagtgactaggtggccaccctccgcccccgtgggccagcggcgattctctgcgggacctggcagcaccccgggccagctctggggaagccctggcctcgagggccccctggccagcccgcctgcccgggatgagcgcttaccctcccagcagccgccgtcccgacctccacacctccccgtagaggagcgccgagcctcggctcctgccggcgggagcccccgaatgctgcacccagccacccagcagagcccgttcatggttgatctccacgagcaggtgcaccagggacctgtccctctgtcctacacggtcaccacagtgacgacccaaggcttccccttgcctacaggccagcacatccctggctgcagtgcccagcagctcccagcatgctccgtgatgttcagtgggcagcattaccccctctgctgcctcccgcccccgcttatccaggcgtgcaccatgcagcagctgcctgtgccctatcaggcctacccccacctcatctccagtgaccactacatcctgcaccccccaccaccggccccacccccccagcccacccacatggcgcccctggggcagtttgtgtctctgcagacccagcaccctcggatgcccctccagcggctcgacaacgacgtggacctgcgtggggaccagccctccctgggcagcttcacctactccacctctgcgcctggcccagccctttccccgtcggtgcccctgcactacctgccccacgatccgctgcaccaggagctgtcctttggtgtgccatattctcacatgatgccacggagactgagcacccagagataccgcctgcagcagccactgcccccgccgcccccacccccacccccaccaccctactaccccagcttcctgccctacttcctctcgatgctgccaatgtcaccaacagcaatggggcccaccatcagcctggacctggacgtggatgatgtggagatggagaactatgaggccctcctgaacctggccgagcggctgggagatgccaagccccggggtctcaccaaagcagacatagagcagctcccgtcgtaccgctttaacccggacagccatcagtcggagcagacgctgtgtgtggtctgcttcagtgacttcgaggcgcggcagctgctccgagtcctcccctgcaaccatgagttccacaccaagtgtgttgacaagtggttgaaggccaaccggacgtgtcccatctgccgggccgacgcctccgaggtgcccagggaggctgagtgaggccacgcagccgcctgcccgggagaaccctgcctgaagctctggaaacttgtgggtggggcccagggaggatggggagggagtggcccaggcctgccccttcgctcctgcctgcatttccagagctggtgccagggtcagcccagcgaggagtccctgcaataagcccctgcatttgccaagctccaaagactccctccctagtctgcctgcctgcccgcccgccacggagctgcctgagtgtccctgatcgggtctccctcctgtgcaccctcaggtccctccttttcctgctggcactgagtgccaggggtccgctccctcagtggggccggtggagatccttggccccaggatgggcagacagagcaccatcctgggtcagaaggtctcatgctctgaaatggcgtgccctctgcccaggtggcactgccaggtgcgtagacagacggtgtcacgagccatttcctgagccccagggctgaatcccccctccttgaccccgaacagtgaactcaggcagctggctctgtgttggctgctgtgagggctgagtctggttccctaggggaccctcatcccaggaacaacattccagccccaccctcaggctggagggcgtcccagcctaatcccgagctggggcacacgtatcctgaggggcttgggccatacggggagagggagccctgtgttcccggtggttgtccctcccagggatgcagccagacccgtgcccaatctcctctccctctgttgttttgcatgaacgtgaggagcagcagtttttgttcattcatttggcccaaaatcacgtgtaggatttggggatgtggatatttaagacaatttcttttttcttttggtttaataggggcgggtatagggaccaactgggaccgagtgcccagggggccgagcacggtcatgctggccggcctgcatgcatgcgtgtgccgggctgggctgggcggccggcggtcgtggggcagggttgggggtctgtgctcagctgataactgccatgcactgtactgcacacgtccctagagcctaccgggacccgacgcttttcagggcatttctccctccagccagggcccaactcccacctgcctgggcgaatctcctccaaggaagtcccaggaggatggggaccaggaaggctgtggacccccatctccagggggccttcccagcctgatccctgtcctccaagttctggaggaggccgctgtagggtctggctgagcttcccacccactttccctggtcccaatcctttcttgtcctatacccagctggggttgctgccctgaacgaactgcgtgtggggccggcacatcctagcaggcagcccctggcgcctgctgcctcagggatgctccaaccaccctcgttctcctcgcagtggccctggctcccacctcccgccccagcctgccgtggggcccgtcagcctggtcccacccccatggagaacccaaagtcttactgtatataactccaggtgacgtttctatatttatagcagtgttgaaaacccacgtgttttacacagaaccaccctctccaacccctcccttcccgaccccaacaaaacgttttcaaaccccttacagttcctggggcaggcggaaacaggctcacagattgtgtgtcggctgcagcagtgattccaacaagcagctattgggggggaaacacagcatttaaaaagatcatcattaaaaaacaagatttatacaacaattacttaggatgtttgtgatctgccgaccttgctatagatgccatgttaccaatgatttcctgtggtgggggcttgccattgtttactctcttatttaccaacttctggcctaggcatgacagtgggcaccttcccccagccctggctgggcccagcgcctgtgttctgtgttagaaaggttttatatatatataaaattacatatatatgtagaaatatatgtaattttgggggccctgttccttgcacattttacagttacctcatttttcccatgtatgtatttgagaaaatgctaatatatagagaaaaaaatggttcttaaagcttaaatgtgtggttttttccattccatgggattcacattggtttgtagcatttaacataactagtatgttgtattatatatatgtgtatactgattgaaatttttaacagatttgtactttttttaaaatgaaagttgctagttctgcttgaccaagtagtgcaatcattattttttttaatattgttgctgatttcagagggatattcactaataaatgtatgatgtataccaacgaccgcccacgctg

SEQ ID NO: 177544 - DNA, 887 bp, Homo sapiens
  Payload ID: 14836
  Gene Symbol: RNF44
  Gene Name: ring finger protein 44
  ENST ID: ENST00000504160
  CDS Start-End: 402-539
ggggtttgttacattccgctgccgccgcggacagttcttaaagggccagccgccggctgccgcgcagacccagctgcgtcctgcgccgcctcccgctccctgagggcctgggccgagagagactgatcgcgcgtgggcctcgcgaggcagacgccgtcgggcggacaacaaagagagaggccccggaaggagccgggctgcccccggacccgggggtggggaggggagcacattgttccgcagggcgggagctcttaaaggatccagacaggcaccccccccctcccccgccccctgcccagtttggccgtcctagatcgggaacaaaggagtcaacgtgtggccgggcggccaaagggttgtgagtcccggcccagcccctccacccccctgcccccccgatgcgaccatgggctctggcagtgactaggtggccaccctccgcccccgtgggccagcggcgattctctgcgggacctggcagcaccccgggccagctctggggaagccgccgtcccgacctccacacctccccgtagaggagcgccgagcctcggctcctgccggcgggagcccccgaatgctgcacccagccacccagcagagcccgttcatggttgatctccacgagcaggtgcaccagggacctgtccctctgtcctacacggtcaccacagtgacgacccaaggcttccccttgcctacaggccagcacatccctggctgcagtgcccagcagctcccagcatgctccgtgatgttcagtgggcagcattaccccctctgctgcctcccgcccccgcttatccaggcgtgcaccatgcagcagctgcctgtgccctatcaggcctacccccacctcatctccagtgaccactacatcctgc

SEQ ID NO: 177545 - DNA, 848 bp, Homo sapiens
  Payload ID: 14836
  Gene Symbol: RNF44
  Gene Name: ring finger protein 44
  ENST ID: ENST00000506378
  CDS Start-End: 1-679
cccgtcggtgcccctgcactacctgccccacgatccgctgcaccaggagctgtcctttggtgtgccatattctcacatgatgccacggagactgagcacccagagataccgcctgcagcagccactgcccccgccgcccccacccccacccccaccaccctactaccccagcttcctgccctacttcctctcgatgctgccaatgtcaccaacagcaatggggcccaccatcagcctggacctggacgtggatgatgtggagatggagaactatgaggccctcctgaacctggccgagcggctgggagatgccaagccccggggtctcaccaaagcagacatagagcagctcccgtcgtaccgctttaacccggacagccatcagtcggagcagacgctgtgtgtggtctgcttcagtgacttcgaggcgcggcagctgctccgagtcctcccctgcaaccatgagttccacaccaagtgtgttgacaagtggttgaaggtaacactgcccaggtctgctcctgggtattcctcatgcagtgacggggggatgggctggcctgggctgtttccctccttgtccttgtcatcatctcggaagttctggctccagcggaccaagtccccccaggtggctgcacagatgtggtgggttggggctggtgagagcaacgcctgacgtgcatgttcccacaggccaaccggacgtgtcccatctgccgggccgacgcctccgaggtgcccagggaggctgagtgaggccacgcagccgcctgcccgggagaaccctgcctgaagctctggaaacttgtgggtggggcccagggaggatggggagggagtggccc

SEQ ID NO: 177546 - DNA, 1647 bp, Homo sapiens
  Payload ID: 14836
  Gene Symbol: RNF44
  Gene Name: ring finger protein 44
  ENST ID: ENST00000513029
  CDS Start-End: 340-480
agacgttagctcgtttgcatgggtggtccgccattggtctgttgggcaatctgggccgtaccagctttttaaagacgccgtgtagtataaacaaggagaagtggggcggccgggccatgatgtcagcgcggtgctgcagctcttgggggtgacgtcatctccgggaaggtggccggcccagggttgttagagccagcataaccacttgggccgctctcgccccgtcagaggtcagacccattgcacttcagtatctcaggcggcaccctgtccccgaggaggggaccatgacacaggttgtgagtcccggcccagcccctccacccccctgcccccccgatgcgaccatgggctctggcagtgactaggtggccaccctccgcccccgtgggccagcggcgattctctgcgggacctggcagcaccccgggccagctctggggaagcagccgccgtcccgacctccacacctccccgtagaggagcgccgagcctcggctcctgccggcgggagcccccgaatgctgcacccagccacccagcagagcccgttcatggttgatctccacgagcaggtgcaccagggacctgtccctctgtcctacacggtcaccacagtgacgacccaaggcttccccttgcctacaggccagcacatccctggctgcagtgcccagcagctcccagcatgctccgtgatgttcagtgggcagcattaccccctctgctgcctcccgcccccgcttatccaggcgtgcaccatgcagcagctgcctgtgccctatcaggcctacccccacctcatctccagtgaccactacatcctgcaccccccaccaccggccccacccccccagcccacccacatggcgcccctggggcagtttgtgtctctgcagacccagcaccctcggatgcccctccagcggctcgacaacgacgtggacctgcgtggggaccagccctccctgggcagcttcacctactccacctctgcgcctggcccagccctttccccgtcggtgcccctgcactacctgccccacgatccgctgcaccaggagctgtcctttggtgtgccatattctcacatgatgccacggagactgagcacccagagataccgcctgcagcagccactgcccccgccgcccccacccccacccccaccaccctactaccccagcttcctgccctacttcctctcgatgctgccaatgtcaccaacagcaatggggcccaccatcagcctggacctggacgtggatgatgtggagatggagaactatgaggccctcctgaacctggccgagcggctgggagatgccaagccccggggtctcaccaaagcagacatagagcagctcccgtcgtaccgctttaacccggacagccatcagtcggagcagacgctgtgtgtggtctgcttcagtgacttcgaggcgcggcagctgctccgagtcctcccctgcaaccatgagttccacaccaagtgtgttgacaagtggttgaaggccaaccggacgtgtcccatctgccgggccgacgcctccgaggtgcccagggaggctgagtgaggccacgcagccgcctgcccgggagaaccctgcctgaagctctggaaacttgtgggtggggcccagggag

SEQ ID NO: 177547 - DNA, 1168 bp, Homo sapiens
  Payload ID: 14837
  Gene Symbol: RNF5
  Gene Name: ring finger protein 5, E3 ubiquitin protein ligase
  Uniprot ID: Q99942
  ENST ID: ENST00000375094
  CDS Start-End: 159-701
gaattctttgtgactggcaggcattcagaccaatagtgattaggaaaccttgaagcctgcccaacgatcgtgggcaggaggtggtttctggtttgttggggcgtgtgtatgtgtatttggggggactgaagggtacgtggggcgaaacaaaaccggccatggcagcagcggaggaggaggacgggggccccgaagggccaaatcgcgagcggggcggggcgggcgcgaccttcgaatgtaatatatgtttggagactgctcgggaagctgtggtcagtgtgtgtggccacctgtactgttggccatgtcttcatcagtggctggagacacggccagaacggcaagagtgtccagtatgtaaagctgggatcagcagagagaaggttgtcccgctttatgggcgagggagccagaagccccaggatcccagattaaaaactccaccccgcccccagggccagagaccagctccggagagcagagggggattccagccatttggtgataccgggggcttccacttctcatttggtgttggtgcttttccctttggctttttcaccaccgtcttcaatgcccatgagcctttccgccggggtacaggtgtggatctgggacagggtcacccagcctccagctggcaggattccctcttcctgtttctcgccatcttcttctttttttggctgctcagtatttgagctatgtctgcttcctgcccacctccagccagagaagaatcagtattgagggtccctgctgacccttccgtactcctggacccccttgacccctctatttctgttggctaaggccagccctggacattgtccaggaaggcctggggaggaggagtgaagtctgtgcatagatgggagagccttctgctcagaggctcactcagtaacgttgtttaattctctgccctggggaaggaggatggattgagagaatgtctttctcctctcctaagtctttgctttccctgatttcttgatttgatcttcaaaggtgggcaaagttccctctgactcttcccccactccccatcttactgatttaatttaatttttcactccccagagtctaatatggattctgactcttaagtgcttccgccccctcactacctcctttaatacaaattcaataaaaaaggtgaaatata

SEQ ID NO: 177548 - DNA, 1168 bp, Homo sapiens; identical to SEQ ID NO: 177547
  Payload ID: 14837
  Gene Symbol: RNF5
  Gene Name: ring finger protein 5, E3 ubiquitin protein ligase
  Uniprot ID: Q99942
  ENST ID: ENST00000413786
  CDS Start-End: 159-701

SEQ ID NO: 177549 - DNA, 1162 bp, Homo sapiens
  Payload ID: 14837
  Gene Symbol: RNF5
  Gene Name: ring finger protein 5, E3 ubiquitin protein ligase
  Uniprot ID: Q99942
  ENST ID: ENST00000456167
  CDS Start-End: 153-695
tttgtgactggcaggcattcagaccaatagtgattaggaaaccttgaagcctgcccaacgatcgtgggcaggaggtggtttctggtttgttggggcgtgtgtatgtgtatttggggggactgaagggtacgtggggcgaaacaaaaccggccatggcagcagcggaggaggaggacgggggccccgaagggccaaatcgcgagcggggcggggcgggcgcgaccttcgaatgtaatatatgtttggagactgctcgggaagctgtggtcagtgtgtgtggccacctgtactgttggccatgtcttcatcagtggctggagacacggccagaacggcaagagtgtccagtatgtaaagctgggatcagcagagagaaggttgtcccgctttatgggcgagggagccagaagccccaggatcccagattaaaaactccaccccgcccccagggccagagaccagctccagagagcagagggggattccagccatttggtgataccgggggcttccacttctcatttggtgttggtgcttttccctttggctttttcaccaccgtcttcaatgcccatgagcctttccgccggggtacaggtgtggatctgggacagggtcacccggcctccagctggcaggattccctcttcctgtttctcgccatcttcttctttttttggctgctcagtatttgagctatgtctgcttcctgcccacctccagccagagaagaatcagtattgagggtccctgctgacccttccgtactcctggacccccttgacccctctatttctgttggctaaggccagccctggacattgtccaggaaggcctggggaggaggagtgaagtctgtgcatagatgggagagccttctgctcagaggctcactcagtaacgttgtttaattctctgccctggggaaggaggatggattgagagaatgtctttctcctctcctaagtctttgctttccctgatttcttgatttcatcttcaaaggtgggcaaagttccctctgactcttcccccactccccatcttactgatttaatttaatttttcactccccagagtctaatatggattctgactcttaagtgcttccgccccctcactacctcctttaatacaaattcaataaaaaaggtgaaatata

SEQ ID NO: 177550 - DNA, 1168 bp, Homo sapiens; identical to SEQ ID NO: 177547
  Payload ID: 14837
  Gene Symbol: RNF5
  Gene Name: ring finger protein 5, E3 ubiquitin protein ligase
  Uniprot ID: Q99942
  ENST ID: ENST00000445885
  CDS Start-End: 159-701

SEQ ID NO: 177551 - DNA, 1168 bp, Homo sapiens; identical to SEQ ID NO: 177547
  Payload ID: 14837
  Gene Symbol: RNF5
  Gene Name: ring finger protein 5, E3 ubiquitin protein ligase
  Uniprot ID: Q99942
  ENST ID: ENST00000432616
  CDS Start-End: 159-701

SEQ ID NO: 177552 - DNA, 1168 bp, Homo sapiens; identical to SEQ ID NO: 177547
  Payload ID: 14837
  Gene Symbol: RNF5
  Gene Name: ring finger protein 5, E3 ubiquitin protein ligase
  Uniprot ID: Q99942
  ENST ID: ENST00000453473
  CDS Start-End: 159-701

SEQ ID NO: 177553 - DNA, 1168 bp, Homo sapiens; identical to SEQ ID NO: 177547
  Payload ID: 14837
  Gene Symbol: RNF5
  Gene Name: ring finger protein 5, E3 ubiquitin protein ligase
  Uniprot ID: Q99942
  ENST ID: ENST00000449794
  CDS Start-End: 159-701

SEQ ID NO: 177554 - DNA, 357 bp, Homo sapiens
  Payload ID: 14837
  Gene Symbol: RNF5
  Gene Name: ring finger protein 5, E3 ubiquitin protein ligase
  ENST ID: ENST00000472060
  CDS Start-End: 76-351
gtttctggtttgttggggcgtgtgtatgtgtatttggggggactgaagggtacgtggggcgaaacaaaaccggccatggcagcagcggaggaggaggacgggggccccgaagggccaaatcgcgagcggggcggggcgggcgcgaccttcgaatgtaatatatgtttggagactgctcgggaagctgtggtcagtgtgtgtggccacctgtactgttggccatgtcttcatcagtggctggagacacggccagaacggcaagagtgtccagtatgtaaagctgggatcagcagagagaaggttgtcccgctttatgggcgagggagccagaagccccaggatcccaggtgagagact

SEQ ID NO: 177555 - DNA, 2763 bp, Homo sapiens
  Payload ID: 14838
  Gene Symbol: RNF7
  Gene Name: ring finger protein 7
  Uniprot ID: Q9UBF6
  ENST ID: ENST00000273480
  CDS Start-End: 139-480
gggcagccggggtctaggcaccacggtggctggcggcctgcgggcggcgctgtggcccgtcgggcggctccacagagccgccctagccttccgccttccccaagccaacgtctccgccgtcggctccgcggcgccgccatggccgacgtggaagacggagaggaaacctgcgccctggcctctcactccgggagctcaggctccaagtcgggaggcgacaagatgttctccctcaagaagtggaacgcggtggccatgtggagctgggacgtggagtgcgatacgtgcgccatctgcagggtccaggtgatggatgcctgtcttagatgtcaagctgaaaacaaacaagaggactgtgttgtggtctggggagaatgtaatcattccttccacaactgctgcatgtccctgtgggtgaaacagaacaatcgctgccctctctgccagcaggactgggtggtccaaagaatcggcaaatgagagtggttagaaggcttcttagcgcagttgttcagagccctggtggatcttgtaatccagtgccctacaaaggctagaacactacaggggatgaattcttcaaataggagccgatggatctgtggtcctttgggactcatcaaagccttggtttagcattttgtcagttttatcttcagaaattctctgcgattaagaagataatttattaaaggtggtccttcctacctctgtggtgtgtgtcgcgcacacagcttagaagtgctataaaaaaggaaagagctccaaattgaatcacctttataatttacccatttctatacaacaggcagtggaagcagtttcagagaactttttgcatgcttatggttgatcagttaaaaaagaatgttacagtaacaaataaagtgcagtttaaaacccaactcttactcttaatttgttcctaatacgtatttttggcagggagagggaacggtccatgaaatctttatgtgatataaggattttaagtttgggccagtgaacagggtaaataaaatttaacttttgagcatatggaattttgattgcctttaaagttactattctgtatcattgattcatcaagaaaacctagatctgcactcacctcactgttcaatcattgagtggtaaaggacagaagtattttctagttctggtcagatgatataattttttttttttttttttgtgggggtgaagtcttgctctgccacccaggctggagtgcagtggcatgatgtcaactcactgcaacctccgcctcccgggttcaagtgattctcctgcctcagcctcccgagtagctgggattacaggtgtgtgccaccacacccggctaatttttgtatttttagtagagacgggatttccccatgttggccaggctggtctcaaactcctgacctcaggtgattcgcccacctcagcctcccaaagtgctgggattacaggtgtgggccactgcacctggcccagatgatataatttaactgtgttttaggtaacatgttaatgagggaaaatgtttaccagtgtagcattggatcaaaaagtttatcacacagtgttttaataaatggtttattctgcttaccttatttgaattgtcattataattttatatgcaaccttaatttgtcaagtaaatactttcatttaatttgaaagaattcatattcatttgctctttcatttgacaataataaaatttaaggtttattacctggaaagagtgcaagaaaatactaaacaactttatcaaactgattcacactgaggggaggttattttgtaacaaataatggaccacaagttcattttgtattcttctgtagtagaggctactgatatgaatttaagaaaaaaccttagaatcttaacttttcacatctgcagatgcagtgtgccattctgaatttttcaatctaagggatgtggatacatagaatgtttaaaaagataacaattagaatgaaaaattaaaattatgtatgcttttatatgggttactttttattgatcacatttctctggaaatttttctttatattttttcacagttgtctttctagctactgaaaaaattatacaaatatctttggccatttaaatgtttatcattgtgcagtgaactgttttagtaactttctgtttgacctttttagaaggttgcatccttaaaatgtgaaccagatacatggctttgcattgaagaggaaagcagtagaatgtcaggttactttaggcagtgtgacagtatataaatgaaatgtggaggatggtggtaacaatttgattttccacacagcaaaaccacagtcccgccacctaacaaagccctgtttatgccacacaccagcatctgagggaagaggaggcactgtgacaaagcagcgctgatgctgctcagcctgcgatgattacagctcatctgcacagccatctgaaagtttaatacatactcatcagagggaacatgccgggacaattttgggttccaatacaaaagttaagcatcaaacaggtttttctttccatttgattaaatgtgctgattttattttactgttgcattagaaacaaacaagttatctttcgctatttaattttccctctatgcaaattgtgttattacagctgaccgctatcagtaaatcttaattctgtcagtcccattgcttccttttttataaaaatactgtgtccccctttactgtcatgaagtgaaattcataaatatatttcctacacatataa

SEQ ID NO: 177556 - DNA, 805 bp, Homo sapiens
  Payload ID: 14838
  Gene Symbol: RNF7
  Gene Name: ring finger protein 7
  Uniprot ID: Q9UBF6
  ENST ID: ENST00000393000
  CDS Start-End: 46-318
ccttccccaagccaacgtctccgccgtcggctccgcggcgccgccatggccgacgtggaagacggagaggaaacctgcgccctggcctctcactccgggagctcaggctccaagtcgggaggcgacaagatgttctccctcaagaagtggaacgcggtggccatgtggagctgggacgtggagtgcgatacgtgcgccatctgcagggtccagatgcctgtcttagatgtcaagctgaaaacaaacaagaggactgtgttgtggtctggggagaatgtaatcattccttccacaactgctgcatgtccctgtgggtgaaacagaacaatcgctgccctctctgccagcaggactgggtggtccaaagaatcggcaaatgagagtggttagaaggcttcttagcgcagttgttcagagccctggtggatcttgtaatccagtgccctacaaaggctagaacactacaggggatgaattcttcaaataggagccgatggatctgtggtcctttgggactcatcaaagccttggtttagcattttgtcagttttatcttcagaaattctctgcgattaagaagataatttattaaaggtggtccttcctacctctgtggtgtgtgtcgcgcacacagcttagaagtgctataaaaaaggaaagagctccaaattgaatcacctttataatttacccatttctatacaacaggcagtggaagcagtttcagagaactttttgcatgcttatggttgatcagttaaaaaagaatgttacagtaacaaataaagtgcagtttaaaacccaa

SEQ ID NO: 177557 - DNA, 782 bp, Homo sapiens
  Payload ID: 14838
  Gene Symbol: RNF7
  Gene Name: ring finger protein 7
  Uniprot ID: Q9UBF6
  ENST ID: ENST00000480908
  CDS Start-End: 66-359
agagccgccctagccttccgccttccccaagccaacgtctccgccgtcggctccgcggcgccgccatggccgacgtggaagacggagaggaaacctgcgccctggcctctcactccgggagctcaggctccaagtcgggaggcgacaagatgttctccctcaagaagtggaacgcggtggccatgtggagctgggacgtggagtgcgatacgtgcgccatctgcagggtccaggtgatggtggtctggggagaatgtaatcattccttccacaactgctgcatgtccctgtgggtgaaacagaacaatcgctgccctctctgccagcaggactgggtggtccaaagaatcggcaaatgagagtggttagaaggcttcttagcgcagttgttcagagccctggtggatcttgtaatccagtgccctacaaaggctagaacactacaggggatgaattcttcaaataggagccgatggatctgtggtcctttgggactcatcaaagccttggtttagcattttgtcagttttatcttcagaaattctctgcgattaagaagataatttattaaaggtggtccttcctacctctgtggtgtgtgtcgcgcacacagcttagaagtgctataaaaaaggaaagagctccaaattgaatcacctttataatttacccatttctatacaacaggcagtggaagcagtttcagagaactttttgcatgcttatggttgatcagttaaaaaagaatgttacagtaacaaataaagtgcagtttaaaaccc

SEQ ID NO: 177558 - DNA, 1036 bp, Homo sapiens
  Payload ID: 14838
  Gene Symbol: RNF7
  Gene Name: ring finger protein 7
  Uniprot ID: Q9UBF6
  ENST ID: ENST00000477012
  CDS Start-End: 39-365
caagccaacgtctccgccgtcggctccgcggcgccgccatggccgacgtggaagacggagaggaaacctgcgccctggcctctcactccgggagctcaggctccaagtcgggaggcgacaagatgttctccctcaagaagtggaacgcggtggccatgtggagctgggacgtggagtgcgatacgtgcgccatctgcagggtccaggtgatggatgagggaattggagttcgtaattggtccgaggccctgaacctaataaatgccagtgaaatgggatttgactgtagatctggctccacagccctcgctgtcccctctgtctcactggcttctcaccagccttgtctggatgaccatcggtagcaacctattggaagcatacaaagcagtttattttagaggaactctcaagtgtcttagggtagaaagtaaaaagttgcttcttatgagttgctaaaggaaggcttctgtgtcaatgcctgtcttagatgtcaagctgaaaacaaacaagaggactgtgttgtggtctggggagaatgtaatcattccttccacaactgctgcatgtccctgtgggtgaaacagaacaatcgctgccctctctgccagcaggactgggtggtccaaagaatcggcaaatgagagtggttagaaggcttcttagcgcagttgttcagagccctggtggatcttgtaatccagtgccctacaaaggctagaacactacaggggatgaattcttcaaataggagccgatggatctgtggtcctttgggactcatcaaagccttggtttagcattttgtcagttttatcttcagaaattctctgcgattaagaagataatttattaaaggtggtccttcctacctctgtggtgtgtgtcgcgcacacagcttagaagtgctataaaaaaggaaagagctccaaattgaatcacctttataatttacccatttctatacaacaggcagtggaagcagtttcagagaactttttgcatgcttatggttgatcagttaaaaaagaatgtt

SEQ ID NO: 177559 - DNA, 862 bp, Homo sapiens
  Payload ID: 14838
  Gene Symbol: RNF7
  Gene Name: ring finger protein 7
  ENST ID: ENST00000477393
  CDS Start-End: 24-230
gccgtcggctccgcggcgccgccatggccgacgtggaagacggagaggaaacctgcgccctggcctctcactccgggagctcaggctccaagtcgggaggcgacaagatgttctccctcaagaagtggaacgcggtggccatgtggagctgggacgtggagtgcgatacgtgcgccatctgcagggtccagatgagggaattggagttcgtaattggtccgaggccctgaacctaataaatgccagtgaaatgggatttgactgtagatctggctccacagccctcgctgtcccctctgtctcactggcttctcaccagccttgtctggatgaccatcggtagcaacctattggaagcatacaaagcagtttattttagaggaactctcaagtgtcttagggtagaaagtaaaaagttgcttcttatgagttgctaaaggaaggcttctgtgtcaatgcctgtcttagatgtcaagctgaaaacaaacaagaggactgtgttgtggtctggggagaatgtaatcattccttccacaactgctgcatgtccctgtgggtgaaacagaacaatcgctgccctctctgccagcaggactgggtggtccaaagaatcggcaaatgagagtggttagaaggcttcttagcgcagttgttcagagccctggtggatcttgtaatccagtgccctacaaaggctagaacactacaggggatgaattcttcaaataggagccgatggatctgtggtcctttgggactcatcaaagccttggtttagcattttgtcagttttatcttcagaaattctctgcgattaagaagataatttattaaaggtggtccttcctacctctgtggtgtg

SEQ ID NO: 177560 - DNA, 2124 bp, Homo sapiens
  Payload ID: 14839
  Gene Symbol: RNF8
  Gene Name: ring finger protein 8, E3 ubiquitin protein ligase
  Uniprot ID: O76064
  ENST ID: ENST00000229866
  CDS Start-End: 151-447
gagcggagcctgctttcgcagcgatcgcgagcgtgtggcgattgcttctgtctgttatttagatatggaagctgaggggatgcacagaggcagccagaacctaggtcagggtctcgctcggtgctgaccgcccccggggtcgagtaggcgatgggggagcccggcttcttcgtcacaggagaccgcgccggtggccggagctggtgcctgcggcgggtggggatgagcgccgggtggctgctgctggaagatgggtgcgaggtgactgtaggacgaggatttggtgtcacataccaactggtatcaaaaatctgccccctgatgatttctcgaaaccactgtgttttgaagcagaatcctgagggccaatggacaattatggacaacaagagttttccttctgaaaaggcagaagattttacagcagcaggagagagattcctttaagaagacgaaaatcatgaagcttatttcttctttctttcactttccccagagtctaaatggtgtttggctgaacagagcgcgtctggaacctttaagggtctattccattcatcagggagactacatccaacttggagtgcctctggaaaataaggagaatgcggagtatgaatatgaagttactgaagaagactgggagacaatatatccttgtctttccccaaagaatgaccaaatgatagaaaaaaataaggaattgagaactaaaaggaaattcagtttggatgaattagcaggtcctggagctgaaggcccctcaaatttgaaatccaaaataaataaagtgtcttgtgaatctggtcagccagtgaaatcacaggggaaaggtgaagtggccagtacaccctctgacaatttggatcctaagttgactgcccttgagccaagtaagaccacaggggctcccatttaccctggcttccccaaagtcacagaggttcatcatgagcagaaagcctcaaactcttcagcatctcagagaagcttacagatgtttaaggtgaccatgtccaggattctgaggctcaaaatacagatgcaggaaaaacatgaagccgttatgaatgtgaaaaagcagacccaaaaggggaactcaaagaaagttgtgcaaatggagcaggaacttcaggacttacagtcccagctgtgtgcagagcaggctcagcagcaggcaagagtggagcaactagagaagactttccaggaagaggaacagcatcttcagggtttggagatagcccaaggagaaaaggacctgaagcaacagctggcccaggctctgcaggagcattgggctctaatggaagagctaaatcgcagcaagaaggactttgaagcaatcattcaagccaagaacaaagaattagagcagaccaaggaagagaaggagaagatgcaagcacagaaggaagaagttcttagccacatgaatgatgtgctagagaatgagctccaatgtattatttgttcagaatacttcattgaggctgtcaccttgaactgtgcccacagtttctgctcctactgtatcaatgaatggatgaagcggaagatagaatgccccatttgtcggaaggacattaagtccaaaacgtactctttggttctggacaattgcattaataagatggtaaataatctgagctcagaagtgaaagaacgacgaattgttctcattagggaacgaaaagcaaagagattgttctgaagaccgtgctctaagggcatttgaaagactgccaggtagtgcgagcctgagatggtctggaggattctctctagccgtgactccgctgctctgaaggtcaactgagaagtcttgtgggacagagacttgagttaggaagccctcagtcacttgccttccacggtggccagccctgctgccatcattggctgaagcaccaccaggattcacggcacccaactgcttcagggtacttcgtagactctgcctcactacatgtcgaaagagttatttgagttctcttctgtttttttttaatttgttgttgttgttactgttttgatacctcggaaacacctccgttgacagttgttttggataggttgggtgtaccccatggctgcctctgaaggcagtgtctattttgagag

SEQ ID NO: 177561 - DNA, 5631 bp, Homo sapiens
  Payload ID: 14839
  Gene Symbol: RNF8
  Gene Name: ring finger protein 8, E3 ubiquitin protein ligase
  Uniprot ID: O76064
  ENST ID: ENST00000373479
  CDS Start-End: 194-1651
cttgcgcaggcgtagtgctcctgcttcctggccgagggcgggcgagcggagcctgctttcgcagcgatcgcgagcgtgtggcgattgcttctgtctgttatttagatatggaagctgaggggatgcacagaggcagccagaacctaggtcagggtctcgctcggtgctgaccgcccccggggtcgagtaggcgatgggggagcccggcttcttcgtcacaggagaccgcgccggtggccggagctggtgcctgcggcgggtggggatgagcgccgggtggctgctgctggaagatgggtgcgaggtgactgtaggacgaggatttggtgtcacataccaactggtatcaaaaatctgccccctgatgatttctcgaaaccactgtgttttgaagcagaatcctgagggccaatggacaattatggacaacaagagtctaaatggtgtttggctgaacagagcgcgtctggaacctttaagggtctattccattcatcagggagactacatccaacttggagtgcctctggaaaataaggagaatgcggagtatgaatatgaagttactgaagaagactgggagacaatatatccttgtctttccccaaagaatgaccaaatgatagaaaaaaataaggaattgagaactaaaaggaaattcagtttggatgaattagcaggtcctggagctgaaggcccctcaaatttgaaatccaaaataaataaagtgtcttgtgaatctggtcagccagtgaaatcacaggggaaaggtgaagtggccagtacaccctctgacaatttggatcctaagttgactgcccttgagccaagtaagaccacaggggctcccatttaccctggcttccccaaagtcacagaggttcatcatgagcagaaagcctcaaactcttcagcatctcagagaagcttacagatgtttaaggtgaccatgtccaggattctgaggctcaaaatacagatgcaggaaaaacatgaagccgttatgaatgtgaaaaagcagacccaaaaggggaactcaaagaaagttgtgcaaatggagcaggaacttcaggacttacagtcccagctgtgtgcagagcaggctcagcagcaggcaagagtggagcaactagagaagactttccaggaagaggaacagcatcttcagggtttggagatagcccaaggagaaaaggacctgaagcaacagctggcccaggctctgcaggagcattgggctctaatggaagagctaaatcgcagcaagaaggactttgaagcaatcattcaagccaagaacaaagaattagagcagaccaaggaagagaaggagaagatgcaagcacagaaggaagaagttcttagccacatgaatgatgtgctagagaatgagctccaatgtattatttgttcagaatacttcattgaggctgtcaccttgaactgtgcccacagtttctgctcctactgtatcaatgaatggatgaagcggaagatagaatgccccatttgtcggaaggacattaagtccaaaacgtactctttggttctggacaattgcattaataagatggtaaataatctgagctcagaagtgaaagaacgacgaattgttctcattagggaacgaaaagcaaagagattgttctgaagaccgtgctctaagggcatttgaaagactgccaggtagtgcgagcctgagatggtctggaggattctctctagccgtgactccgctgctctgaaggtcaactgagaagtcttgtgggacagagacttgagttaggaagccctcagtcacttgccttccacggtggccagccctgctgccatcattggctgaagcaccaccaggattcacggcacccaactgcttcagggtacttcgtagactctgcctcactacatgtcgaaagagttatttgagttctcttctgtttttttttaatttgttgttgttgttactgttttgatacctcggaaacacctccgttgacagttgttttggataggttgggtgtaccccatggctgcctctgaaggcagtgtctattttgagaggatggcttacctcttctttgtgaaaatactatctcatttcctggaaataaaatgtaaaacctgtcagttgctcagctgggctttggtgtatttaccttccttcccttcctgctcccagacagtctcacaagtaaacaccagcagctcatagattacaaccaagaaagtgactgtatcagatgatagacttcaagtgaatgtcagcctaagaggccaagctgcagatcgtggcaacagatgagctctgttaacctcctgactgtcgtgtttcctttttattacagaggtgggtcactgtttaccttgtttcaggggtgggagaaactcctttccttcagctggcatttgaatgtttccaaatctattttatctgacgtcatgaacacacaggcaatgattttatgacaacttgatgtgcttttttctttatttttcttttacattagaagttttctctcttttctccacctctcctttatttttaattttaattttaatttttgaaacaagatctgactctgttgcccaagctggagtacagtagtgcaatctcagctcactgcaacctccacctcccagactcaagccatcctcccacctcaacctcccaagtagctgggactacaggcatatgccatcacacccagctaatttttgtttttctgtagagacagggtttcaccatgttggccaggctggtctcaaattcctgaccttaagtgatccacctgcctaggcctctaaaatgctgggattacaggcgtgagccaccacgcccagcctataccccatgtattttcataaagggttggaaactattgattgccaactttttaaggatggtagggattttttctttgttgaatatactgtgaattttgggattctggagtccttagtcttcatttccattcttctgcccatgattactgatcaaaatactggtagagtcatggaggaagtaagttaaatgtggaaaaaatgctttaaaagtacttactataaccacatcataagaattctggaaaaatagagaacaaaaggaaaagattgttaccaccttgatttaataacttcttgtttccccatacatgtgttttgtttatagattgcatgggtatatgtcaatttttatatgttctgtgtttagtttacatattgtaattcatttttaagagagtacagacatacactttttgagtaggcaatatgttcacatagtttgaaattaaaggtacaaaatggcgtagaatgaaatgcctctcaccctttccccacagcgactacttcccactcagaggcaacaagtattacagttgcttgtatattcttccagagatctctgtctatacaagcaaaaacacatgtggtctttttccttgctttgcacaaatggtaaactgtacgctattctgaaccttgcttttttcagatatatgttggcaacagttccatgtcagtacatagtttcctttctttattacagctgcctgttttttcattgtgtatttgcaccatcatttacttttctggcttacttttgatagaaatctaggttggttcaaacctttttactcttaaaacaatgctgcagttaacacccttgtacatatatctttagagagaagatattttaaaaagaaatacctttttaaaaattattttattattttttaatagagactatgttgcctaggctggtcttgaaattctgggctaaagcaatcctaccaccttggcctcccaaagtgctgagattacaggcatgagccattgcacctggccaagaagagacatcttgacttgagcctgaagactatgtacagagactgacctcacagactgaccattccatcccacagctgctggacatagagtgatttgcagcccctcctttcagagtaccacatccctctcaagtgttccacaacatctaggaaagtgagctcttaaagacagactaaaaagagtaataaatcaatacaacaacattaaaagccagactagcggagtttgaatcttggccctgctgttagtaactgtgtgagccttgggcaagttactcagcctccttgtgtcttggttttggtttcttcatctctaagtaattatatctgtcattattgccctgatcacaaacaaaagcctgaatgtactatgtttaaaagacaaaccaaaaattaacccaaacttgcattatttgtctgagctacagaatgttctttccttggagagatatctgatattaaacatcatctgcattttacttgcctagaaaatacacggtaacttttctgccttgcagcatcaaactatagtacagctgagccccagtgctgtgcagtctgactctaattaaaggcaccttctttacagcagggctctggggaactggaaaagggggtttgtttcattatctggttttattaagcagatgaatgcagccagctatatgaagcactttgcagtgaatggcaggtgtcccatatctggttatgttaacctagaaagggctcactctacctctaggcatgtttcatcccaacaatcagactgtgccaaagcaggggactttgtcctttgtggattgcatagctggatacccatcatctgtttctctgattggaagctgctgttgtacagaaagacctgcatttcccccttgtctccagttctctcactactttttcctcctctgtgagtgaccatccaggcagtcaccataactgctggagtgtctgggattggtagctctctccaactgcctgcttgctctttacagcctctctctgtgactggaatctctccacctcatcgtatctaaggataacccagaaacatggggtgtcctaggtatgtttatctcgacactgaaccccctaggcttctgatgaatccagtgattagctaaatttgacatagaaagtaagaaggaatgtctactttgtattgtggtcctaatctaagatcaggagaatcctggaattgttatctgtctcttgctctgagatacagacttgttcataggtgtggggcctgattggaacaggatctgccattggtcacaataggtcaagggcttgttctgaaccctagttagcttcattcagagaaagaaacttcctacctggtcagctttttcagcttctccaacaaatgggagttgaggcagtaggagtgtggggttcttgggaagacgatggggccttgtattaaggagaaataatgaactatcttcttgattcttccattgagaaaagcatatgaatcctaggaaagggctcagcctgtgataggcattcaataaatactccaatgctgtcattcctttgtctacagcatccccaaacaatgtaccagtgatgggctacctgagctcatctagtcgccaagcagtatctcctgcttgctgctgctttactacattccagatgcccacctcatccaatttccagagccactatctctgctgtccactttccttcaggctctgtgaatacttcaacctgctgtgatttggggccgtttgtactctgcatgtattcaataaattcaattcagcaatagtta

SEQ ID NO: 177562 - DNA, 835 bp, Homo sapiens
  Payload ID: 14839
  Gene Symbol: RNF8
  Gene Name: ring finger protein 8, E3 ubiquitin protein ligase
  ENST ID: ENST00000498460
  CDS Start-End: 1-625
gccaagtaagaccacaggggctcccatttaccctggcttccccaaagtcacagaggttcatcatgagcagaaagcctcaaactcttcagcatctcagagaagcttacagatgtttaaggtgaccatgtccaggattctgaggctcaaaatacagatgcaggaaaaacatgaagccgttatgaatgtgaaaaagcagacccaaaaggggaactcaaagaaagttgtgcaaatggagcaggaacttcaggacttacagtcccagctgtgtgcagagcaggctcagcagcaggcaagagtggagcaactagagaagactttccaggaagaggaacagcatcttcagggtttggagatagcccaaggagaaaaggacctgaagcaacagctggcccaggctctgcaggaggaagagaaggagaagatgcaagcacagaaggaagaagttcttagccacatgaatgatgtgctagagaatgagctccaatgtattatttgttcagaatacttcattgagcaaagagattgttctgaagaccgtgctctaagggcatttgaaagactgccaggtagtgcgagcctgagatggtctggaggattctctctagccgtgactccgctgctctgaaggtcaactgagaagtcttgtgggacagagacttgagttaggaagccctcagtcacttgccttccacggtggccagccctgctgccatcattggctgaagcaccaccaggattcacggcacccaactgcttcagggtacttcgtagactctgcctcactacatgtcgaaagagttatttgagttctcttctgtttttttttaatttgttg

SEQ ID NO: 177563 - DNA, 731 bp, Homo sapiens
  Payload ID: 14839
  Gene Symbol: RNF8
  Gene Name: ring finger protein 8, E3 ubiquitin protein ligase
  ENST ID: ENST00000487950
  CDS Start-End: 116-731
gtctgttatttagatatggaagctgaggggatgcacagaggcagccagaacctaggtgactgtaggacgaggatttggtgtcacataccaactggtatcaaaaatctgccccctgatgatttctcgaaaccactgtgttttgaagcagaatcctgagggccaatggacaattatggacaacaagagtctaaatggtgtttggctgaacagagcgcgtctggaacctttaagggtctattccattcatcagggagactacatccaacttggagtgcctctggaaaataaggagaatgcggagtatgaatatgaagttactgaagaagactgggagacaatatatccttgtctttccccaaagaatgaccaaatgatagaaaaaaataaggaattgagaactaaaaggaaattcagtttggatgaattagcaggtcctggagctgaaggcccctcaaatttgaaatccaaaataaataaagtgtcttgtgaatctggtcagccagtgaaatcacaggggaaaggtgaagtggccagtacaccctctgacaatttggatcctaagttgactgcccttgagccaagtaagaccacaggggctcccatttaccctggcttccccaaagtcacagaggttcatcatgagcagaaagcctcaaactcttcagcatctcagagaagcttacagatgtttaaggtgaccatgtccaggattctgaggctcaaaatacaga

SEQ ID NO: 177564 - DNA, 1800 bp, Homo sapiens
  Payload ID: 14839
  Gene Symbol: RNF8
  Gene Name: ring finger protein 8, E3 ubiquitin protein ligase
  Uniprot ID: O76064
  ENST ID: ENST00000469731
  CDS Start-End: 75-1421
gggatgcacagaggcagccagaacctaggtcagggtctcgctcggtgctgaccgcccccggggtcgagtaggcgatgggggagcccggcttcttcgtcacaggagaccgcgccggtggccggagctggtgcctgcggcgggtggggatgagcgccgggtggctgctgctggaagatgggtgcgaggtgactgtaggacgaggatttggtgtcacataccaactggtatcaaaaatctgccccctgatgatttctcgaaaccactgtgttttgaagcagaatcctgagggccaatggacaattatggacaacaagagtctaaatggtgtttggctgaacagagcgcgtctggaacctttaagggtctattccattcatcagggagactacatccaacttggagtgcctctggaaaataaggagaatgcggagtatgaatatgaagttactgaagaagactgggagacaatatatccttgtctttccccaaagaatgaccaaatgatagaaaaaaataaggaattgagaactaaaaggaaattcagtttggatgaattagcaggtcctggagctgaaggcccctcaaatttgaaatccaaaataaataaagtgtcttgtgaatctggtcagccagtgaaatcacaggggaaaggtgaagtggccagtacaccctctgacaatttggatcctaagttgactgcccttgagccaagtaagaccacaggggctcccatttaccctggcttccccaaagtcacagaggttcatcatgagcagaaagcctcaaactcttcagcatctcagagaagcttacagatgtttaaggtgaccatgtccaggattctgaggctcaaaatacagatgcaggaaaaacatgaagccgttatgaatgtgaaaaagcagacccaaaaggggaactcaaagaaagttgtgcaaatggagcaggaacttcaggacttacagtcccagctgtgtgcagagcaggctcagcagcaggcaagagtggagcaactagagaagactttccaggaagaggaacagcatcttcagggtttggagatagcccaaggagaaaaggacctgaagcaacagctggcccaggctctgcaggagcattgggctctaatggaagagctaaatcgcagcaagaaggactttgaagcaatcattcaagccaagaacaaagaattagagcagaccaaggaagagaaggagaagatgcaagcacagaaggaagaagttcttagccacatgaatgatgtgctagagaatgagctccaatgtattatttgttcagaatacttcattgagcaaagagattgttctgaagaccgtgctctaagggcatttgaaagactgccaggtagtgcgagcctgagatggtctggaggattctctctagccgtgactccgctgctctgaaggtcaactgagaagtcttgtgggacagagacttgagttaggaagccctcagtcacttgccttccacggtggccagccctgctgccatcattggctgaagcaccaccaggattcacggcacccaactgcttcagggtacttcgtagactctgcctcactacatgtcgaaagagttatttgagttctcttctgtttttttttaatttgttgttgttgttactgttttgatacctcggaaacacctccgttgacagttgttttggataggttgggtgtaccccatggctgcctctgaaggcagtgtctattttgagaggatggcttacctcttctttgtgaaaatactatctcatttcctggaaataaaatgtaaaacctg

SEQ ID NO: 177565 - DNA, 608 bp, Homo sapiens
  Payload ID: 14839
  Gene Symbol: RNF8
  Gene Name: ring finger protein 8, E3 ubiquitin protein ligase
  ENST ID: ENST00000469316
  CDS Start-End: 93-362
ttagatatggaagctgaggggatgcacagaggcagccagaacctaggtcagggtctcgctcggtgctgaccgcccccggggtcgagtaggcgatgggggagcccggcttcttcgtcacaggagaccgcgccggtggccggagctggtgcctgcggcgggtggggatgagcgccgggtggctgctgctggaagatgggtgcgaggtgactgtaggacgaggatttggtgtcacataccaactggtatcaaaaatctgccccctgatgatttctcgaaaccactgtgttttgaagcagaatcctgagggccaatggacaattatggacaacaaggggaccaccagtttgtctaaggagaggtgaactgacccaggttggaaggagggcaggtcaaaactgctgtgctcatcaacaaagggattgcacctgtgaatagccactgcactccagtgtggctgacatagtgaagccctgtcgctatcaaaaagaaaagaagatacctaaagtgcagatatacaagcaccgaggaatgtgatgaaaatacagactatgagagtctaaatggtgtttggctgaacagagcgcgtctggaacctttaagggtctatt

SEQ ID NO: 177566 - DNA, 977 bp, Homo sapiens
  Payload ID: 14839
  Gene Symbol: RNF8
  Gene Name: ring finger protein 8, E3 ubiquitin protein ligase
  ENST ID: ENST00000494320
  CDS Start-End: 187-336
aggcgtagtgctcctgcttcctggccgagggcgggcgagcggagcctgctttcgcagcgatcgcgagcgtgtggcgattgcttctgtctgttatttagatatggaagctgaggggatgcacagaggcagccagaacctaggtcagggtctcgctcggtgctgaccgcccccggggtcgagtaggcgatgggggagcccggcttcttcgtcacaggagaccgcgccggtggccggagctggtgcctgcggcgggtggggatgagcgccgggtggctgctgctggaagatgggtgcgagggttgttatgaactagactggtccaacaggaaagtatgatagatgtgaactggggcttcttttcaaccttttccggaagctctcaagctgttcttgtggataagacagagaatatgtactccaatgcaaagacttttggttgaattataactggctgaaggtgactgtaggacgaggatttggtgtcacataccaactggtatcaaaaatctgccccctgatgatttctcgaaaccactgtgttttgaagcagaatcctgagggccaatggacaattatggacaacaagagtctaaatggtgtttggctgaacagagcgcgtctggaacctttaagggtctattccattcatcagggagactacatccaacttggagtgcctctggaaaataaggagaatgcggagtatgaatatgaagttactgaagaagactgggagacaatatatccttgtctttccccaaagaatgaccaaatgatagaaaaaaataaggaattgagaactaaaaggaaattcagtttggatgaattagcaggtcctggagctgaaggcccctcaaatttgaaatccaaaataaataaagtgtcttgtgaatctggtcagccagtgaaatcacaggggaaaggtgaagtggccagtacaccctctgacaatttggatcctaagttgactgcccttg

SEQ ID NO: 177567 - DNA, 3478 bp, Homo sapiens
  Payload ID: 14840
  Gene Symbol: RLIM
  Gene Name: ring finger protein, LIM domain interacting
  Uniprot ID: Q9NVW2
  ENST ID: ENST00000349225
  CDS Start-End: 282-2156
tttcctgtcgctgcttggtaacaatggggaagataatggctgcctgagcaacgtctccgagcaggcgctgggctagaggcgggtctcaaccagctactcattggaggcgggcttgagagcggcggccagggaggtgcggagcagcctcggcggcggcggccgaaccaaccgagtcggatcctgaccctaaaacctaagcagagtgaagaaaactaaaatccagtttattgtatttcaatactatgtcataacagtcaggtattttccacttgttcatcaatatggaaaactcagattccaatgacaaaggaagtggtgatcagtctgcagcacagcgcagaagtcagatggaccgattggatcgagaagaagctttctatcaatttgtaaataacctgagtgaagaagattataggcttatgagagataacaatttgctaggcaccccaggtgaaagtactgaggaagagttgctgagacgactacagcaaattaaagaaggcccaccaccgcaaaactcagatgaaaatagaggaggagactcttcagatgatgtgtctaatggtgactctataatagactggcttaactctgtcagacaaactggaaatacaacaagaagtgggcaaagaggaaaccaatcttggagagcagtgagtcggactaatccaaacagtggtgatttcagattcagtttagagataaatgttaaccgtaataatgggagccaaaattcagagaatgaaaatgagccatctgcaagacgttctagtggagaaaatgtggaaaacaacagccaaaggcaagtggaaaacccacgatctgaatcaacatctgcaaggccatctagatcagaacgaaattcaactgaagcgttaacagaggtcccacctaccagaggtcagaggagggcaagaagcaggagcccagaccatcggagaaccagagcaagagctgaaagaagtaggtcacctctgcatccaatgagtgaaattccacgaagatctcatcatagtatctcatctcagacttttgaacatcctttggtaaatgagacggagggaagttctagaacccggcaccatgtgacattgaggcagcaaatatctgggcctgagttgctaagtagaggtctttttgcagcttctggaacaagaaatgcttctcaaggagcaggttcttcagacacagctgccagtggtgaatctacaggatcaggacagagacctccaaccatagtccttgatcttcaagtaagaagagttcgtcctggagaatatcggcagagagatagcatagccagcagaactcggtctaggtctcagacaccaaacaacactgtcacctatgaaagtgaacgaggaggttttaggcgtacattttcacgttctgagcgggcaggtgtgagaacctatgtcagtaccatcagaattcccattcgtagaatcttaaatactggtttaagtgagactacatctgttgcaattcagaccatgttaaggcagataatgacaggttttggtgagttaagctattttatgtacagtgatagcgactcagagcctactggctcagtctcaaatcgaaatatggaaagggcagagtcacggagtggaagaggaggttctggtggtggtagtagttctggttccagttcgagttccagttccagttcgagttccagttccagttcaagttccagttccagtcctagttccagttccggtggtgaaagttcagaaactagctcagatttatttgaaggcagtaatgaaggaagctcatcatcaggctcatcaggtgccaggcgagagggtcgacatagggccccagtcacatttgatgaaagtggctctttgcccttccttagcctggctcagtttttcctcttaaatgaggatgatgatgaccaacctagaggactcaccaaagaacagattgacaacttggcaatgagaagttttggtgaaaatgatgcattaaaaacctgtagtgtttgcattacagaatatacagaaggcaacaaacttcgtaaactaccttgttcccatgagtaccatgtccactgcatcgatcgctggttatctgagaattctacctgtcctatttgtcgcagagcagtcttagcttctggtaacagagaaagtgttgtgtaattaagatctgaactctcagctatgtagctgatatagtgatgggcaaacaggaatcacttgcttttatgtccactttttgagtggtacttaaatgtaaagtaacaacctgaattgagtcattgctttctgaaggaatcattgtcctttctccagtttttgttccagaataaaaggaaatattttaaaagccacgttataggacctaaaaatctgatttccgtaccagttaaattggtagcatcactgttactgataatttatcatatacacttgtcaatttttcctttgttatcttaaaagatctgccttagcaatggctcctttttcatgttgatctttaaattttcccacaccataagagaggagcaaaggaaattaccagtttagactaagttacagtatgtgtttcataagtgattaaagctatatcattcccagttattagttaacacaaattcagccacattctgagtattgtttgttcacctttcagacttggtgatactggacatgtcagtgtaaataacactaaggttaggatcttctaagtgtataactgtctcctaagcccatcactgtggcacactgtagagtgagcttatagtttaattgagatatttatcttgtggaaatattaaaaagcctatgcttgtgtaagtgaaaaaaaatcacattcatttgtttaaaaatgtaaagctattttgtagaggctcagtacttttccaatgcactgttgtatgaatgcattaaaaattgtaaagtaccatgcttagaactgagaaaactgctttttgtgagccaacatagtaacaaacacaccaaacaaagtacaaagctgcttttgtaagtgtgtagatgtcaagagcagaacatatctataatatttaatgtgtgaacagctactgtgacatgcaaaggaaaggacagtgcagaattaaaccgtgttgaagaccagtggaaattgtataatttaacttggatttaggcaggaagtgaaatatgggaggagtaaagaaaactgaagaatttaaagttttcctgaagacagtaataatgcagacacaaactggtttcatatggtgagagcagccacagcagcagcttgacctggtattctacctgagtagatgaagcagaagatcagcaagtttggcagagttttggtttaagaaaaacaaaccactactacctagcacaagttaaatttacaagtctgctcctcaaaaatgaaaaaatggaggaaagagactataaaaccacttttagcatatgaattgcagttggtacacatgtgtgtgttaataggaaagtctcgaatttgt

SEQ ID NO: 177568 - DNA, 8317 bp, Homo sapiens
  Payload ID: 14840
  Gene Symbol: RLIM
  Gene Name: ring finger protein, LIM domain interacting
  Uniprot ID: Q9NVW2
  ENST ID: ENST00000332687
  CDS Start-End: 220-2094
tttcctgtcgctgcttggtaacaatggggaagataatggctgcctgagcaacgtctccgagcaggcgctgggctagaggcgggtctcaaccagctactcattggaggcgggcttgagagcggcggccagggaggtgcggagcagcctcggcggcggcggccgaaccaaccgagtcggatcctgaccctaaaacctagtattttccacttgttcatcaatatggaaaactcagattccaatgacaaaggaagtggtgatcagtctgcagcacagcgcagaagtcagatggaccgattggatcgagaagaagctttctatcaatttgtaaataacctgagtgaagaagattataggcttatgagagataacaatttgctaggcaccccaggtgaaagtactgaggaagagttgctgagacgactacagcaaattaaagaaggcccaccaccgcaaaactcagatgaaaatagaggaggagactcttcagatgatgtgtctaatggtgactctataatagactggcttaactctgtcagacaaactggaaatacaacaagaagtgggcaaagaggaaaccaatcttggagagcagtgagtcggactaatccaaacagtggtgatttcagattcagtttagagataaatgttaaccgtaataatgggagccaaaattcagagaatgaaaatgagccatctgcaagacgttctagtggagaaaatgtggaaaacaacagccaaaggcaagtggaaaacccacgatctgaatcaacatctgcaaggccatctagatcagaacgaaattcaactgaagcgttaacagaggtcccacctaccagaggtcagaggagggcaagaagcaggagcccagaccatcggagaaccagagcaagagctgaaagaagtaggtcacctctgcatccaatgagtgaaattccacgaagatctcatcatagtatctcatctcagacttttgaacatcctttggtaaatgagacggagggaagttctagaacccggcaccatgtgacattgaggcagcaaatatctgggcctgagttgctaagtagaggtctttttgcagcttctggaacaagaaatgcttctcaaggagcaggttcttcagacacagctgccagtggtgaatctacaggatcaggacagagacctccaaccatagtccttgatcttcaagtaagaagagttcgtcctggagaatatcggcagagagatagcatagccagcagaactcggtctaggtctcagacaccaaacaacactgtcacctatgaaagtgaacgaggaggttttaggcgtacattttcacgttctgagcgggcaggtgtgagaacctatgtcagtaccatcagaattcccattcgtagaatcttaaatactggtttaagtgagactacatctgttgcaattcagaccatgttaaggcagataatgacaggttttggtgagttaagctattttatgtacagtgatagcgactcagagcctactggctcagtctcaaatcgaaatatggaaagggcagagtcacggagtggaagaggaggttctggtggtggtagtagttctggttccagttcgagttccagttccagttcgagttccagttccagttcaagttccagttccagtcctagttccagttccggtggtgaaagttcagaaactagctcagatttatttgaaggcagtaatgaaggaagctcatcatcaggctcatcaggtgccaggcgagagggtcgacatagggccccagtcacatttgatgaaagtggctctttgcccttccttagcctggctcagtttttcctcttaaatgaggatgatgatgaccaacctagaggactcaccaaagaacagattgacaacttggcaatgagaagttttggtgaaaatgatgcattaaaaacctgtagtgtttgcattacagaatatacagaaggcaacaaacttcgtaaactaccttgttcccatgagtaccatgtccactgcatcgatcgctggttatctgagaattctacctgtcctatttgtcgcagagcagtcttagcttctggtaacagagaaagtgttgtgtaattaagatctgaactctcagctatgtagctgatatagtgatgggcaaacaggaatcacttgcttttatgtccactttttgagtggtacttaaatgtaaagtaacaacctgaattgagtcattgctttctgaaggaatcattgtcctttctccagtttttgttccagaataaaaggaaatattttaaaagccacgttataggacctaaaaatctgatttccgtaccagttaaattggtagcatcactgttactgataatttatcatatacacttgtcaatttttcctttgttatcttaaaagatctgccttagcaatggctcctttttcatgttgatctttaaattttcccacaccataagagaggagcaaaggaaattaccagtttagactaagttacagtatgtgtttcataagtgattaaagctatatcattcccagttattagttaacacaaattcagccacattctgagtattgtttgttcacctttcagacttggtgatactggacatgtcagtgtaaataacactaaggttaggatcttctaagtgtataactgtctcctaagcccatcactgtggcacactgtagagtgagcttatagtttaattgagatatttatcttgtggaaatattaaaaagcctatgcttgtgtaagtgaaaaaaaatcacattcatttgtttaaaaatgtaaagctattttgtagaggctcagtacttttccaatgcactgttgtatgaatgcattaaaaattgtaaagtaccatgcttagaactgagaaaactgctttttgtgagccaacatagtaacaaacacaccaaacaaagtacaaagctgcttttgtaagtgtgtagatgtcaagagcagaacatatctataatatttaatgtgtgaacagctactgtgacatgcaaaggaaaggacagtgcagaattaaaccgtgttgaagaccagtggaaattgtataatttaacttggatttaggcaggaagtgaaatatgggaggagtaaagaaaactgaagaatttaaagttttcctgaagacagtaataatgcagacacaaactggtttcatatggtgagagcagccacagcagcagcttgacctggtattctacctgagtagatgaagcagaagatcagcaagtttggcagagttttggtttaagaaaaacaaaccactactacctagcacaagttaaatttacaagtctgctcctcaaaaatgaaaaaatggaggaaagagactataaaaccacttttagcatatgaattgcagttggtacacatgtgtgtgttaataggaaagtctcgaatttgtgttgtttttgagatttgtcatttaaggtaccagtgcacacttgatcatatttcattactatctctaacacagtcctaacatctcaaatttaaagaccagttgaagattaagggatttttatcctttgttgaaagtcatgttgggttatttgaaattcaaattttaattgtgctgcccatatatgaaaatgagactgctgactcgctatctatggacatgcactttatgttggtttcttagtagtaagagtaacttcatgataaccccagtcttcttgcctaatttcttttttgagactagctggggttaggattagaatgactatggagcagatatttgttcttctgggaaaagctttaacaggccaaaatagggattgaacttgtccttggcctttatcaaagcaagctagctacccagacgtagtcaaatactctacaaaataaacaagtctgctttaggaattgtctgggtaccttcactgttaccaacttagctgtaaagattatttcaaagctcactcttccatgatttcttctggctttcaatcctatctaagtatcaaggaaattaacttgtaaatatggtagttgtttactaaggatatgtactgctcttgcaaggaaataatgtccaaacaaagcttcacttattttttttaatataagcagatttcactgtttatggcgcttatgtaatacattttatctttttaaaaatttgtccgtgtaaaagtcaggattcctttatatttgtgagcctccttttctcctttcctaaggatgtaatctacagttttcagatctgcagggtagtcttgattggctaaaaacaaatcaattttcttcttggcataaagtgtttcattattataggggtgttcattttaaatagtttaaaaacaattgcagcacattctaagcataagagaaagttattgacaacaggtaccttcctaatctcccaagacgtacttactcatttgtgaagtattaaagtaagaggtaactcaagcagaatgctggctatgaatgtagatattgaagctattcataaacactggaaatagaattttaagcttttagccttcagtggaatgcacatattggacatgtgcatgtgaacacctttttcagtagcactcacggatttccattcgattgtatagaatgaatacaagtgttttagtggaatttgctacttaatttttaatcttgcgatgtccgtgattattacatgcttactagtgttgtggacattgaagacaaggtcattcgtaggtgtcagattacaatggagaacaaaaatcgttttccccccacccacatccaaacaccattctcgagggagcatttcttgcaaaacaccttacatttcattttctatctttgcactttttcttaagtacagaaaagttgtctttaagacctagtttgaacttcatgcagtaagaggaacaaggataaacaatgttgggagttcacattgttcagagcataaggaaaagtaccaaaacccaaattttcttgaatatttcagatgtttttaaaaactcacttctagtctgaaacatttgaattgttttaactctgagcagctgacaaagttgaggtttttttgttttgttttgttttgttttgtttttttgagacagagtcttacttggttgcccaggatgaagtgcaatggagcgatctcggctcactgcaacctctgcctcctgggttcaagcaattctcctgtctcagcctctcgagtagctgggattacaggcgcatgccaccacacctggctagtttttatatttttagtagagatggggacttcaccgtgttggccaggctggtcttgaactcctgacctcaagtgatgtgcctgcctcggcctccgaaaatgctgggattacaggcgtgagccaccatgtccagccaaagttgaggtttattagtactattagaaacaaaattgagcaagttaagttaaaagtttgctgactttgtatcaacactatagaagatgagccaccttgttaatttggaatatttgctctgaaaagaacatgttagttacaccttaatggtgttaatggaggtggggattgagaaaagtgttcacattagtgttggaatgtaggtaattgtacagtttataagacctttagcaccaggaaataaaatatgtgtgtgtacacacacagtttttaaaaacgattggaattcatccaaaccttaagattaggaaactgattggctgtaagtgttgcctcaagtaatgtgtcccccgccccataacatgtcttttctgtgccaagtatcctctcctagtgtcagtgtctcaaattatatttatgaagggttatcacataatatgctttgtatttaactacctgcttcccaggcgtccatgacatgaaatgggtgaagcatcagccatgactttcggtcagttcccaaaatacccaaatgatagggaggtaaagattgcaaaattcctcttaaaaggccatttttacagcttgctaaaatacagtggcaccttatggttgttaatattttttcttttaaagatggagaatgtttttattcttccccttttctcctttgttcttttgcgaacaaaaaaaattataatctgccttatttgattttttttttaagttttaccttacaggcttccctgtcacatgttttaccatattaagtacatagaagccatgtttgcagggcacttttattctcctagtcttataagactatgctaattgttactttctgaagtattctgtaccttagtatgcaagattgttaaggcacatgttaaagtgtcaggtgtgtttttttccctttaattcttcagtatgtttatattcaataacagtattgtaattcattgagttaactagtaaattgtgtgcttttgaaaaaacatgaaaaatgtaaattgacagcatacttcatttggaaaaaagtaaaagatccgaggaactagtatgtcacttatttatttttattttattttattttttactttttgagacagggtcttgctctgtcacccaggctggagtgcagtggcatggtcacagctcactgcagccttgacttcctgggctcaggtgattctcccacctcagccttccaagtagctgggactacaggcatgcaccacattgcctggctaattttttgtggagatggggtttcgccatgttgtccaggctgttcttgaactcctgggctcaggcaatttgcctgcctcattctcccaaagtgctgggattataggcgtgagccactgcgcccagccttacttatttttaaatcagattttttaatcaactaaaacagctatgagttaagtacctgccctgcaaaaatttttagaaaaagttttaggattatgaaattaagaattattttccttaactggaacagttctaaaatttatctgatacttctctaacaagtgagtgatctcatgtaaccccagtttgtatcttaaaggctgcagcatagaattgagctgtataacagtgttagaactgtcaagtgataatcacagaacagtttgtatcggttttataattctcatgtcttgatcagatctgaaggaaataggcataccctccaacattctaaaaattatttatttttattaggatttgtttattaaagttccacgagctgctttatggtcagttgggctgagtagtagatatcttaaagacatgcagtgaaagtgaaccctgtcatatcatggtgcctctttcaaggttcctctgtaagttcctcatcttgcagaattatttcaataccaaggtatggttgaaccagctgtccagccttaactctatttagtgccccattactaatgttcttttaactggtttgtatgtgttttaactgtccagtgtttggattttacctcttgatagctccatttgtccctggtgctgcttttaaggatgtagggccatgtgatcaggtatcaagttgagtaggtacgcagttggcctggtgatgtatctgtgcctgttttatcttctcccaggaagagctgctttggtatagttgtttacttggattcatacaaagaacagggcagcaatcttggaaagctttctgaagcttataagaacctgaaggggtttggagggggaacagtaacaaaggctgcctttatgtctttggtcacaaagcacatagatgtatgttctgtaaagactaaagtgattgttataccagggcttcctgaccttcgggagagactcaaaaaagcagagaggagcacaaagtgaagttaatttggttggcttgctttatctggtttctcattttctttcaatttaaacctgaacataacacccttctccgatacctatccagcagactcctggttgggaagccctgtattaaattttgagaatgtacacagttttcttttgtacagtgctttacaactgctaaaagttaacttgtttaaagcaaaacaagaccttgaaaggtcaatcatattaaagctggtttgattattaatagttatcttttaggaagaagcttttttccctatgtaagatgtcatactgcagatttaaaatatagactatcaataaaatgcatgaagtgatcatttgtgcttgatcatctctccttgggtttttctttaaaaaggggaatctgctataaaggttctgttgcttcaaaccaatgtcaaatagacttgatttttagagtcatggaattacagtgcaaccttgatttttattcccctcactgctatgagtgtgggcaggtactggtttatatgttataacttccgttttatctgtgttgtgtagttgaatggcttaatcgttgagtggtaaaataaaagattatattccaatacaagaatcctggaaa

SEQ ID NO: 177569 - DNA, 2101 bp, Homo sapiens
  Payload ID: 14841
  Gene Symbol: RNFT1
  Gene Name: ring finger protein, transmembrane 1
  Uniprot ID: Q5M7Z0
  ENST ID: ENST00000305783
  CDS Start-End: 57-1364
gaagagcttgcggggtttgcggttgatggccccgactgaagggctggaggcggtgtatgccgctgttcttgctgtcgctcccgacacctccgtccgcttctggtcatgagaggagacagaggcctgaagcaaagacatctgggtcagagaaaaagtatttaagggccatgcaagccaatcgtagccaactgcacagtcctccaggaactggaagcagtgaggatgcctcaacccctcagtgtgtccacacaagattgacaggagagggttcttgccctcattctggagatgttcatatccagataaactccatacctaaagaatgtgcagaaaatgcaagctccagaaatataaggtcaggtgtccatagctgtgcccatggatgtgtacacagtcgcttacggggtcactcccacagtgaagcaaggctgactgatgatactgccgcagaatctggagatcatggtagtagctccttctcagaattccgctatctcttcaagtggctgcaaaaaagtcttccatatattttgattctgagcgtcaaacttgttatgcagcatataacaggaatttctcttggaattgggctgctaacaacttttatgtatgcaaacaaaagcattgtaaatcaggtttttctaagagaaaggtcctcaaagattcagtgtgcttggttactggtattcttagcaggatcttctgttcttttatattacacctttcattctcagtcactttattacagcttaatttttttaaatcctactttggaccatttgagcttctgggaagtattttggattgttggaattacagacttcattctgaaattctttttcatgggcttaaaatgccttattttattggtgccttctttcatcatgccttttaaatctaagggttactggtatatgcttttagaagaattgtgtcaatactaccgaacttttgttcccataccagtttggtttcgctaccttataagctatggggagtttggtaacgtaactagatggagtcttgggatactgctggctttactctacctcatattaaaacttttggaattttttgggcatctgagaactttcagacaggttttacgaatattttttacacaaccaagttatggagtggctgccagcaagagacagtgttcagatgtggatgatatttgttcaatatgtcaagctgaatttcagaagccaattcttctcatttgtcagcatatattttgtgaagagtgcatgaccttatggtttaacagagagaaaacatgtccactctgcagaactgtgatttcagaccatataaacaaatggaaggatggagccacttcatcacaccttcaaatatattaagttgtataaactatcaaggccacaaaatactaatgtcatttggtcataatgactactgataaggcatcagaatggattttcagggctaccagaaaaatgtttccagatggttttagaatgtaggacttatgatccaattcaccaaaagattaaatgaaaccaccctgtgttttaaaatatatataatgttcaacctaatgtatatgcaacatttattctattctaattatttgacaggtaactgcagtgttaaattgtaaatgtgttttctttatgttaccaaaacagcaatttgaaattagaactagtggttttagagaactcaggtattctttcctgacattgttttcagaataaagaatatttttcataatattttaagatacatactatctaaaagtagaattttgttcagcattgacttttataattcccatcctaaaaattcttaatattttcataaaatttgtatttttaaatgaaaattctaaatgttgtattttatcagtaacattttctaagtgaagattaatttactgaggatgatacattatagtattgtattattctctgtagtaagattagtaataagtgaaaataaatgatttaaattcattttgtctctggacgtcataaattcttcctgccatcagctttaatgttcatgatcatgctttttgtatagtaccatggagtatctcgaagtaactattaaaataattcatgtggattataaa

SEQ ID NO: 177570 - DNA, 868 bp, Homo sapiens
  Payload ID: 14841
  Gene Symbol: RNFT1
  Gene Name: ring finger protein, transmembrane 1
  ENST ID: ENST00000442346
  CDS Start-End: 75-671
gttgccgccgggctgagagaagagcttgcggggtttgcggttgatggccccgactgaagggctggaggcggtgtatgccgctgttcttgctgtcgctcccgacacctccgtccgcttctggtcatgagaggagacagaggcctgaagcaaagacatctgggtcagagaaaaagtatttaagggccatgcaagccaatcgtagccaactgcacagtcctccaggaactggaagcagtgaggatgcctcaacccctcagtgtgtccacacaagattgacaggagagggttcttgccctcattctggagatgttcatatccagataaactccatacctaaagaatgtgcagaaaatgcaagctccagaaatataaggtcaggtgtccatagctgtgcccatggatgtgtacacagtcgcttacggggtcactcccacagtgaagcaaggctgactgatgatactgccgcagaatctggagatcatggtagtagctccttctcagaattccgctatctcttcaaggctgcaaaaaagtcttccatatattttgattctgagcgtcaaacttgtatgcagcatataacaggaatttctcttggaattgggctgctaacaacttttatgtatgcaaacaaaagcattgtaaatcaggtttttctaagagtaagttaacaagcaactaaaaaattattaactgtttctctccatagattttagagaaataattttgagagaaataggaaataacttgaaagaaataggaagtaataggatatattgtaacatccacgttatgttaaatttgttatctaaatcctggaataaattatctctcctaatgctgaattccttcaccttaccttctttgt

SEQ ID NO: 177571 - DNA, 1893 bp, Homo sapiens
  Payload ID: 14841
  Gene Symbol: RNFT1
  Gene Name: ring finger protein, transmembrane 1
  Uniprot ID: Q5M7Z0
  ENST ID: ENST00000482446
  CDS Start-End: 72-809
gccgccgggctgagagaagagcttgcggggtttgcggttgatggccccgactgaagggctggaggcggtgtatgccgctgttcttgctgtcgctcccgacacctccgtccgcttctggtcatgagaggagacagaggcctgaagcaaagacatctgggtcagagaaaaagtatttaagggccatgcaagccaatcgtagccaactgcacagtcctccaggaactggaagcagtgaggatgcctcaacccctcagtgtgtccacacaagattgacaggagagggttcttgccctcattctggagatgttcatatccagataaactccatacctaaagaatgtgcagaaaatgcaagctccagaaatataaggtcaggtgtccatagctgtgcccatggatgtgtacacagtcgcttacggggtcactcccacagtgaagcaaggctgactgatgatactgccgcagaatctggagatcatggtagtagctccttctcagaattccgctatctcttcaagtggctgcaaaaaagtcttccatatattttgattctgagcgtcaaacttgttatgcagcatataacaggaatttctcttggaattgggctgctaacaacttttatgtatgcaaacaaaagcattgtaaatcaggtttttctaagacttaatttttttaaatcctactttggaccatttgagcttctgggaagtattttggattgttggaattacagacttcattctgaaattctttttcatgggcttaaaatgccttattttattggtgccttctttcatcatgccttttaaatctaagggttactggtatatgcttttagaagaattgtgtcaatactaccgaacttttgttcccataccagtttggtttcgctaccttataagctatggggagtttggtaacgtaactagatggagtcttgggatactgctggctttactctacctcatattaaaacttttggaattttttgggcatctgagaactttcagacaggttttacgaatattttttacacaaccaagttatggagtggctgccagcaagagacagtgttcagatgtggatgatatttgttcaatatgtcaagctgaatttcagaagccaattcttctcatttgtcagcatatattttgtgaagagtgcatgaccttatggtttaacagagagaaaacatgtccactctgcagaactgtgatttcagaccatataaacaaatggaaggatggagccacttcatcacaccttcaaatatattaagttgtataaactatcaaggccacaaaatactaatgtcatttggtcataatgactactgataaggcatcagaatggattttcagggctaccagaaaaatgtttccagatggttttagaatgtaggacttatgatccaattcaccaaaagattaaatgaaaccaccctgtgttttaaaatatatataatgttcaacctaatgtatatgcaacatttattctattctaattatttgacaggtaactgcagtgttaaattgtaaatgtgttttctttatgttaccaaaacagcaatttgaaattagaactagtggttttagagaactcaggtattctttcctgacattgttttcagaataaagaatatttttcataatattttaagatacatactatctaaaagtagaattttgttcagcattgacttttataattcccatcctaaaaattcttaatattttcataaaatttgtatttttaaatgaaaattctaaatgttgtattttatcagtaacattttctaagtgaagattaatttactgaggatgatacattatagtattgtattattctctgtagtaagattagtaataagtgaaaataaatgatttaaattca

SEQ ID NO: 177572 - DNA, 1809 bp, Homo sapiens
  Payload ID: 14841
  Gene Symbol: RNFT1
  Gene Name: ring finger protein, transmembrane 1
  ENST ID: ENST00000466544
  CDS Start-End: 99-617
ccggggagcgcgcgcgccgccgccgttgccgccgggctgagagaagagcttgcggggtttgcggttgatggccccgactgaagggctggaggcggtgtatgccgctgttcttgctgtcgctcccgacacctccgtccgcttctggtcatgagaggagacagaggcctgaagcaaagacatctgggtcagagaaaaagtatttaagggccatgcaagccaatcgtagccaactgcacagtcctccaggaactggaagcagtgaggatgcctcaacccctcagtgtgtccacacaagattgacaggagagggttcttgccctcattctggagatgttcatatccagataaactccatacctaaagaatgtgcagaaaatgcaagctccagaaatataaggtcaggtgtccatagctgtgcccatggatgtgtacacagtcgcttacggggtcactcccacagtgaagcaaggctgactgatgatactgccgcagaatctggagatcatggtagtagctccttctcagaattccgctatctcttcaagtggctgcaaaaaagtcttccatatattttgattctgagcgtcaaacttgttatgcagcatataacagcttaatttttttaaatcctactttggaccatttgagcttctgggaagtattttggattgttggaattacagacttcattctgaaattctttttcatgggcttaaaatgccttattttattggtgccttctttcatcatgccttttaaatctaagggttactggtatatgcttttagaagaattgtgtcaatactaccgaacttttgttcccataccagtttggtttcgctaccttataagctatggggagtttggtaacgtaactagatggagtcttgggatactgctggctttactctacctcatattaaaacttttggaattttttgggcatctgagaactttcagacaggttttacgaatattttttacacaaccaagttatggagtggctgccagcaagagacagtgttcagatgtggatgatatttgttcaatatgtcaagctgaatttcagaagccaattcttctcatttgtcagcatatattttgtgaagagtgcatgaccttatggtttaacagagagaaaacatgtccactctgcagaactgtgatttcagaccatataaacaaatggaaggatggagccacttcatcacaccttcaaatatattaagttgtataaactatcaaggccacaaaatactaatgtcatttggtcataatgactactgataaggcatcagaatggattttcagggctaccagaaaaatgtttccagatggttttagaatgtaggacttatgatccaattcaccaaaagattaaatgaaaccaccctgtgttttaaaatatatataatgttcaacctaatgtatatgcaacatttattctattctaattatttgacaggtaactgcagtgttaaattgtaaatgtgttttctttatgttaccaaaacagcaatttgaaattagaactagtggttttagagaactcaggtattctttcctgacattgttttcagaataaagaatatttttcataatattttaagatacatactatctaaaagtagaattttgttcagcattgacttttataattcccatcctaaaaattcttaatattttcataaaatttgtatttttaaatgaaaattctaaatgttgtattttatcagtaacattttctaagtgaagattaatttactgaggatgatacattatagtattgtattattctctgtagtaaga

SEQ ID NO: 177573 - DNA, 618 bp, Homo sapiens
  Payload ID: 14841
  Gene Symbol: RNFT1
  Gene Name: ring finger protein, transmembrane 1
  ENST ID: ENST00000484257
  CDS Start-End: 1-215
gggctgctaacaacttttatgtatgcaaacaaaagcattgtaaatcaggtttttctaagagaaaggtcctcaaagattcagtgtgcttggttactggtattcttagcaggatcttctgttcttttatattacacctttcattctcagtcactttattacaggctagaaaggtgtcaactatgacaaaccgtgaagactttttccttattctatgaagggaagatctaaaatccaaacagcttaatttttttaaatcctactttggaccatttgagcttctgggaagtattttggattgttggaattacagacttcattctgaaattctttttcatgggcttaaaatgccttattttattggtgccttctttcatcatgccttttaaatctaagggttactggtatatgcttttagaagaattgtgtcaatactaccgaacttttgttcccataccagtttggtttcgctaccttataagctatggggagtttggtaacgtaactagatggagtcttgggatactgctggctttactctacctcatattaaaacttttggaattttttgggcatctgagaactttcagacaggttttacgaatattttttacacaacca

SEQ ID NO: 177574 - DNA, 740 bp, Homo sapiens
  Payload ID: 14841
  Gene Symbol: RNFT1
  Gene Name: ring finger protein, transmembrane 1
  ENST ID: ENST00000589113
  CDS Start-End: 72-740
gccgccgggctgagagaagagcttgcggggtttgcggttgatggccccgactgaagggctggaggcggtgtatgccgctgttcttgctgtcgctcccgacacctccgtccgcttctggtcatgagaggagacagaggcctgaagcaaagacatctgggtcagagaaaaagtatttaagggccatgcaagccaatcgtagccaactgcacagtcctccaggaactggaagcagtgaggatgcctcaacccctcagtgtgtccacacaagattgacaggagagggttcttgccctcattctggagatgttcatatccagataaactccatacctaaagaatgtgcagaaaatgcaagctccagaaatataaggtcaggtgtccatagctgtgcccatggatgtgtacacagtcgcttacggggtcactcccacagtgaagcaaggctgactgatgatactgccgcagaatctggagatcatggaatttctcttggaattgggctgctaacaacttttatgtatgcaaacaaaagcattgtaaatcaggtttttctaagagaaaggtcctcaaagattcagtgtgcttggttactggtattcttagcaggatcttctgttcttttatattacacctttcattctcagtcactttattacagcttaatttttttaaatcctactttggaccatttgagcttctgggaagtattttggattgttggaattacagacttcattctg

SEQ ID NO: 177575 - DNA, 3882 bp, Homo sapiens
  Payload ID: 14842
  Gene Symbol: RNFT2
  Gene Name: ring finger protein, transmembrane 2
  Uniprot ID: Q96EX2
  ENST ID: ENST00000257575
  CDS Start-End: 234-1568
acatgctgcccaggctgcgcgggtgattggcttggctggacctgaatgatgcggctgtgattgctgaattgtctgggcaggtttggagtctctggcaagctcccctgactgtgcatccctctggagacgaagaggagggggaggcctgtcctctctgggatccattggtcacatccccctgaggattcccgaatgcctacctccagtgtcgtcaacatggagttctgaagtccatgtggctcttcacagtgaatcaggtgttaaggaagatgcagagacgccacagcagcaacacggataacattccacctgaaagaaaccgcagccaggcgctcagctccgaggcgagtgtggatgaaggtggcgtctttgagagtctgaaggcagaggcagcctccccaccagcgctcttctcgggcttatcaggcagcctccccaccagctcgttcccctccagcctggtgctgggctcctcggctggcggcggggacgtgttcatccagatgcccgcgtccagggaggaaggagggggccggggcgaggggggcgcctaccaccaccgccagccccaccaccatttccaccatggcggccaccgcgggggctccctgctgcagcacgtgggtggggaccaccgggggcactcggaggagggaggcgacgagcagcctgggacgcccgcccccgccctgtccgagctgaaggctgtgatctgctggctccagaaaggactccccttcatcctgatcctcctggccaaactgtgctttcagcataagctcggcattgctgtgtgcatcgggatggccagcaccttcgcctatgccaactccacgcttcgagaacaggtctcactgaaggagaagaggtcagtgctggtcatcttgtggatcctggcctttctggcggggaacaccctctatgtgctttatacattcagctcccagcagctgtacaacagcctcatattcctgaagcccaacctggagatgctggacttctttgacctgctatggattgtggggatcgcagactttgttctgaagtacatcaccatcgccctcaagtgcctcatcgtggccctgcccaagatcatcctggctgtcaagtccaagggaaagttctatctggtcatcgaggagctgagccagctgttccgatcccttgtccccatccagctgtggtacaaatacatcatgggtgacgactcctccaacagctacttcctgggcggggtcctgatcgttctctacagcctctgcaagtccttcgacatctgtggacgtgtgggcggagttaggaaagccctgaagcttctctgtacctctcagaactatggagtccgagccaccgggcagcagtgcacagaagctggtgacatctgcgccatctgtcaggccgagttccgagagcctctgattctcctgtgccagcacgtgttctgtgaggagtgcctctgcctgtggctggaccgtgagcgcacctgcccgctctgccgctcggtcgccgtggacaccctgcgctgctggaaggacggcgccacgtccgcacacttccaggtgtactaggaccgaacactgaggacacccagaaggacgccaagggtcagcatgcccggacccagccctgcgggggcttcctgagaaacaggcctcaagcacttacatcctgcctcttgccctccaccacctctgaccccaaagtcccgcccctgtcttgtccttctgaccttcatcttcctctctcgttctgtggtatagtgcgtgcctccttcccctgcaaaaggggacgtcttcctaactcagacttgatgcccttctagatgcatcttccttctccactccaagtcaaggacctggcaatacatgaagttcccacttgttggttattttctctttcttttttcttttcttttctttctctctctctctgtttccctccctccctccttccttccttccttccttttttttttttttttaaaacaaggtctcgctctatcacccaggctggagtgcagtggcacaatctcggctcgctgcaacctccacctcctgggttcaagcgattctcctgcctcagcctcccgagtagctgggattacaggcacccaccaacacacttggctaatttttgtattttttagtagagacagggttttgccatgttggccaggctggtctccaactcttgacctcaaatgatcagctcgcctcagcctcacgaagtgctgggattacaggcatgagccaccgtgcccaggctcacttttttttttttttttttttttttgagacagggtctgggtcttcacccaggctggagtgcagttggcacaatcacagctcactgcaaccttgaactcctgggcccaagccatcctcccgcctcagcctcccaagtagctgggactacaggtgtgtgccaccaggcctggctaatttttttttttttttaatttttagtagaggcgaggacttattatgttgtccagggtgttctcaaactcctgggctcaagcaatcctcctgtcctggcctcgcaaagtgctgagtgctggaattacaggtatgagcccctgtgcccagcccacctgctggttattttaacttagtacctagtacctaggacttgatggtgcaggctggggaggagcctagagatcactgcctcccagatagcccaggcctgcagattagaatccctgtgagccctgtgaagtattttttcttttcttttctttttttttttttttttgttgttgtgagacagagtcttgctctgttgcccaggctggagtgcaatagcacgatcttggctcactgcaacctccgcctcccgggttcaagtgattctcctgcctcagcctcccgagtagttgggacaacagatgcgtgccaccatgcccagctaattttttttttgtatttttagtagagatggggtttcaccacgttggccaggctggcctcaaactcctgacctcaagtgatccacctgcctcagcctcccagagtgctgggattacaggcatgagccaccacacctggcccaaagtattttcaaaatacagttgttgggccccaccatatacctgtaatgacttaaggtcccaaatacttcatgcgcagcaggcaaagcatgcagcatcctgcttggattacgtgctgtcatcctcacaacagccctgtgatgggggaggtactgttgggtcccctgttttatagatgaggaaacttgggcacagagcttggtgcggtaactttcccagggtcacccagccagcatgggcgggccaagtttccaacagaggcctggtacagtttcagaacccacatctaaaaaaaaataaatttattagagatgaggtttctaataaaaatccaggttgtccaggctagattcaaactcctgggctcaagtgatcctccctcctcagcctcccaagcagctgcaactacaggcacactccgctatccccagcagagcccgcactcttaacctccgcactgctctgcccctcagacattccaggcatggggcccagcagacacggtcttctaaaagcacacgagaggccgggtgtggtggcccatgcctgtagtgccagcattttgggaggctgaagcaggcgggtcacctgaggtcaagagttcaagactagcctggccaacatggcaaaaccccctctttactaaaaaatacaaaaattagccgggcgcggtggcgggtgcctgtaatcccagctactcaggaggctaaggcagggagaactgcttgaactcgggaggtgaaagttgcagtgagccgagattgcaccacagcactccaacctgggtgacagagtgagtgagactctgtctaaaaaaaaaaagaaagaaa

SEQ ID NO: 177576 - DNA, 2180 bp, Homo sapiens
  Payload ID: 14842
  Gene Symbol: RNFT2
  Gene Name: ring finger protein, transmembrane 2
  ENST ID: ENST00000319176
  CDS Start-End: 214-1179
gggtgattggcttggctggacctgaatgatgcggctgtgattgctgaattgtctgggcaggtttggagtctctggcaagctcccctgactgtgcatccctctggagacgaagaggagggggaggcctgtcctctctgggatccattggtcacatccccctgaggattcccgaatgcctacctccagtgtcgtcaacatggagttctgaagtccatgtggctcttcacagtgaatcaggtgttaaggaagatgcagagacgccacagcagcaacacggataacattccacctgaaagaaaccgcagccaggcgctcagctccgaggcgagtgtggatgaaggtggcgtctttgagagtctgaaggcagaggcagcctccccaccagcgctcttctcgggcttatcaggcagcctccccaccagctcgttcccctccagcctggtgctgggctcctcggctggcggcggggacgtgttcatccagatgcccgcgtccagggaggaaggagggggccggggcgaggggggcgcctaccaccaccgccagccccaccaccatttccaccatggcggccaccgcgggggctccctgctgcagcacgtgggtggggaccaccgggggcactcggaggagggaggcgacgagcagcctgggacgcccgcccccgccctgtccgagctgaaggctgtgatctgctggctccagaaaggactccccttcatcctgatcctcctggccaaactgtgctttcagcataagctcggcattgctgtgtgcatcgggatggccagcaccttcgcctatgccaactccacgcttcgagaacaggtctcactgaaggagaagaggtcagtgctggtcatcttgtggatcctggcctttctggcggggaacaccctctatgtgctttatacattcagctcccagattgcaccacagcactccaacctgggtgacagagtgagtgagactctgtctaaaaaaaaaaagaaagaaagaagggagggagggaggaaggaaggaaggaaggaaagaaagaaaggtcagctttggcccagatgtggttaccccttggtctcctgtctttatgtctttctcctcttcctattctgtcatctccctcacttaagtctcaggcctgtcagcagctcctgtggacattgccatcccctctggtagccttcagagcaaacaggacaacctatgttatggatgtttccaccaaccagggtagtggcatggagcaccgtaaccatctgtgcttctgtgatctctatgacagagccacttctccacctctgaaatgttccctgctctgaaatctggcatgagatggcacaggtgaccacgcagaagccaccagaatcttgcctgccctattcctcctcccaagtctgttctcttattgtcaacctcagcacaacaggctggcgccaatggcattacagagaaagcaatctgtgtggctagtgggcagattaccatgcaagccccaggagaaatggaggagctttgtagccacctcgctgtcagccagtattaacatgtccccttccccctgccccgccgtagattcaggacatttgcccctgtgtgccaccaaaccaggactttccccttggcttggcatccctggctctctcctggtacccagcaagacgtctgttccagggcagtgtagcatctttcaagctccgttactatggcgatggccatgatgttacaatcccacttgcctgaataatcaagtgggaaggggaagcagagggaaatggggccatgtgaatgcagctgctctgttctccctaccctgaggaaaaaccaaagggaagcaacaggaacttctgcaactggtttttatcggaaagatcatcctgcctgcagatgctgttgaaggggcacaagaaattggagctggagaagattgatgaaagtgcaggtgtgtaaggaaatagaacagtctgctgggagtcagacctggaattctgattccaaactctttattactttgggaagtcactcagcctccctgtagccatctccagggtgacggaacccagtgtattacctgctggaaccaaggaaactaacaatgtaggttactagtgaataccccaatggtttctccaattatgcccatgccaccaaaacaataaaacaaaattctctaacactgcaaa

SEQ ID NO: 177577 - DNA, 2896 bp, Homo sapiens
  Payload ID: 14842
  Gene Symbol: RNFT2
  Gene Name: ring finger protein, transmembrane 2
  Uniprot ID: Q96EX2
  ENST ID: ENST00000392549
  CDS Start-End: 234-1568
acatgctgcccaggctgcgcgggtgattggcttggctggacctgaatgatgcggctgtgattgctgaattgtctgggcaggtttggagtctctggcaagctcccctgactgtgcatccctctggagacgaagaggagggggaggcctgtcctctctgggatccattggtcacatccccctgaggattcccgaatgcctacctccagtgtcgtcaacatggagttctgaagtccatgtggctcttcacagtgaatcaggtgttaaggaagatgcagagacgccacagcagcaacacggataacattccacctgaaagaaaccgcagccaggcgctcagctccgaggcgagtgtggatgaaggtggcgtctttgagagtctgaaggcagaggcagcctccccaccagcgctcttctcgggcttatcaggcagcctccccaccagctcgttcccctccagcctggtgctgggctcctcggctggcggcggggacgtgttcatccagatgcccgcgtccagggaggaaggagggggccggggcgaggggggcgcctaccaccaccgccagccccaccaccatttccaccatggcggccaccgcgggggctccctgctgcagcacgtgggtggggaccaccgggggcactcggaggagggaggcgacgagcagcctgggacgcccgcccccgccctgtccgagctgaaggctgtgatctgctggctccagaaaggactccccttcatcctgatcctcctggccaaactgtgctttcagcataagctcggcattgctgtgtgcatcgggatggccagcaccttcgcctatgccaactccacgcttcgagaacaggtctcactgaaggagaagaggtcagtgctggtcatcttgtggatcctggcctttctggcggggaacaccctctatgtgctttatacattcagctcccagcagctgtacaacagcctcatattcctgaagcccaacctggagatgctggacttctttgacctgctatggattgtggggatcgcagactttgttctgaagtacatcaccatcgccctcaagtgcctcatcgtggccctgcccaagatcatcctggctgtcaagtccaagggaaagttctatctggtcatcgaggagctgagccagctgttccgatcccttgtccccatccagctgtggtacaaatacatcatgggtgacgactcctccaacagctacttcctgggcggggtcctgatcgttctctacagcctctgcaagtccttcgacatctgtggacgtgtgggcggagttaggaaagccctgaagcttctctgtacctctcagaactatggagtccgagccaccgggcagcagtgcacagaagctggtgacatctgcgccatctgtcaggccgagttccgagagcctctgattctcctgtgccagcacgtgttctgtgaggagtgcctctgcctgtggctggaccgtgagcgcacctgcccgctctgccgctcggtcgccgtggacaccctgcgctgctggaaggacggcgccacgtccgcacacttccaggtgtactaggaccgaacactgaggacacccagaaggacgccaaggattcaggacatttgcccctgtgtgccaccaaaccaggactttccccttggcttggcatccctggctctctcctggtacccagcaagacgtctgttccagggcagtgtagcatctttcaagctccgttactatggcgatggccatgatgttacaatcccacttgcctgaataatcaagtgggaaggggaagcagagggaaatggggccatgtgaatgcagctgctctgttctccctaccctgaggaaaaaccaaagggaagcaacaggaacttctgcaactggtttttatcggaaagatcatcctgcctgcagatgctgttgaaggggcacaagaaattggagctggagaagattgatgaaagtgcaggtgtgtaaggaaatagaacagtctgctgggagtcagacctggaattctgattccaaactctttattactttgggaagtcactcagcctccctgtagccatctccagggtgacggaacccagtgtattacctgctggaaccaaggaaactaacaatgtaggttactagtgaataccccaatggtttctccaattatgcccatgccaccaaaacaataaaacaaaattctctaacactgcaaagagtgagccatgcctgttaacactgtaaagaatgtaacatgtgggggacacacaggggcagatgggatggtttagtttaggattttattagtgcatgccctaccctctgggggaacgtcccatctgaggttttcttctcggtggggggatttaacttctgtcctagggaaaacagtgtctgatgaggagtgtttccaacacaggctacatgaattcccctataccagtgcgaaagcagccaggagtccccgttggaaaagaacaatgccactctcttttatgtatcttggttctgcaactcatttgttgtaagtagggttaatcgagtatcaggttcacagtatcctgcccttattattttatgattcactgactcaagttccacgaagtccttagaaatggacctcttcatgtaaaatatcttgagaataataaatgtgagggaataagaaaggcaagctttggacacagatatgataggtgcatcagcttcggaagagaagaatgatgtgcagagtgttaggaagacatccgggctgctgagactcgggattagaagaaagagaggtaaataaagtgggtcctggaatcttttaggacttctgctgtaggacaaacagctgcctttggtgttttaatgtctcccaaagtacccttcagccaataaataccatctgttggtgc

SEQ ID NO: 177578 - DNA, 2415 bp, Homo sapiens
  Payload ID: 14842
  Gene Symbol: RNFT2
  Gene Name: ring finger protein, transmembrane 2
  Uniprot ID: Q96EX2
  ENST ID: ENST00000407967
  CDS Start-End: 234-1496
acatgctgcccaggctgcgcgggtgattggcttggctggacctgaatgatgcggctgtgattgctgaattgtctgggcaggtttggagtctctggcaagctcccctgactgtgcatccctctggagacgaagaggagggggaggcctgtcctctctgggatccattggtcacatccccctgaggattcccgaatgcctacctccagtgtcgtcaacatggagttctgaagtccatgtggctcttcacagtgaatcaggtgttaaggaagatgcagagacgccacagcagcaacacggataacattccacctgaaagaaaccgcagccaggcgctcagctccgaggcgagtgtggatgaaggtggcgtctttgagagtctgaaggcagaggcagcctccccaccagcgctcttctcgggcttatcaggcagcctccccaccagctcgttcccctccagcctggtgctgggctcctcggctggcggcggggacgtgttcatccagatgcccgcgtccagggaggaaggagggggccggggcgaggggggcgcctaccaccaccgccagccccaccaccatttccaccatggcggccaccgcgggggctccctgctgcagcacgtgggtggggaccaccgggggcactcggaggagggaggcgacgagcagcctgggacgcccgcccccgccctgtccgagctgaaggctgtgatctgctggctccagaaaggactccccttcatcctgatcctcctggccaaactgtgctttcagcataagctcggcattgctgtgtgcatcgggatggccagcaccttcgcctatgccaactccacgcttcgagaacaggtctcactgaaggagaagaggtcagtgctggtcatcttgtggatcctggcctttctggcggggaacaccctctatgtgctttatacattcagctcccagcagctgtacaacagcctcatattcctgaagcccaacctggagatgctggacttctttgacctgctatggattgtggggatcgcagactttgttctgaagtacatcaccatcgccctcaagtgcctcatcgtggccctgcccaagatcatcctggctgtcaagtccaagggaaagttctatctggtcatcgaggagctgagccagctgttccgatcccttgtccccatccagctgtggtacaaatacatcatgggtgacgactcctccaacagctacttcctgggcggggtcctgatcgttctctacagcctctgcaagtccttcgacatctgtggacgtgtgggcggagttaggaaagccctgaagcttctctgtacctctcagaactatggagtccgagccaccgggcagcagtgcacagaagctggtgacatctgcgccatctgtcaggccgagttccgagagcctctgattctcctgtgccagatgctgttgaaggggcacaagaaattggagctggagaagattgatgaaagtgcaggtgtgtaaggaaatagaacagtctgctgggagtcagacctggaattctgattccaaactctttattactttgggaagtcactcagcctccctgtagccatctccagggtgacggaacccagtgtattacctgctggaaccaaggaaactaacaatgtaggttactagtgaataccccaatggtttctccaattatgcccatgccaccaaaacaataaaacaaaattctctaacactgcaaagagtgagccatgcctgttaacactgtaaagaatgtaacatgtgggggacacacaggggcagatgggatggtttagtttaggattttattagtgcatgccctaccctctgggggaacgtcccatctgaggttttcttctcggtggggggatttaacttctgtcctagggaaaacagtgtctgatgaggagtgtttccaacacaggctacatgaattcccctataccagtgcgaaagcagccaggagtccccgttggaaaagaacaatgccactctcttttatgtatcttggttctgcaactcatttgttgtaagtagggttaatcgagtatcaggttcacagtatcctgcccttattattttatgattcactgactcaagttccacgaagtccttagaaatggacctcttcatgtaaaatatcttgagaataataaatgtgagggaataagaaaggcaagctttggacacagatatgataggtgcatcagcttcggaagagaagaatgatgtgcagagtgttaggaagacatccgggctgctgagactcgggattagaagaaagagaggtaaataaagtgggtcctggaatcttttaggacttctgctgtaggacaaacagctgcctttggtgttttaatgtctcccaaagtacccttcagccaataaataccatctgttggtgcaa

SEQ ID NO: 177579 - DNA, 1761 bp, Homo sapiens
  Payload ID: 14842
  Gene Symbol: RNFT2
  Gene Name: ring finger protein, transmembrane 2
  ENST ID: ENST00000547718
  CDS Start-End: 187-312
gatgcggctgtgattgctgaattgtctgggcaggtttggagtctctggcaagctcccctgactgtgcatccctctggagacgaagaggagggggaggcctgtcctctctgggatccattggtcacatccccctgaggattcccgaatgcctacctccagtgtcgtcaacatggagttctgaagtccatgtggctcttcacagtgaatcaggtgttaaggaagatgcagagacgccacagcagcaacacggataacattccacctgaaagctgtgaccaaggctggcccctctggggaactgggggccattgaacttgaagactgcagagccagcggtccttgggatcccgagaaaccgcagccaggcgctcagctccgaggcgagtgtggatgaaggtggcgtctttgagagtctgaaggcagaggcagcctccccaccagcgctcttctcgggcttatcaggcagcctccccaccagctcgttcccctccagcctggtgctgggctcctcggctggcggcggggacgtgttcatccagatgcccgcgtccagggaggaaggagggggccggggcgaggggggcgcctaccaccaccgccagccccaccaccatttccaccatggcggccaccgcgggggctccctgctgcagcacgtgggtggggaccaccgggggcactcggaggagggaggcgacgagcagcctgggacgcccgcccccgccctgtccgagctgaaggctgtgatctgctggctccagaaaggactccccttcatcctgatcctcctggccaaactgtgctttcagcataagctcggcattgctgtgtgcatcgggatggccagcaccttcgcctatgccaactccacgcttcgagaacaggtctcactgaaggagaagaggtcagtgctggtcatcttgtggatcctggcctttctggcggggaacaccctctatgtgctttatacattcagctcccagcagctgtacaacagcctcatattcctgaagcccaacctggagatgctggacttctttgacctgctatggattgtggggatcgcagactttgttctgaagtacatcaccatcgccctcaagtgcctcatcgtggccctgcccaagatcatcctggctgtcaagtccaagggaaagttctatctggtcatcgaggagctgagccagctgttccgatcccttgtccccatccagctgtggtacaaatacatcatgggtgacgactcctccaacagctacttcctgggcggggtcctgatcgttctctacagcctctgcaagtccttcgacatctgtggacgtgtgggcggagttaggaaagccctgaagcttctctgtacctctcagaactatggagtccgagccaccgggcagcagtgcacagaagctggtgacatctgcgccatctgtcaggccgagttccgagagcctctgattctcctgtgccagatgctgttgaaggggcacaagaaattggagctggagaagattgatgaaagtgcaggtgtgtaaggaaatagaacagtctgctgggagtcagacctggaattctgattccaaactctttattactttgggaagtcactcagcctccctgtagccatctccagggtgacggaacccagtgtattacctgctggaaccaaggaaactaacaatgtaggttactagtgaataccccaatggtttctccaattatgcccatgccaccaaaacaataaaacaaaattctctaacactg

SEQ ID NO: 177580 - DNA, 2176 bp, Homo sapiens
  Payload ID: 14842
  Gene Symbol: RNFT2
  Gene Name: ring finger protein, transmembrane 2
  ENST ID: ENST00000622220
  CDS Start-End: 484-1179
gggtgattggcttggctggacctgaatgatgcggctgtgattgctgaattgtctgggcaggtttggagtctctggcaagctcccctgactgtgcatccctctggagacgaagaggagggggaggcctgtcctctctgggatccattggtcacatccccctgaggattcccgaatgcctacctccagtgtcgtcaacatggagttctgaagtccatgtggctcttcacagtgaatcaggtgttaaggaagatgcagagacgccacagcagcaacacggataacattccacctgaaagaaaccgcagccaggcgctcagctccgaggcgagtgtggatgaaggtggcgtctttgagagtctgaaggcagaggcagcctccccaccagcgctcttctcgggcttatcaggcagcctccccaccagctcgttcccctccagcctggtgctgggctcctcggctggcggcggggacgtgttcatccagatgcccgcgtccagggaggaaggagggggccggggcgaggggggcgcctaccaccaccgccagccccaccaccatttccaccatggcggccaccgcgggggctccctgctgcagcacgtgggtggggaccaccgggggcactcggaggagggaggcgacgagcagcctgggacgcccgcccccgccctgtccgagctgaaggctgtgatctgctggctccagaaaggactccccttcatcctgatcctcctggccaaactgtgctttcagcataagctcggcattgctgtgtgcatcgggatggccagcaccttcgcctatgccaactccacgcttcgagaacaggtctcactgaaggagaagaggtcagtgctggtcatcttgtggatcctggcctttctggcggggaacaccctctatgtgctttatacattcagctcccagattgcaccacagcactccaacctgggtgacagagtgagtgagactctgtctaaaaaaaaaaagaaagaaagaagggagggagggaggaaggaaggaaggaaggaaagaaagaaaggtcagctttggcccagatgtggttaccccttggtctcctgtctttatgtctttctcctcttcctattctgtcatctccctcacttaagtctcaggcctgtcagcagctcctgtggacattgccatcccctctggtagccttcagagcaaacaggacaacctatgttatggatgtttccaccaaccagggtagtggcatggagcaccgtaaccatctgtgcttctgtgatctctatgacagagccacttctccacctctgaaatgttccctgctctgaaatctggcatgagatggcacaggtgaccacgcagaagccaccagaatcttgcctgccctattcctcctcccaagtctgttctcttattgtcaacctcagcacaacaggctggcgccaatggcattacagagaaagcaatctgtgtggctagtgggcagattaccatgcaagccccaggagaaatggaggagctttgtagccacctcgctgtcagccagtattaacatgtccccttccccctgccccgccgtagattcaggacatttgcccctgtgtgccaccaaaccaggactttccccttggcttggcatccctggctctctcctggtacccagcaagacgtctgttccagggcagtgtagcatctttcaagctccgttactatggcgatggccatgatgttacaatcccacttgcctgaataatcaagtgggaaggggaagcagagggaaatggggccatgtgaatgcagctgctctgttctccctaccctgaggaaaaaccaaagggaagcaacaggaacttctgcaactggtttttatcggaaagatcatcctgcctgcagatgctgttgaaggggcacaagaaattggagctggagaagattgatgaaagtgcaggtgtgtaaggaaatagaacagtctgctgggagtcagacctggaattctgattccaaactctttattactttgggaagtcactcagcctccctgtagccatctccagggtgacggaacccagtgtattacctgctggaaccaaggaaactaacaatgtaggttactagtgaataccccaatggtttctccaattatgcccatgccaccaaaacaataaaacaaaattctctaacactg

SEQ ID NO: 177581 - DNA, 7512 bp, Homo sapiens
  Payload ID: 14843
  Gene Symbol: RYBP
  Gene Name: RING1 and YY1 binding protein
  Uniprot ID: Q8N488
  ENST ID: ENST00000477973
  CDS Start-End: 1-952
gcttcctgcgcccgccgcggcccttcccggggcgccgccgccaccgcctggtgtgcgaggctatccggcccgggcccggggcttgcagggtgccagtgggggcgcccggttcccttcctcgctctctcttccagtccccggaaagggtgggtgggtggtctcccgagcgaagtttccagcactggattcctgcgaaattacgacggctcacccgcgtctgtgttttgctgtctctcccccgttttcctgctccctgcctcttccctcccttttcccccactctccactcctcggaaggccaaaaagacaagcgaaacctgccgcagacgaagggttttgggattgtagcgtctgcaccttcagaaacagtgctgaagcctttaaatgcagcatctgcgatgtgaggaaaggcacctccaccagaaaacctcggatcaattctcagctggtggcacaacaagtggcacaacagtatgccaccccaccaccccctaaaaaggagaagaaggagaaagttgaaaagcaggacaaagagaaacctgagaaagacaaggaaattagtcctagtgttaccaagaaaaataccaacaagaaaaccaaaccaaagtctgacattctgaaagatcctcctagtgaagcaaacagcatacagtctgcaaatgctacaacaaagaccagcgaaacaaatcacacctcaaggccccggctgaaaaacgtggacaggagcactgcacagcagttggcagtaactgtgggcaacgtcaccgtcattatcacagactttaaggaaaagactcgctcctcatcgacatcctcatccacagtgacctccagtgcagggtcagaacagcagaaccagagcagctcggggtcagagagcacagacaagggctcctcccgttcctccacgccaaagggcgacatgtcagcagtcaatgatgaatctttctgaaattgcacatggaattgtgaaaactatgaatcagggtatgaaattcaaaacctccacctgcccatgctgcttgcatccctggagaatcttctgtggacatcgacctcttagtgatgctgccaggataatttctgcttgccatgggcatctggccaccaaggaatttcgcaccctgacgattactcttgacacttttatgtattccattgttttatatgattttcctaacaatcatttataattggatgtgctcctgaatctactttttataaaaaaaaaaaaatctgctgtgcacaattttccatgtacattacaactggttttttgtttttgttttgttgccggtggggagggctgggagggggagggaacttttatttattgtgttcacaaactccatcctttcagcatatccttttaagtttagttctttcttccagttatactatgtactatcagttttgatataactatatatatataaatataaaattatatataaagggttatttgaaaccaatccatggcaacgctggtgcttgatacactgtgaagtgaatacaacattgaacagttacagatctgggacagtcccttctatgaaagtgctgaaatttaattaaaatcagtcttatatgaagtatgttccaatccatgtgggaacttgactctctcatctgtctaaagagtactggacgatataaaaatatatattttttaaacaatgtgatctcaaatttaaagactgctccagatagcctgcatttgcaatggaataactgacaaatcacaagtggtttagttgggcagggctttgatcattcaaaagtaactaaagtagctccagaatgccaagtattcgtgtaaattacggttacatgttatcatttgctgttcttacataagcactcatgaaaatatggtattctgtaacttgaattccatccattttccagacctctactcatgtctgaggtaaatctagaaattgtcttagttttaggattgaaacagtctataaactgtatttttggtccatccaggaagctagtcccttgtttctcctttctacatgacattgcagtggtggtttctgtaattaaaatttgtttgcctcatgtccctttgtctgataaaccttcactctaccgattcagttgtgagcattctttttttccttctcaaaacctactatgatttgttttactgaacaaaggttatcaaccacacatccagtcctgacatggagcttttcagtgtttggagacatttctcaatcccctgctgtggtaggaactccagtggtgaacggcttgcgcgcctgcagccagagttgcagggaaagctcgtacttactgcgagcagcatgtaatcttttttcttcctggacataaagatagcttgagtaaactgttctatttcattctcttcactctttttactgtcttgcaaaaaaaaaaaaaaaaaaaataatcaaagaccactaataagattccacctctccttattaaaataattttttaaaattttgttttgcttttgtttggatgtggggtctctcttctatttgacttttacatttagatacagagtttgtagtacttcagagacatttcaagcatgagaatttgaggttacctctctttatttgacctttagggactcacgggagggcagcctgatttgtaatgaagcaccacattttggtgttaaaaacctggtttgcttaataatagcagtaatttctgtctgtggaggcaacaaataaaaaaattaacagcttgaattgagtagccaacaggaaaggttcctttcacatttacattaaaactattctgtagtcactaatgtaccataatttaaattcttttctcaaaggtatagattataaagcagtgccatttgttgctgtggtcctattctcaaatgcatggacaatgttcccccctttttaaaataatgcttgtgtctgggatgcaagctttgcttatctttttaaatacatttttaaagtatttattaatgaaccaaaggaaatcagatgctttctataagcatcagaatatataatacatagtgatttgactatgaattttaaatccacattttaatattggtgggatattgcaaagacattccttctaaagttttaatattccttttattaagggtctcagggagggtaaattagtcagccatatttattttccagaggtttaagaaattgctgtttttaactttttgaaaaaacttaaatgccaccaaactcatgtaggttgcactgcttattgaaccaataactgttggtatgcactttgttcagacacactgtgtactttttcaaaaactagtttcatgtaaagtgattggaccccatagattagtggaaaaagctgattaaccagctactcataggctgctaattcattcatgccaatgttttggtttttcagttttgcctccgtgataaattaaagaatggggaggggtgaaggaaggggaagaagattgctttagaacaagtggcatgaaattaccatctttgtagaaaccgcagctaacagtgggagttatctaagcaatcagatgttacagggccagccctttagctgctgtggtgtattctgttgggtagtgaggtagtaggtactttatagacttttaattttggaaattgatgacatccctcaggcatgtattctggaaatggaattcctgtaacttcctgtgtctgcagtatgccctacaattagtaggcagcgtgtaaaaacactagtgtagattataaagatatacattaaaagaggaccagaaatacttggtattcagtggcacagaaagcaggttaaacaaacaaaaagcacagtgttacgcttgcaagtttccatttgttttaataccacgcaatctttcacactcgtgcgtgtgcgcgcacacagagcttacctgacttgctctgcttgagtcatgcagttacaaaaaaaaagacatcttgacacccacacaatattctaatcaaaacctttcagtttcaatctggatatttaaaaacattggcagaagcttctgtgagtttagttccactaagatgtttcacctgccttatcaagaccattctcagtctacttttttaagctaccgtatcttaaattattgaaaatttattaattgctgaatatataataacctttgcttgtatgtaaccgaaaatggtttaagagccaacatttagagtatgacaatggagctgaacagtttttaatgcgcaagcagttctgttcttgtgtatgacttgtaaccttaatttactgtgtaaagatggttacattatttccttagctttgtttgttggagacaaatagagaatgcttgttaagtatgtcaaaacaatcttatcttgtgaatttttgttaatgtattatacgagctatatttttcatttgcccagaaagacagcttgtataacgcttttggaagtttctgctctgtaatgtctttagagctgacagtctgttaggtttgtttttttcttcatgctaaagtgtcagttggtggttttgtgaactggtcaaaaattcacaggtcttaaatgttttgggggaaatttatattggacactgctctttgtctagcaaataaaagatgttaatatattcctgttactggcatgtgcacgactatgttattagaagccactttatcattttcctgctttaaatagaaatgtctatttatgaattctgcttgtagttttttcacaaataaaatagtaaaatttacattggaaatctttatttttgtgtgtatagattttagcctttagaataatagttaatttttaatctgtggaatatttccaatgtgaataggaagctcactttgtattttagaacttgtttatcagaagctgaaatagctgggtatcttaagtacatacctcaaagatgcaaaaggagacataatggggcaaaagaatcaccaaaatttgaaagaaaatgaactgtctcctaagtgtaacctttgagatagattgcaatgatgtaaaggaaggaaatgggatttaaggaaagaaaatggagatgatgctaaaatatgctaattgaggactgaaaatcctcaaaagacaacccctgtttctggccaactggatttaggtcaactatgtctcagagatgtgaataaagtgtgttactaacctaaaagccacacaagctcacttattgccccatgcgagggagactcctgcctgctgctgcaggtgctgaggcataccagtctataaccttccaaagaattaagaaaccacttaaaacatgtcaagatccatccccgattattttgtcctgggtctgcacctgaactagcactggaaggaagagagtgtaaatagcgcaggatgttgagttgaaaatgggtctgttctgataaaacagcaagttccattcttcgtcctcattttttagtactgaacgtgacccaagtttggcccctcagaagtcttggaaaggatctggaagggttgaaggacagggattggatggggtctctcatgtttcccacaggccattttggatacagacgtgcgatctgctaaccccatgcccctctgcttgcttttgtgcctgaggagttcactgtgagggcccccactgctggtggcactggtaccatcctttggaggaggatgggaattgtctcccataccaggtgtggaccaaagcaagcacttggtctttacaggggaggcacaaggaagagtcgtttctttccagttgtgtggacggaaagggaggcaaaaaggttttctctaatcctcagccaaactctagtgttaacaccaagtgtccagatccccattgagaaatcccatggctagagtgtgacaggatcatggaagcagctcttgctcaattattcttgatcaagggtggaatgacgacttcagccagcaagggcccaggcttgtgctctctgatttcatagccctacggcgtggaaatggaaaccagccagactccaccttgggcagtgaagagaacataagggacgtccaggaggcccttggtctagcacgcccctgacctcccagcggttctggaaggccactcctaacccttcaaaccatagcaaggaaggttagagctatctttgtgttaggatcaaaactcgagaaggttctgtttgctaaccactgaaggaagcccacggcctgtctttagggcttctgtcaggagaggacaatggacatagacaactagatactgcaggagggctctggttttctcagacaggatcctaggatgtgtctggaagcctgcggagtgaaggtagacatgcaggtgtgatgttctgcctgatagtgcctctctccaggcattaactacaaggctgggtgggggcttactgtaaggcatcgagtccctaagcatttatacagtcccaattgtgcatcagtgcagtgctggttataacagggaagaatttgtggaggggagggcacaggctgaaattggcccattcctacacatgctcttgacctagacctagagtaagtgacattgaccccaaccgtccccctacccacctccagcttgtgccagacatcactaatcagtcacagcgcttctttccagctgaatccagactcagaatcctcattagagctcattgttagcacgtcttcctgaagtgcaacccatttgccattccttccctggacgaaacccaccccaaataactgggaaacccttcaaggcagtttttaatcaacacttcaattgtggaactgcatgaatccaagaaggccagctgagaagctcggaggagtcaggaaggaagaaaactaaatatccaacacccaactcttcaaagagttcaacttcctgttcaaaacagggtcagaccaggggattcttagtgaggccagtgatgagcactgtaactttaaatgcagccctgaaccccagacctgaaggcctgccagtgtcttaccctacaggccagaccgggacctacttgcccaagctgtcctactggttctgtcaaccgggggctctcaaataacagagtagaacaccacatggatatgattcctggaaaccacagaactaggtgagactcctacctctgactgcctgggtgtccttgggcaagtcagctgaccgggccatttccctcagttgtcaagtagggattagaggtgtatgtgctcctactgtgttctctgctccaaggaatcatggcgcagtgctcccagaggtgggttgtgtgttaccatgtttttaacaacgggaagcaaaaactttatttgaactttcattctgatgcttcactgatgacaccggaaatgaagataatttgttttgtgattgttttattgtgttttcaagttttaattcatgaattttcctgtactaaaacaaagagcaaagttggttaaagcctgcatgtaaataaagtccagtgggatttttgacacctgcttgacgtttctatgtctacaaacagtgttgtaatgaatacggcctttcatcattaaacattcgattttttaaaaatga

SEQ ID NO: 177582 - DNA, 4661 bp, Homo sapiens
  Payload ID: 14843
  Gene Symbol: RYBP
  Gene Name: RING1 and YY1 binding protein
  ENST ID: ENST00000628983
  CDS Start-End: 199-879
gcggggactagtctcgtccggagactggcagcggcggcggcggcggcggccggagctcgagccccagcggctgagggcgggcgggcgggcgcgggggagggaggggggccggtccgcgacgactccccggacggcgtttctcctccgagcggcgccggtttcggcttggggggggcggggtacagcccatccatgaccatgggcgacaagaagagcccgaccaggccaaaaagacaagcgaaacctgccgcagacgaagggttttgggattgtagcgtctgcaccttcagaaacagtgctgaagcctttaaatgcagcatctgcgatgtgaggaaaggcacctccaccagaaaacctcggatcaattctcagctggtggcacaacaagtggcacaacagtatgccaccccaccaccccctaaaaaggagaagaaggagaaagttgaaaagcaggacaaagagaaacctgagaaagacaaggaaattagtcctagtgttaccaagaaaaataccaacaagaaaaccaaaccaaagtctgacattctgaaagatcctcctagtgaagcaaacagcatacagtctgcaaatgctacaacaaagaccagcgaaacaaatcacacctcaaggccccggctgaaaaacgtggacaggagcactgcacagcagttggcagtaactgtgggcaacgtcaccgtcattatcacagactttaaggaaaagactcgctcctcatcgacatcctcatccacagtgacctccagtgcagggtcagaacagcagaaccagagcagctcggggtcagagagcacagacaagggctcctcccgttcctccacgccaaagggcgacatgtcagcagtcaatgatgaatctttctgaaattgcacatggaattgtgaaaactatgaatcagggtatgaaattcaaaacctccacctgcccatgctgcttgcatccctggagaatcttctgtggacatcgacctcttagtgatgctgccaggataatttctgcttgccatgggcatctggccaccaaggaatttcgcaccctgacgattactcttgacacttttatgtattccattgttttatatgattttcctaacaatcatttataattggatgtgctcctgaatctactttttataaaaaaaaaaaaaatctgctgtgcacaattttccatgtacattacaactggttttttgtttttgttttgttgccggtggggagggctgggagggggagggaacttttatttattgtgttcacaaactccatcctttcagcatatccttttaagtttagttctttcttccagttatactatgtactatcagttttgatataactatatatatataaatataaaattatatataaagggttatttgaaaccaatccatggcaacgctggtgcttgatacactgtgaagtgaatacaacattgaacagttacagatctgggacagtcccttctatgaaagtgctgaaatttaattaaaatcagtcttacatgaagtatgttccaatccatgtgggaacttgactctctcatctgtctaaagagtactggacgatataaaaatatatattttttaaacaatgtgatctcaaatttaaagactgctccagatagcctgcatttgcaatggaataactgacaaatcacaagtggtttagttgggcagggctttgatcattcaaaagtaactaaagtagctccagaatgccaagtattcgtgtaaattacggttacatgttatcatttgctgttcttacataagcactcatgaaaatatggtattctgtaacttgaattccatccattttccagacgtctactcatgtctgaggtaaatctagaaattgtcttagttttaggattgaaacagtctataaactgtatttttggtccatccaggaagctagtcccttgtttctcctttctacatgacattgcagtggtggtttctgtaattaaaatttgtttgcctcatgtccctttgtctgataaaccttcactctaccgattcagttgtgagcattctttttttccttctcaaaacctactatgatttgttttactgaacaaaggttatcaaccacacatccagtcctgacatggagcttttcagtgtttggagacatttctcaatcccctgctgtggtaggaactccagtggtgaacggcttgcgcgcctgcagccagagttgcagggaaagctcgtacttactgcgagcagcatgtaatcttttttcttcctggacataaagatagcttgagtaaactgttctatttcattctcttcactctttttactgtcttgcaaaaaaaaaaataataataataataatcaaagaccactaataagattccacctctccttattaaaataattttttaaaattttgttttgcttttgtttggatgtggggtctctcttctatttgacttttacatttagatacagagtttgtagtacttcagagacatttcaagcatgagaatttgaggttacctctctttatttgacctttagggactcacgggagggcagcctgatttgtaatgaagcaccacattttggtgttaaaaacctggtttgcttaataatagcagtaatttctgtctgtggaggcaacaaataaaaaaattaacagcttgaattgagtagccaacaggaaaggttcctttcacatttacattaaaactattctgtagtcactaatgtaccataatttaaattcttttctcaaaggtatagattataaagcagtgccatttgttgctgtggtcctattctcaaatgcatggacaatgttcccccctttttaaaataatgcttgtgtctgggatgcaagctttgcttatctttttaaatacatttttaaagtatttattaatgaaccaaaggaaatcagatgctttctataagcatcagaatatataatacatagtgatttgactatgaattttaaatccacattttaatattggtgggatattgcaaagacattccttctaaagttttaatattccttttattaagggtctcagggagggtaaattagtcagccatatttattttccagaggtttaagaaattgctgtttttaactttttgaaaaaacttaaatgccaccaaactcatgtaggttgcactgcttattgaaccaataactgttggtatgcactttgttcagacacactgtgtactttttcaaaaactagtttcatgtaaagtgattggaccccatagattagtggaaaaagctgattaaccagctactcataggctgctaattcattcatgccaatgttttggtttttcagttttgcctccgtgataaattaaagaatggggaggggtgaaggaaggggaagaagattgctttagaacaagtggcatgaaattaccatctttgtagaaaccgcagctaacagtgggagttatctaagcaatcagatgttacagggccagccctttagctgctgtggtgtattctgttgggtagtgaggtagtaggtactttatagacttttaattttggaaattgatgacatccctcaggcatgtattctggaaatggaattcctgtaacttcctgtgtctgcagtatgccctacaattagtaggcagcgtgtaaaaacactagtgtagattataaagatatacattaaaagaggaccagaaatacttggtattcagtggcacagaaagcaggttaaacaaacaaaaagcacagtgttacgcttgcaagtttccatttgttttaataccacgcaatctttcacactcgtgcgtgtgcgcgcacacagagcttacctgacttgctctgcttgagtcatgcagttacaaaaaaaaagacatcttgacacccacacaatattctaatcaaaacctttcagtttcaatctggatatttaaaaacattggcagaagcttctgtgagtttagttccactaagatgtttcacctgccttatcaagaccattctcagtctacttttttaagctaccgtatcttaaattattgaaaatttattaattgctgaatatataataacctttgcttgtatgtaaccgaaaatggtttaagagccaacatttagagtatgacaatggagctgaacagtttttaatgcgcaagcagttctgttcttgtgtatgacttgtaaccttaatttactgtgtaaagatggttacattatttccttagctttgtttgttggagacaaatagagaatgcttgttaagtatgtcaaaacaatcttatcttgtgaatttttgttaatgtattatacgagctatatttttcatttgcccagaaagacagcttgtataacgcttttggaagtttctgctctgtaatgtctttagagctgacagtctgttaggtttgtttttttcttcatgctaaagtgtcagttggtggttttgtgaactggtcaaaaattcacaggtcttaaatgttttgggggaaatttatattggacactgctctttgtctagcaaataaaagatgttaatatattcctgttactggcatgtgcacgactatgttattagaagccactttatcattttcctgctttaaatagaaatgtctatttatgaattctgcttgtagttttttcacaaataaaatagtaaaattt

SEQ ID NO: 177583 - DNA, 1188 bp, Homo sapiens
  Payload ID: 14844
  Gene Symbol: RBX1
  Gene Name: ring-box 1, E3 ubiquitin protein ligase
  Uniprot ID: P62877
  ENST ID: ENST00000216225
  CDS Start-End: 41-367
gcaggcgcggtggtcggacgacagaccgtgtgtttccaaaatggcggcagcgatggatgtggataccccgagcggcaccaacagcggcgcgggcaagaagcgctttgaagtgaaaaagtggaatgcagtagccctctgggcctgggatattgtggttgataactgtgccatctgcaggaaccacattatggatctttgcatagaatgtcaagctaaccaggcgtccgctacttcagaagagtgtactgtcgcatggggagtctgtaaccatgcttttcacttccactgcatctctcgctggctcaaaacacgacaggtgtgtccattggacaacagagagtgggaattccaaaagtatgggcactaggaaaagacttcttccatcaagcttaattgttttgttattcatttaatgactttccctgctgttacctaattacaaattggatggaactgtgtttttttctgctttgttttttcagtttgctgtttctgtagccatattgtattctgtgtcaaataaagtccagttggattctggaacggatgctctctcttgtgtatgtgaacaaagtgaacataaatgaagagtctccccttccaaggctgaaaactcagcttttgaaagtgaaatgtttgttcatcggggccagagcagggttgtcctctgagcgcatcacttagtgacgaggaatccaacagctcaaggcagagtgtggatcaccggctcccgaaaacagcagtcagcccttctttctcctgtgtgacagcagtgggcagctgaaagagggaagaatgtgggattcagtcatcaaacccagttctgagtcctggttccacagcttgggtactgatggcaatcttggccaagttgtctctctactctgaactttcctcctctgtactgtgggcttctgaggactaagtggcatcatgtgggcacagagagaagctttgtaaaatgtaaaaccgctatacaaatgtgacctttggttgtgtatgacagcagtccccaacctttttgccaccagggattggtttcatggaagacgatttttccatggaccgggggtggggcgggggtgtgcttggggatggttttggaactgttccacctgagatcatgaggcagtagatggaccgcgcaacctagatccctcacatgcacggttcgccaatagggttgaa

SEQ ID NO: 177584 - DNA, 2810 bp, Homo sapiens
  Payload ID: 14845
  Gene Symbol: RIOK1
  Gene Name: RIO kinase 1
  Uniprot ID: Q9BRS2
  ENST ID: ENST00000379834
  CDS Start-End: 508-2214
agcgaccctactgtgggtgcggtgtcttcccagagagtggtgaagttaggaaggtacgaccccctaggccgaacagcctgtgggctagctggcgcctcctgccgcagtaaacacaaagtggggtacagaaacgaaaactccgggaagaaacggccagcacgggcctcgccgtgccggctactcaacacgccttcctgagagcacagaacatccacagccctatacagcgcgccatccagagagctccggactcccagctcggcgcaggggcgggacttccgctcaagtcagacttccgggcgaggcggtgaggggcttccggttggggtggcagggtggtggatctgtcggtcccgttttcccgtcgcacgtggtggccactgttggcttctgaatggtttgcaaggcggatatccacgccaaggcctttggatcggccgtgggtacatccgtctgagccgttcctttccatcgcagagcggcggcctccggcggcgctctccagtcatggactaccggcggcttctcatgagccgggtggtccccgggcaattcgacgacgcggactcctctgacagtgaaaacagagacttgaagacagtcaaagagaaggatgacattctgtttgaagaccttcaagacaatgtgaatgagaatggtgaaggtgaaatagaagatgaggaggaggagggttatgacgatgatgatgatgactgggactgggatgaaggagttggaaaactcgccaagggttatgtctggaatggaggaagcaacccacaggcaaatcgacagacctccgacagcagttcagccaaaatgtctactccagcagacaaggtcttacggaaatttgagaataaaattaatttagataagctaaatgttactgattccgtcataaataaagtcaccgaaaagtctagacaaaaggaagcagatatgtatcgcatcaaagataaggcagacagagcaactgtagaacaggtgttggatcccagaacaagaatgattttattcaagatgttgactagaggaatcataacagagataaatggctgcattagcacaggaaaagaagctaatgtataccatgctagcacagcaaatggagagagcagagcaatcaaaatttataaaacttctattttggtgttcaaagatcgggataaatatgtaagtggagaattcagatttcgtcatggctattgtaaaggaaaccctaggaaaatggtgaaaacttgggcagaaaaagaaatgaggaacttaatcaggctaaacacagcagagataccatgtccagaaccaataatgctaagaagtcatgttcttgtcatgagtttcatcggtaaagatgacatgcctgcaccactcttgaaaaatgtccagttatcagaatccaaggctcgggagttgtacctgcaggtcattcagtacatgagaagaatgtatcaggatgccagacttgtccatgcagatctcagtgaatttaacatgctgtaccacggtggaggcgtgtatatcattgacgtgtctcagtccgtggagcacgaccacccacatgccttggagttcttgagaaaggattgcgccaacgtcaatgatttctttatgaggcacagtgttgctgtcatgactgtgcgggagctctttgaatttgtcacagatccatccattacacatgagaacatggatgcttatctctcaaaggccatggaaatagcatctcaaaggaccaaggaagaacggtctagccaagatcatgtggatgaagaggtgtttaagcgagcatatattcctagaaccttgaatgaagtgaaaaattatgagagggatatggacataattatgaaattgaaggaagaggacatggccatgaatgcccaacaagataatattctataccagactgttacaggattgaagaaagatttgtcaggagttcagaaggtccctgcactcctagaaaatcaagtggaggaaaggacttgttctgattcagaagatattggaagctctgagtgctctgacacagactctgaagagcagggagaccatgcccgccccaagaaacacaccacggaccctgacattgataaaaaagaaagaaaaaagatggtcaaggaagcccagagagagaaaagaaaaaacaaaattcctaaacatgtgaaaaaaagaaaggagaagacagccaagacgaaaaaaggcaaatagaatgagaaccatattatgtacagtcattttcctcagttccttttctcgcctgaactcttaagctgcatctggaagatggcttattggttttaaccagattgtcatcgtggcactgtctgtgaagacggattcaaatgttttcatgtaactatgtaaaaagctctaagctctagagtctagatccagtcactgactctgtctggtgttgacagaggatttatttaagctattattttaataaagaactttgtacatttttatttttatatttttttctcttacaaatatgtttttggaagcatgataaatgtttaaatgtagtcaacatctgtaactcttacatgagtgtccagaggcactcatgggaaaattggttttgctttctttgtacacaccagagacccatctgaggtcatctgattataaggccatgtttatataaagggaatttcacccacagttcagctggctgttgattttcactgcaactctgcctttgtgtgtattggcgatcatttgtaatgctcttacacttcgtctttaatgttctttttggagttaggacctctcagttcataaagttttttacaattcaa

SEQ ID NO: 177585 - DNA, 960 bp, Homo sapiens
  Payload ID: 14845
  Gene Symbol: RIOK1
  Gene Name: RIO kinase 1
  ENST ID: ENST00000475351
  CDS Start-End: 211-498
gggcgaggcggtgaggggcttccggttggggtggcagggtggtggatctgtcggtcccgttttcccgtcgcacgtggtggccactgttggcttctgaatggtttgcaaggcggatatccacgccaaggcctttggatcggccgtgggtacatccgtctgagccgttcctttccatcgcagagcggcggcctccggcggcgctctccagtcatggactaccggcggcttctcatgagccgggtggtccccgggcaattcgacgacgcggactcctctgacagtgaaaacagagacttgaagacagtcaaagagaaggatgacattctgtttgaagaccttcaagacaatgtgaatgagaatggtgaaggtgaaatagaagatgaggaggaggagggttatgacgatgatgatgatgactgggactgggatgaaggagttggaaaactcgccaagggttatgtctggaatggaggaagcaacccacagctagtgccttagactctggaattcccttctaggcaaatcgacagacctccgacagcagttcagccaaaatgtctactccagcagacaaggtcttacggaaatttgagaataaaattaatttagataagctaaatgttactgattccgtcataaataaagtcaccgaaaagtctagacaaaaggaagcagatatgtatcgcatcaaagataaggcagacagagcaactgtagaacaggtgttggatcccagaacaagaatgattttattcaagatgttgactagaggaatcataacagagataaatggctgcattagcacaggaaaagaagctaatgtataccatgctagcacagcaaatggagagagcagagcaatcaaaatttataaaacttctattttggtgttcaaagatcgggataaatatgtaagtggagaattcagatttcgtcatggctattgtaaaggaaacccta

SEQ ID NO: 177586 - DNA, 3922 bp, Homo sapiens
  Payload ID: 14846
  Gene Symbol: RIOK2
  Gene Name: RIO kinase 2
  Uniprot ID: Q9BVS4
  ENST ID: ENST00000283109
  CDS Start-End: 70-1728
ggaataacgacctgccttacgctttgcggctgtcgtcggagaggcatctgggttcggactggggccgccatggggaaagtgaatgtggccaagttgcgttacatgagccgagatgacttcagggtcttgaccgcggttgaaatgggcatgaagaaccatgaaattgttcccggcagtttgattgcttctatagccagccttaaacatggtggctgtaataaagttttaagagaattagtgaaacataaactcatagcttgggagcgtaccaaaactgtccagggctatcggttgacaaatgcaggatatgattacctagctttgaaaacactttcttctaggcaagtagttgagtctgttggaaaccagatgggtgttggcaaagaatcagatatttacattgttgcaaatgaagaaggacaacaatttgcattaaagcttcacagactaggaagaacctcgtttcgaaatttgaaaaacaaacgcgattatcataaacataggcacaatgtgtcatggctatatttatctcgtctctctgccatgaaggaatttgcctatatgaaggcattgtatgagaggaaatttccagttccaaagccaattgattacaatcgtcatgcagtggtcatggaactcataaatggttatccactatgtcagatacaccatgttgaagatcctgcatcagtatatgatgaagctatggaactaattgtcaaacttgcaaatcatgggctgattcatggagattttaatgaatttaatctcattttggatgaaagtgaccatatcaccatgattgattttccacagatggtttcaacttctcatcccaatgctgagtggtattttgacagagatgttaaatgcattaaagatttctttatgaaacgtttcagctacgaaagtgagctttttccaacttttaaggatatcaggagagaagacactcttgatgtggaggtttctgccagtggctacacaaaggaaatgcaggcagatgatgaactgcttcatccattaggtccagatgataaaaatattgaaacaaaagagggatctgaattctcattttcagatggagaagtggcagaaaaagcagaggtttacgggtcagaaaatgaaagtgaacggaactgtctagaagaatcagagggctgctattgcagatcatctggagaccctgaacaaataaaggaagacagtttatcagaagagagtgctgatgcacggagttttgaaatgactgaattcaatcaagctttagaagaaataaaagggcaggttgttgaaaacaactctgtaactgaattttctgaggagaaaaacagaactgaaaattacaacaggcaagatggtcagagagttcaaggaggagtccctgctggctctgacgagtatgaagatgaatgccctcatctaattgccttgtcgtcattaaatagagaattcaggcctttcagagatgaagaaaatgtgggagctatgaatcagtatagaacaagaactctgagtatcacttcttcaggcagtgctgtaagctgttcaacaattcctccagaactggtgaaacagaaggtgaaacgtcagttgacaaaacagcaaaaatcagctgtcagacgtcgattgcagaaaggagaagcaaatatatttaccaagcaacgtagggaaaacatgcaaaatatcaaatcaagtttggaagcagccagcttttggggagaataatatatttaggatcttggatatgtttaatatattttttaaagttactgtaattcctttttgagccctcatttgtcttttttgagccaaggctatcatatattaataaataaaccctctttcatctataaatttggtcattcagtatgtgtcttgcaaagaataattacctgccaaagcagtccatttttttcaaagtaatttgggtaactacagttacgtaactttattagagacatttgcatatttttaaaaatctaaataacatttttgttgttttctgtttgttgaggatgatatgctacaatgcacataaagcaattagaacaatgtttagcacattcttaagcattcaataaaacatggctattagaatcataatgattctgaaattctgctgacaatttggttgcattttatttggcaactggaggacttcactgtcttatttttctttagaagtaaagataagcctttggaagtaaagataagccagtgatgcacaatttgcttaattaattgattaataatctgttttgtgccacttacattggtaatgtggtcatgagaatggaaacttacttgagatagtctaccacaatttttacagttggcagcttgtaagcaggcctgagtagcagaagagttaggggttggggaaggtggagtagaatgaggaatgaaatgttctttctcatatgcttattatataagtgggtccggaacatgttctcacctcaaggttaacaaatacctaatgcaggaaagaaaatacatagccatggtcccttcctcaaggactttataattcagtgagatgtaaagatgagtgcttaagtgtatgcacctgattattgtctcttcattgccgcataagtcggaaaaggggatcacttgcagcgaaaaatggccactagatggcaatatcaccccatagtcaccaaacaggattacttgcatccctaattatgttctaccagagggaatatagtacagacttttccaagattgataaagacagcagattccctttcacctttgccaaattaactctactagctatttgcaagacctgtaattatctaataaattggcttaaatatatagaagctagaaaatgccaattcctcttccctcaaaagttacctgacattcaaatatttaaatacccttgctttgcattttagatatatctttgaattcaggtattcattttgtataatctctcaacttttaagcatttttataatgtaaagttgaaaacagcttaatagaaccacagaatgtttattttggagtcattttcttatattcagagctatgaaagcaaattgggaataaagccttatcctgctcagctttacctagttgactcagttgacttttgagtatctactacataaaaagcccattactattaagaaactcaagacaaacatgatttttacctttaatagcctaagatttcttgtgggccaaggaattaattattccaatcagaaatggaggccttacctcatttgggcaaagattagtgctagttattgaagatttactaataaatgatctgttaaggaatttagttttttttggatatgttgttttggttgttgaaaactaaggtataattataatagttattttttgaagatatgtttggctagccatcaattagaagttagagagtttgtcctaacagataagctataaccctcacattttaaaacatgcatagtgaacaatgaacaaaaacaaattcaaaattttactaatgtaaagctgtatattgtgattgttaaaacacttttttttgcctaggagttccagatttaaatcctggttctacacttcccaaacctcaggtaccttctgtggcctctctaacctcaatttttttacttgtaaaatggggacatttaatagtatacctcagtgtcgtgaagactaaatgaagtaccacttgtaaagagtttattacagtgcctgacatatactgtatggttagtactgctaaaatgacttcttaaggttaccaaaaggaaaattccacaagctgaccacctttcctattgtgatggtcactggtatttcagctatgatcctttgttgtgtatttatccagactgaaagatgtttttctagtaaccatcttgcatcgtcttagtctccccattaaataaacttttcctacaaacta

SEQ ID NO: 177587 - DNA, 2149 bp, Homo sapiens
  Payload ID: 14846
  Gene Symbol: RIOK2
  Gene Name: RIO kinase 2
  Uniprot ID: Q9BVS4
  ENST ID: ENST00000508447
  CDS Start-End: 32-1456
gagaggcatctgggttcggactggggccgccatggggaaagtgaatgtggccaagttgcgttacatgagccgagatgacttcagggtcttgaccgcggttgaaatgggcatgaagaaccatgaaattgttcccggcagtttgattgcttctatagccagccttaaacatggtggctgtaataaagttttaagagaattagtgaaacataaactcatagcttgggagcgtaccaaaactgtccagggctatcggttgacaaatgcaggatatgattacctagctttgaaaacactttcttctaggcaagtagttgagtctgttggaaaccagatgggtgttggcaaagaatcagatatttacattgttgcaaatgaagaaggacaacaatttgcattaaagcttcacagactaggaagaacctcgtttcgaaatttgaaaaacaaacgcgattatcataaacataggcacaatgtgtcatggctatatttatctcgtctctctgccatgaaggaatttgcctatatgaaggcattgtatgagaggaaatttccagttccaaagccaattgattacaatcgtcatgcagtggtcatggaactcataaatggttatccactatgtcagatacaccatgttgaagatcctgcatcagtatatgatgaagctatggaactaattgtcaaacttgcaaatcatgggctgattcatggagattttaatgaatttaatctcattttggatgaaagtgaccatatcaccatgattgattttccacagatggtttcaacttctcatcccaatgctgagtggtattttgacagagatgttaaatgcattaaagatttctttatgaaacgtttcagctacgaaagtgagctttttccaacttttaaggatatcaggagagaagacactcttgatgtggaggtttctgccagtggctacacaaaggaaatgcaggcagatgatgaactgcttcatccattaggtccagatgataaaaatattgaaacaaaagagggatctgaattctcattttcagatggagaagtggcagaaaaagcagaggtttacgggtcagaaaatgaaagtgaacggaactgtctagaagaatcagagggctgctattgcagatcatctggagaccctgaacaaataaaggaagacagtttatcagaagagagtgctgatgcacggagttttgaaatgactgaattcaatcaagctttagaagaaataaaagggcaggttgttgaaaacaactctgtaactgaattttctgaggagaaaaacagaactgaaaattacaacaggcaagatggtcagagagttcaaggaggagtccctgctggctctgacgagtatgaagatgaatgccctcatctaattgccttgtcgtcattaaatagagaattcaggcctttcaggtatagacttctgtcgattgctttttaactttagtcttgagactgatactttgttagattctagtaaaagaatgtttttttcaaatgatgtgacaaaattgtattctgccaccttgatgtataaaatgaaagccaaataattttttgttgttaaaaactcaaaatagcttccttttcaattgacctgattctaggcagcctattgactaaatttcaagtaattctgccttaaaatacaaactgatggctgggcacagtggctcgctcatgcctgtaatctcagcacttctgggaggccaaggcaggcaaatcacctgaggtcaggagtttgagaccagccaggccaacatggcaaaaccctgtctctactaaaaatataaaaattaaccgggcatggtggcctgtgcttgtaatcccagctacttgggagactgaggcaggagaatcacttgaacctgggaggcagaggttgcagtaagccaaagatcgtaccactgcactccagcctgggtgacgagcaaaaaactccgtctcaaaaatatatatatatatacaaactgatgattttaaaattattgcaggtctctggatacattgatcaggttttagatggatgagttattcctcatatattttcctaattacacatctgatgtgtgtttgagttatgtaaaggcatgtaaatattaaaacatgcaataaatgtactttctatatgaaa

SEQ ID NO: 177588 - DNA, 603 bp, Homo sapiens
  Payload ID: 14846
  Gene Symbol: RIOK2
  Gene Name: RIO kinase 2
  ENST ID: ENST00000511293
  CDS Start-End: 1-478
agatggtcagagagttcaaggaggagtccctgctggctctgacgagtatgaagatgaatgccctcatctaattgccttgtcgtcattaaatagagaattcaggcctttcagctgtgtatctgtgtcacagggctactgccatttaaataataaacttggaaaattaaatcagaagcttaaaaggaaaagaggggtgacagaggctcaggattttgaagatgaagaaaatgtgggagctatgaatcagtatagaacaagaactctgagtatcacttcttcaggcagtgctgtaagctgttcaacaattcctccagaactggtgaaacagaaggtgaaacgtcagttgacaaaacagcaaaaatcagctgtcagacgtcgattgcagaaaggagaagcaaatatatttaccaagcaacgtagggaaaacatgcaaaatatcaaatcaagtttggaagcagccagcttttggggagaataatatatttaggatcttggatatgtttaatatattttttaaagttactgtaattcctttttgagccctcatttgtcttttttgagccaaggctatcatatattaataaataaaccctctttcatcta

SEQ ID NO: 177589 - DNA, 442 bp, Homo sapiens
  Payload ID: 14846
  Gene Symbol: RIOK2
  Gene Name: RIO kinase 2
  ENST ID: ENST00000511012
  CDS Start-End: 1-422
cagaagagagtgctgatgcacggagttttgaaatgactgaattcaatcaagctttagaagaaataaaagggcaggttgttgaaaacaactctgtaactgaattttctgaggagaaaaacagaactgaaaattacaacaggcaagatggtcagagagttcaaggaggagtccctgctggctctgacgagtatgaagatgaatgccctcatctaattgccttgtcgtcattaaatagagaattcaggcctttcagagatgaagaaaatgtgggagctatgaatcagtatagaacaagaactctgagtatcacttcttcaggcagtgctgtaagctgttcaacaattcctccagtaagtagtcattcaacatgtactgaatgtttattacatcactactgtgatctgattgccttgtctcattaaacaataatgtatgcctttca

SEQ ID NO: 177590 - DNA, 493 bp, Homo sapiens
  Payload ID: 14846
  Gene Symbol: RIOK2
  Gene Name: RIO kinase 2
  ENST ID: ENST00000510384
  CDS Start-End: 52-165
acgctttgcggctgtcgtcggagaggcatctgggttcggactggggccgccatggggaaagtgaatgtggccaagttgcgttacatgagccgagatgacttcagggtcttgaccgcggtaagaaacccgccgttcctgttctcccttccccttaacactgtgtgacctcttcctgttcctgcaagttttctgggatctgagcaggcacactctgggacccgggacgtggcagaagctgggaatggagaagagagcattcagaaagtcggatttttaaaaaggttttgtttgggagcttaccttcccccagatagagcaaaggtcccgtcttctaataattgttttcttttctgctgctattcgctttgcgctgaagagaaacgcttgcatctctgtggcctggaaacttctctgatcctgagcttccgaccagctgtgaaaggttgaaatgggcatgaagaaccatgaaattgttcccggcagtttgattgct

SEQ ID NO: 177591 - DNA, 4038 bp, Homo sapiens
  Payload ID: 14847
  Gene Symbol: RIOK3
  Gene Name: RIO kinase 3
  Uniprot ID: O14730
  ENST ID: ENST00000339486
  CDS Start-End: 618-2177
aacaacaaccaccacaaactccgaccgtcctttccaggccctttccctctataaacctgccgttttctgtctcccaagtcatcccagtttagaactgctccaggaaataatgaatgaacagagagagcctagtttgtttatttatttacaatccactagtctaatctagtttagatccagcggcaatttttggggtgccaaggaggaaagaaggagatggcagtgcggggacagggcagagcctgggccaaaggaagccacacccagttcttgccctgccctgcccgacacaggcaacgtgaccccaagcgacagccagctgatgcttgcttctccgagcccggcggtcagcagccggaagtagcccgcccgggggcggggaaaggtgccttaaggaggagctaggggcgtgcggccaattgcaagcgactgtcctagcgaagagggcggaagaggagagatccagttccggacgcggccgccgccgtcgccgccatctgtcacctccactccggcatcagcagccagtcgcccgtgtcccgcctgtctcctcggcggagcctgctgcccgtcctgccacctctctgctctgttcttgtctctgccttcattcccgaatggatctggtaggagtggcatcgcctgagcccgggacggcagcggcctggggacccagcaagtgtccatgggctattcctcaaaatacaatatcttgttctttggctgatgtaatgagtgaacagctggccaaagaattgcagttagaagaagaagctgccgtttttcctgaagttgctgttgctgaaggaccatttattactggagaaaacattgatacttccagtgaccttatgctggctcagatgctacagatggaatatgacagagaatatgatgcacagcttaggcgtgaagaaaaaaaattcaatggagatagcaaagtttccatttcctttgaaaattatcgaaaagtgcatccttatgaagacagcgatagctctgaagatgaggttgactggcaggatactcgtgatgatccctacagaccagcaaaaccggttcccactcctaaaaagggctttattggaaaaggaaaagatatcaccaccaaacatgatgaagtagtatgtgggagaaagaacacagcaagaatggaaaattttgcacctgagtttcaggtaggagatggaattggaatggatttaaaactatcaaaccatgttttcaatgctttaaaacaacatgcctactcagaagaacgtcgaagtgcccgcctacatgagaaaaaggagcattctacagcagaaaaagcagttgatcctaagacacgtttacttatgtataaaatggtcaactctggaatgttggagacaatcactggctgtattagtacaggaaaggagtctgttgtctttcatgcatatggagggagcatggaggatgaaaaggaagatagtaaagttatacctacagaatgtgccatcaaggtatttaaaacaacccttaatgaatttaagaatcgtgacaaatatattaaagatgatttcaggtttaaagatcgcttcagtaaactaaatccacgtaagatcatccgcatgtgggcagaaaaagaaatgcacaatctcgcaagaatgcagagagctggaattccttgtccaacagttgtactactgaagaaacacattttagttatgtcttttattggccatgatcaagttccagcccctaaattaaaagaagtaaagctcaatagtgaagaaatgaaagaagcctactatcaaactcttcatttgatgcggcagttatatcatgaatgtacgcttgtccatgctgacctcagtgagtataacatgctgtggcatgctggaaaggtctggttgatcgatgtcagtcagtcagtagaacctacccaccctcacggcctggagttcttgttccgggactgcaggaatgtctcgcagtttttccagaaaggaggagtcaaggaagcccttagtgaacgagaactcttcaatgctgtttcaggcttaaacatcacagcagataatgaagctgattttttagctgagatagaagctttggagaaaatgaatgaagatcacgttcagaagaatggaaggaaagctgcttcatttttgaaagatgatggagacccaccactactatatgatgaatagcactaatacccactgcttcagtgttaacacagcagtgattgtcagctgccaatagcaaatgaagttatgggtgacttgaaataccaaaacctgaggagtgggcaatggtgcttctgtgcttttcccccttgtaacccatgtgccagatgtgtggaatttttagctcagcattgagagaataaaatgtcactacctctcatcttatgaacaggataatataattctttaacagctataggttatctggctgaagtagacctaattttatgtgacttgtggtgtaaaatgtcttgatgataatttttaaaacttgggtaacacttccaaatatgggaggaaaggacagatgtgtttacaagggaggattttacaacatacttgctttattcacctccctgttttgtgttgcgtctttccttgaatattttattggcccagagttagcctttctcaattatgtttccagactgtggccgtgattctaaaggaaaatgtgtgctctttagtgggtagaacaaatggaaatttggtttcagaatggctgacagaaatcgacataagtcatgtaatttttgttgatatatcatgaaaatgaacagaattctttttccatacttatatctaagaaaaggcatcataggtttctgaaagagataactatataacagctttttaactatccagtcaactttcagcttttctacatttaggtaaaatggttaggatataactcatggtgtggctaatctacatttatcaataaaatgtaaattatctgaaaggacagaatataagatttaaccatgtttgacgtattttaatttagttaatgaagcaaaattcagtttatatttcactagaactgtgtacttgattgattttcagagaaatatcacaaattagaaatattaaatctaaggatgaaaggtatatataaaacaatttgggggccaggcacgatggctcaaacctgtaatcccagcactttgggagaccaaggcgggtggatcacttgaggtcaggagttcaagaccagcctgggcaacatggcgaaaccctgtctctactaaaaatacaaaaattagccgggtgtggtggcacttctctgtaatctcagcttctcaggaggctgagacaggagaatcgcttgaacccgggaggcagaggttgcagtgagctgagatcatgccactgcactccggcctaggtgacagagggaaactccatctccaggaaaaaaaaaaaaaaacccaatttggataccaaattaatcaactaatttgagctatctggccttactcttagtagtttttagtacgtgctggacaccacttttaaaaagcaatcactgtgctagaaaagtatattggctttgttaggattaaagttcattaacttcaatgtaatcatgcctcctattactgaagtcagattggaaccactaaagatccaaactttctgtctggtaatagaaagtaaaaatctagacatcatttacatttgagaaagctgtttttaacattattttaaaatgccaaatatgttctttctagaaaaatatttatttttgtttttgttggatagcttttaattacatttcagagaggtgtaattttgggtagatgctcattacatttttgaaaggtttatgattccaaaataaagatttatatgactggtgatactggctttacagaaatttcagagaactaatttttaaaatctttagcatttaaaactttttttgttttgttttctgacatattctgacaaagagcagcaaaccactgctgtgtggcattcttggagtgtgctgtgaatgtgctttttaagaaattaaaaagagatcattttaaaattg

SEQ ID NO: 177592 - DNA, 1904 bp, Homo sapiens
  Payload ID: 14847
  Gene Symbol: RIOK3
  Gene Name: RIO kinase 3
  Uniprot ID: O14730
  ENST ID: ENST00000577501
  CDS Start-End: 133-1683
cgtcgccgccatctgtcacctccactccggcatcagcagccagtcgcccgtgtcccgcctgtctcctcggcggagcctgctgcccgtcctgccacctctctgctctgttcttgtctctgccttcattcccgaatggatctggtaggagtggcatcgcctgagcccgggacggcagcggcctggggacccagcaagtgtccatgggctattcctcaaaatacaatatcttgttctttggctgatgtaatgagtgaacagctggccaaagaattgcagttagaagaagaagctgccgtttttcctgaagttgctgttgctgaaggaccatttattactggagaaaacattgatacttccagtgaccttatgctggctcagatgctacagatggaatatgacagagaatatgatgcacagcttaggcgtgaagaaaaaaaattcaatggagatagcaaagtttccatttcctttgaaaattatcgaaaagtgcatccttatgaagacagcgatagctctgaagatgaggttgactggcaggatactcgtgatgatccctacagaccagcaaaaccggttcccactcctaaaaagggctttattggaaaaggaaaagatatcaccaccaaacatgatgaagtagtatgtgggagaaagaacacagcaagaatggaaaattttgcacctgagtttcaggtaggagatggaattggaatggatttaaaactatcaaaccatgttttcaatgctttaaaacaacatgcctactcagaagaacgtcgaagtgcccgcctacatgagaaaaaggagcattctacagcagaaaaagcagttgatcctaagacacgtttacttatgtataaaatggtcaactctggaatgttggagacaatcactggctgtattagtacaggaaaggagtctgttgtctttcatgcatatggagggagcatggaggatgaaaaggaagatagtaaagttatacctacagaatgtgccatcaaggtatttaaaacaacccttaatgaatttaagaatcgtgacaaatatattaaagatgatttcaggtttaaagatcgcttcagtaaactaaatccacgtaagatcatccgcatgtgggcagaaaaagaaatgcacaatctcgcaagaatgcagagagctggaattccttgtccaacagttgtactactgaagaaacacattttagttatgtcttttattggccatgatcaagttccagcccctaaattaaaagaagtaaagctcaatagtgaagaaatgaaagaagcctactatcaaactcttcatttgatgcggcagttatatcatgaatgtacgcttgtccatgctgacctcagtgagtataacatgctgtggcatgctggaaaggtctggttgatcgatgtcagtcagtcagtagaacctacccaccctcacggcctggagttcttgttccgggactgcaggaatgtctcgcagaaaggaggagtcaaggaagcccttagtgaacgagaactcttcaatgctgtttcaggcttaaacatcacagcagataatgaagctgattttttagctgagatagaagctttggagaaaatgaatgaagatcacgttcagaagaatggaaggaaagctgcttcatttttgaaagatgatggagacccaccactactatatgatgaatagcactaatacccactgcttcagtgttaacacagcagtgattgtcagctgccaatagcaaatgaagttatgggtgacttgaaataccaaaacctgaggagtgggcaatggtgcttctgtgcttttcccccttgtaacccatgtgccagatgtgtggaatttttagctcagcattgagagaataaaatgtcactacctctcatcttatgaacaggataatataa

SEQ ID NO: 177593 - DNA, 685 bp, Homo sapiens
  Payload ID: 14847
  Gene Symbol: RIOK3
  Gene Name: RIO kinase 3
  ENST ID: ENST00000577250
  CDS Start-End: 1-270
atcgatgtcagtcagtcagtagaacctacccaccctcacggcctggagttcttgttccgggactgcaggaatgtctcgcagtttttccagaaaggaggagtcaaggaagcccttagtgaacgagaactcttcaatgctgtttcaggcttaaacatcacagcagataatgaagctgattttttagctgaggttacagcaactccatgtaaagatgatggtgatgcaaggatttcagccaattcctgtctcagcatgggactctcctgctaatgcagcctgggatccttagaccagcagccagagatttccaatcctttggtaggcagggccagcgcccttaaatcagcaagaagacgacacagatgactgacctcctccctcatcaacccttaagaataagggatggaaatctctgaagggggaatgagataggaagatcactgggtgctcgcaagaggatggaagaatccacacaagagcttaaacaagagctaggcaaagaaactgtgggataacagaaaacccaaaatcaggaggagaaggctgggtttggtggctcatgactgtaatcccagcactgtgggaggctgaggagggcagatcacctgaggtcaggagttcgagaccagcctgtgcaatatggtgaaaccccttctctaccaaaaatacaaaaaaaaaaaaaaaa

SEQ ID NO: 177594 - DNA, 1966 bp, Homo sapiens
  Payload ID: 14847
  Gene Symbol: RIOK3
  Gene Name: RIO kinase 3
  ENST ID: ENST00000581585
  CDS Start-End: 154-1665
agttccggacgcggccgccgccgtcgccgccatctgtcacctccactccggcatcagcagccagtcgcccgtgtcccgcctgtctcctcggcggagcctgctgcccgtcctgccacctctctgctctgttcttgtctctgccttcattcccgaatggatctggtaggagtggcatcgcctgagcccgggacggcagcggcctggggacccagcaagtgtccatgggctattcctcaaaatacaatatcttgttctttggctgatgtaatgagtgaacagctggccaaagaattgcagttagaagaagaagctgccgtttttcctgaagttgctgaccttatgctggctcagatgctacagatggaatatgacagagaatatgatgcacagcttaggcgtgaagaaaaaaaattcaatggagatagcaaagtttccatttcctttgaaaattatcgaaaagtgcatccttatgaagacagcgatagctctgaagatgaggttgactggcaggatactcgtgatgatccctacagaccagcaaaaccggttcccactcctaaaaagggctttattggaaaaggaaaagatatcaccaccaaacatgatgaagtagtatgtgggagaaagaacacagcaagaatggaaaattttgcacctgagtttcaggtaggagatggaattggaatggatttaaaactatcaaaccatgttttcaatgctttaaaacaacatgcctactcagaagaacgtcgaagtgcccgcctacatgagaaaaaggagcattctacagcagaaaaagcagttgatcctaagacacgtttacttatgtataaaatggtcaactctggaatgttggagacaatcactggctgtattagtacaggaaaggagtctgttgtctttcatgcatatggagggagcatggaggatgaaaaggaagatagtaaagttatacctacagaatgtgccatcaaggtatttaaaacaacccttaatgaatttaagaatcgtgacaaatatattaaagatgatttcaggtttaaagatcgcttcagtaaactaaatccacgtaagatcatccgcatgtgggcagaaaaagaaatgcacaatctcgcaagaatgcagagagctggaattccttgtccaacagttgtactactgaagaaacacattttagttatgtcttttattggccatgatcaagttccagcccctaaattaaaagaagtaaagctcaatagtgaagaaatgaaagaagcctactatcaaactcttcatttgatgcggcagttatatcatgaatgtacgcttgtccatgctgacctcagtgagtataacatgctgtggcatgctggaaaggtctggttgatcgatgtcagtcagtcagtagaacctacccaccctcacggcctggagttcttgttccgggactgcaggaatgtctcgcagtttttccagaaaggaggagtcaaggaagcccttagtgaacgagaactcttcaatgctgtttcaggcttaaacatcacagcagataatgaagctgattttttagctgagatagaagctttggagaaaatgaatgaagatcacgttcagaagaatggaaggaaagctgcttcatttttgaaagatgatggagacccaccactactatatgatgaatagcactaatacccactgcttcagtgttaacacagcagtgattgtcagctgccaatagcaaatgaagttatgggtgacttgaaataccaaaacctgaggagtgggcaatggtgcttctgtgcttttcccccttgtaacccatgtgccagatgtgtggaatttttagctcagcattgagagaataaaatgtcactacctctcatcttatgaacaggataatataattctttaacagctataggttatctggctgaagtagacctaattttatgtgacttgtggtgtaaaatgtcttgatgataat

SEQ ID NO: 177595 - DNA, 591 bp, Homo sapiens
  Payload ID: 14847
  Gene Symbol: RIOK3
  Gene Name: RIO kinase 3
  ENST ID: ENST00000584130
  CDS Start-End: 1-406
tgcacctgagtttcaggtaggagatggaattggaatggatttaaaactatcaaaccatgttttcaatgctttaaaacaacatgcctactcagaagaacgtcgaagtgcccgcctacatgagaaaaaggagcattctacagcagaaaaagcagttgatcctaagacacgtttacttatgtataaaatggtcaactctggaatgttggagacaatcactggctgtattagtacaggaaaggagtctgttgtctttcatgcatatggagggagcatggaggatgaaaaggaagatagtaaagttatacctacagaatgtgccatcaagaatgcagagagctggaattccttgtccaacagttgtactactgaagaaacacattttagttatgtcttttattggccatgatcaagttccagcccctaaattaaaagaagtaaagctcaatagtgaagaaatgaaagaagcctactatcaaactcttcatttgatgcggcagttatatcatgaatgtacgcttgtccatgctgacctcagtgagtataacatgctgtggcatgctggaaaggtctggttgatcgatgtcagtcagt

SEQ ID NO: 177596 - DNA, 1172 bp, Homo sapiens
  Payload ID: 14848
  Gene Symbol: RIPPLY1
  Gene Name: ripply transcriptional repressor 1
  Uniprot ID: Q0D2K3
  ENST ID: ENST00000276173
  CDS Start-End: 31-486
ggagaccccactggctttggtcccctaagaatggactctgctgcctgtgctgctgctgccacccctgttccagccctggctttggccctagctccagacctagcacaagccccactggcactccctggcctgttaagcccatcttgccttctctcctctggacaagaagtaaatgggagtgaaagaggaacttgtctctggaggccctggctgtcttccacaaatgactccccaaggcagatgaggaagctggtggatttggctgctggtggggcaacggctgctgaggtcaccaaggctgaatccaagttccatcaccctgtcaggctcttctggcctaaatcccgctccttcgactatctgtacagtgctggggagattttactgcagaactttcctgtccaggcaaccatcaacctatacgaggactcagacagcgaagaagaagaggaagatgaagagcaggaggatgaagaagagaagtaggaggccaatgaaaaggggccagaagggtgtgtgagggtaccagggtccataccctacagcgccacagctcatcccccttcctcacccctaacctatccaaatggaggcagccagagtctgattggggttcagtttgtctggcaagttttcacagacatcagttagccggaagtattagtccagcagatagagctttctggactgaaaattgggtcatctagctgcccagctcaccctggcttacctgaatggcctgtgagctcaggcctcttgcatctcattgtctgggctgctgttgtgttgaccatgggagggttctaggagctctagaaggaaggcttgctgaagcccccaggaagcagagcagggcagggaatgcccttgtggagggaagtagtcattcctcaggccctttgactccctagccttcccaggtggccatgtagtcccgtctctctgtggaaagcctgacttctggcttcaccccaaggaataccaacagcagatccatgcaaggttggggtgcctttttgatgagtcttacaggaagggaaggcagtgtgtagagaatcggcttgctctggggatgcctccccattttgcctgctgtccattgaagtctgtgtgttggcatgagatgaatcaggagaaaaataaactggatggtgttttcctttttcttggaa

SEQ ID NO: 177597 - DNA, 786 bp, Homo sapiens
  Payload ID: 14848
  Gene Symbol: RIPPLY1
  Gene Name: ripply transcriptional repressor 1
  Uniprot ID: Q0D2K3
  ENST ID: ENST00000411805
  CDS Start-End: 49-363
agaaggttctgggaagtaggagaccccactggctttggtcccctaagaatggactctgctgcctgtgctgctgctgccacccctgttccagccctggctttggccctagctccagacctagcacaagccccactggcactccctggcctgttaagcccatcttgccttctctcctctggacaagaagtaaatgggagtgaaaggctcttctggcctaaatcccgctccttcgactatctgtacagtgctggggagattttactgcagaactttcctgtccaggcaaccatcaacctatacgaggactcagacagcgaagaagaagaggaagatgaagagcaggaggatgaagaagagaagtaggaggccaatgaaaaggggccagaagggtgtgtgagggtaccagggtccataccctacagcgccacagctcatcccccttcctcacccctaacctatccaaatggaggcagccagagtctgattggggttcagtttgtctggcaagttttcacagacatcagttagccggaagtattagtccagcagatagagctttctggactgaaaattgggtcatctagctgcccagctcaccctggcttacctgaatggcctgtgagctcaggcctcttgcatctcattgtctgggctgctgttgtgttgaccatgggagggttctaggagctctagaaggaaggcttgctgaagcccccaggaagcagagcagggcagggaatgcccttgtggagggaagtagtcattcctcaggccctttgactccct

SEQ ID NO: 177598 - DNA, 521 bp, Homo sapiens
  Payload ID: 14849
  Gene Symbol: RIPPLY2
  Gene Name: ripply transcriptional repressor 2
  Uniprot ID: Q5TAB7
  ENST ID: ENST00000369687
  CDS Start-End: 183-395
ctctccatcccccactgcccggtgccagcgctcggcttcggtggattctcccgggtctgggctcacgtctcctctgcgcgccttgtgctcccctatcccgcagatacgcaggcttctggagaccctgggtggacgccggaggcaagaaagaagaggagacgccgaaccacgccgcggaggcgatgcccgatggccctggaatgaccgcagcctcaggaaagctttaccaattcaggcacccagtcagactattttggccaaaatcaaaatgttatgattacttatatcaagaagcagaagctcttctgaaaaattttccaattcaagccacaatttcattttatgaagattctgatagcgaagatgaaattgaggatctgacctgtgaaaattaatctgattagctacttttgattatatccaaagcttgtggggtttaaatttagtgtacaaatgtatcataattattttaaactaatttatttgtatataaattattaataaaatgaaatattttgtaa

SEQ ID NO: 177599 - DNA, 664 bp, Homo sapiens
  Payload ID: 14849
  Gene Symbol: RIPPLY2
  Gene Name: ripply transcriptional repressor 2
  Uniprot ID: Q5TAB7
  ENST ID: ENST00000369689
  CDS Start-End: 152-538
gcggctagcagggagaggggcggagaggcagcgaacctctcaatgtgcagcaggccgcgagggctatataaagctcgggtctcggacctactggaactggtcaagattgcccgcgagctggcagcggccttccgcccagctctgcggcgtcatggagaacgcgggaggcgcagagggtacagagagtggagctgcggcgtgcgcggccaccgacggccctacgcggcgcgcgggcgcggactccggatacgcaggcttctggagaccctgggtggacgccggaggcaagaaagaagaggagacgccgaaccacgccgcggaggcgatgcccgatggccctggaatgaccgcagcctcaggaaagctttaccaattcaggcacccagtcagactattttggccaaaatcaaaatgttatgattacttatatcaagaagcagaagctcttctgaaaaattttccaattcaagccacaatttcattttatgaagattctgatagcgaagatgaaattgaggatctgacctgtgaaaattaatctgattagctacttttgattatatccaaagcttgtggggtttaaatttagtgtacaaatgtatcataattattttaaactaatttatttgtatataaattattaataaaatgaaatattttgtaa

SEQ ID NO: 177600 - DNA, 2235 bp, Homo sapiens
  Payload ID: 14850
  Gene Symbol: RIPPLY3
  Gene Name: ripply transcriptional repressor 3
  Uniprot ID: P57055
  ENST ID: ENST00000329553
  CDS Start-End: 211-783
ctccgacccgggcttttccttcgtaccctgcggccccctccgcacccctcacggagctcctcgggtcctgccccctcccagcgcttgcccgcgccgccccgcccccgtttttaaacctggcgcgcgggtaggtgagcgcgttagcccgagtggatctaggcgcgctcgtaggccggcgccgcagcaaggggcgcgggctccgccggcaccatggagcccgaagcggcggccggagcccggaaggcgcgggggcgcggctgtcactgccccggggacgctccctggaggcctccgccaccgcgcgggccggagagccccgcgccgtggcgaccttggatccagacacctggagatgctgagctgaccagaactggaaggccgcttgaacctagggctgaccaacacacttttggatcaaagggagcctttgggtttcagcatcctgtaagagtctatttacccatgtcaaagcgtcaagaatacctgcggagttccggggagcaagtactggccagtttcccagtgcaagccacgattgacttctacgacgatgagtctactgagtctgcttccgaagctgaagagccagaggaaggacccccacccctccatcttctgccccaggaggtgggaggtcggcaggaaaatggcccagggggaaagggcagagaccagggcatcaaccaagggcagcgatcctcaggagggggtgaccactggggggagggtccgctccctcaaggtgtctcctcaaggggtggcaagtgctcctcatccaaatgaatcagtctctgtctcctgggccctgctctgggacctgcccctcacgttctcttggggacacccgagccaggacactacgcatccctgctgagtgtgcagaggctagaggcttctcgggcagcccctggcctgcacactactcatgacagaaagtcagcttttacttttctttcccctggcaattcgtttttggtgcactcatgcatgcctttgagaaaggattctaggagaaagagaaggtctatgtcaacagagttgttatctcatagagccagttttcaaagctccttctgcattgtcactcactgatcaggtgatgaattcttcctagatagtcgcccactccacctcctacttaacctgagactcattatttagctatttctgcttttgtaaaaataattcagatattaaactccaattttaatctatcatccaagggtagatgtagttgcttagtagcattttggaaaaaaaagaaaaaaaggtttggtttggttttgtgacggagttttgctcttgtctcccaggctggagtgcagtgacacaatctcggctcactgcaacctccacttcttgggttcaagtgattctcctgtctcagcctcccaagtagctgggattacaggcatgagctaccacgcctggctaattttttgtatttttagtagagactcggtttcaccatgttggtcaggctggctttgaactcctgacctcaggtgatccacccgccttggcctcccaaagtgctgggattacaggcgtgagccactgagcccggccaaaaaaaaatgtatttattaaaaaaaaatttttttaacccgccgaataattcccataagagtaacaaaaaggaccagcctgaccaacgtggagaaactctgtctctactaaaaatacaaaattagccaggcgtgatggctcatgcctgtaatcccagctactcgggaggctgaggcaggagaatggctagaacccgggaggcggaggttgccgtgagtcgagatcgcaccattgcattccagcctgggcaacaagagcgaaactccgtctcaaaaaaaaaaaaaaaaaaaaagaaagaaaagagtaacagaaagatagggatttttaggagacaattagataaaaatgtatgtgatgactgtataaggaggcctgtgtgtatgaatttatagggagtagaaccgtctctcttcttagttggtgactgtttggggcctggtattttaatagatgaacactacttttttaattttttatttttttaaccctacccttaacccatgaacactatttttaattaaagtatctgatgtaaaattattttgagtttttaatattttgataaacgtgtattcctgaaactttttgacttacttatcttacatgtggtgtcttcctgtatatagtacattatatcaatttctacttgaaataaatattttgaaa

SEQ ID NO: 177601 - DNA, 6051 bp, Homo sapiens
  Payload ID: 14851
  Gene Symbol: RNMT
  Gene Name: RNA (guanine-7-) methyltransferase
  Uniprot ID: O43148
  ENST ID: ENST00000262173
  CDS Start-End: 45-1475
agtgttggttcatgaagttttaccatcaattcaagtaatcataaatggcaaattctgcaaaagcagaagaatatgaaaagatgtctcttgaacaggcaaaagcgtcagtgaattctgaaacagagtcttcattcaatattaatgaaaacacaacagcttctgggactgggctttctgaaaagacttctgtctgtaggcaagtagacatagcaagaaagagaaaagagtttgaagatgatcttgtaaaggaaagttctagttgtgggaaagacactccatccaagaagagaaaacttgatcctgaaattgtcccagaggaaaaagattgtggtgatgctgaaggcaattcaaagaaaagaaaaagagaaactgaggatgttccaaaagataaatcttctactggagatggcactcaaaataagagaaaaatagcacttgaggatgttcctgaaaagcagaaaaatctggaagaaggacacagctcaacagtggctgcccattacaatgaacttcaggaagttggtttggagaagcgtagtcaaagtcgtattttttacctaagaaactttaataattggatgaaaagtgttctcattggagaatttttggaaaaggtacgacagaagaaaaaacgtgatatcactgttttggacctgggatgtggtaaaggtggagatttgctgaaatggaaaaaaggaagaattaacaagctagtttgtactgatattgccgatgtttctgtcaaacagtgtcagcagcggtatgaggacatgaaaaatcgtcgtgatagtgaatatattttcagtgcagaatttataactgctgacagctcaaaggaacttctgattgacaaatttcgtgacccacaaatgtgttttgacatctgcagttgtcagtttgtctgtcattactcatttgagtcttatgagcaggctgacatgatgctgagaaatgcgtgtgagagacttagccctgggggctattttattggtactactcccaatagctttgaattgataagacgccttgaagcttcagaaacagaatcatttggaaatgaaatatatactgtgaaatttcagaagaaaggagattatcctttatttggctgcaaatatgacttcaacttggaaggtgttgtggatgttcctgaattcttggtctattttccattgctaaatgaaatggcaaagaagtacaatatgaaactagtctacaaaaaaacatttctggaattctacgaagaaaagattaagaacaatgaaaataaaatgctcttaaaacgaatgcaggccttggagccatatcctgcaaatgagagttctaaacttgtctctgagaaggtggatgactatgaacatgcagcaaagtacatgaagaacagtcaagtaaggttacctttgggaaccttaagtaaatcagaatgggaagctacaagtatttacttggtgtttgcctttgagaaacagcagtgagcacataggcagtagtcccagaggggccgtgttctgtcctgcacaaatttgaacaactcatctcgatatatttgatatttctctgtctgttgattttaattctaaatgtgcaggatgctgccagaaactccaatgtagaaattcaacatttgctgtctgtgacagatgaacttttgcatgtgtatataagaatgagttgggacctctgtctttaaaaatctatttttaggtaatgttctaagaattccatttgcctctatgatcttagctcataaaaatataatatgacttgataaagcaactaaactctttccacagtgttcagatttgtcctgtgtgtgtttacagtattcaatttattgcagttatagaattggtcagagagcattttcatagtgtgctcatttctatggttttgttatatagcatttttcaacatttaatggtctgtacagttgaatgtaagtgttcaatatgtattgctgaagttataagtttaaaactcaatttcagatgctcataaaagttacttagctaaaattttagcaatttattgcattttgaaataatcattaacatgctgcaattcaggagctggttagaacattttaagtggcagcatagaattttggaattttggggctttcttttcagaaattgctaccatagtaattaatgtttccagttatcaagattgtgattagacacatttacctttcttcattgaacaaatggtgccatagttatttttctcaaaatttagtgaaaatccctcccatgtagacatgttgcacattttttccaaatttatacatggaactgcagtaggaatattctcaccatctgatgccatgtacccacttcagaaataagcaatacttgttcctctgttacaacctcagcactttgcaccgtaggagccattgttaaagttgtcacttgtgtaactgactgcttttccaaaactggtacttatgtgaactgttgtccttgctttacaccaccatttggaaaacttaccagtttttagatgtagatgtagtgaaaaacttcaagaatgaagcagagcaattgagtattcttttttaaattattaagccatgatttacaaaaacattactttctgtaattcacaatacttgttttaaaaacatagtgtcttcattagtgtgcatctattaactgttcatggtgttagagttgcaaactttttagcaagaaaatatggatttcctcatttcagttccttctgcagcctgtgaatctccacaaagtgttaccagtttacaaaaataagtctttttgccttaagtcattttggaaataagtaatactgcatctgactctggtggctgtattagctaggaaaggtttgtaaatggtgtcagtgaggtggggaaaggaagtcttcctgtcacatatgcaggttcgttttcattctagggcagtgccaggaagtatattgatagctttgtaggtacaggaaaaacatcatcattatttcctctgttcacatttactggtcttaattaacaggtaataataatacatgtacttttagcctgaaacctcttccacgccatgggtaacttgggggagagaagaatcctccaaacgatggagtagccagtggtaatacaaagcagggagaacagaaaggtagagttactaaggccttcagtgaacagaaaggagcagagagcaagattagatctgagaagatgctctggggactgagcccactgttgttggtgtcagggaggcttactggagccacacctgcaggcgctgtgttcaggcaccaccttcctccttgagctttgcctgtctcttgccttatcagttcttcctccaccaccctacacccccctccccccggccccaagcccctgtgtctccttgttacaattaagtttctggatattgacttaagaactgttaggaagaggactagaaaaggcttcccctgcctatcctctccgatcaccaaggtggaagggagctagtaggactcttccttgacacaccttgtcgtctaaatgttcggtattctattcaggacttacggtaactattatgagggaggcatggctttccaccgtcgggccaggaagagcacctgttgctgcaagctcagtgaagtggggcactcccagacctgccatgcagtttatcctctgagaatggaattggaaatgaagacctaaccagctattggtgggaatgacggaactggggattgcgatgattgatctgggaacatggctggattgtgatttaaccaagaatgctgatgttgaattctttgggcctagaatatacttgagaaagcactagtggcttgtgttcagggagaggagctggcagtttttaaccacttctgtgggagccgtgttctaacctgtggaaagtattgcaattctgtgagagtgactctgcagagtcactgcaccatcaggcttggccctgctgtgccttcagtacccagccaggttctctgggtccagggtgactctccaaagaaattggccttcagctggagaaaacattgggtggagactctcacttatgttaatgcaatcttgaaatgactgaaaggtagattgccagcacagtgagtttcccagcctgctcccccatccacacttggaaattgagggagcatgaccgctctctgacttcacatgttaatagaggatcagagcagagttgggagtatattggtcaggatcatagaaaagaagacaaagcttgctcagccatgagatggccaggtatccagttttgttaactctctttgggaatttctttttcagcctgttttttagcttagtgccattatgtcattttgatttgtattcaagtactcttcaagtatctttgtaatgaaggtttggctacttgtataggtctgcctgcagggtgaaaatgccagtgtgaatattctagctaccaaacattgttttttgttgaaaaactgactttctgttgtctacctcaggccttgtgcatttgggttatctcaagccagtcaccacagagggtctctagggtctgcaaaatagaggccaaatccagggaccaggccctaataatagaagttgtaccaaaatgcctgtggtacttgatggcctgttggtcaaataggaagtacaagtgtgtgatgttagaacctccctagttgctgctatatcaaacactgcacacttgacaagtgttttcattccccgccctctgacagaacaacattcctaattctttgaaggcaaccagtgcaaaggctactacacttgtgtaatgatatttagcagatgcatacaggactggatcccagggcactgtcagttcttccctccctctcgtgctgctcagtttgtcctctgctcccatgtaggcctaaagtcaccccactccttagtgcctgcacctcaccacgatattgaggaagcacaggacatccaagggtactctccagtttggctgtggagacttgagcaagccctaaagtcccctgctccctggacttctcctgggttgtgcttttttgggggcaacataccttggacaaagctgagctgacagctaatgtttattagcctcctacctaagtcagtcactttgctaaattcttcacctgtggtaactcattttgattgttataacatctcagcaccgttattcccattttaatgatgaggaaactgagtcatagaggatacagacttgcccaaaggagagccaggattttcacaccccctcctcaagctgggcctgccctccaagtgcttgttatatacctccacgggtgtcagcccagatgactcctcacccatccaccacctgcagcttgagatgttaactattagagctccattcttttggttcaaaacgttgatacttacttagatgttccctgagaggagtgtttatttctgagtaaggggctttgttgaaagagggggttagagagagcaagacagcacttgagtgcactggcaggaagcagagataagacttgaatttcagtttggtagaccaccttctttagcagcccaacctgtagcaaatctagtttagcctgcatggcagggagagggattctcttcccaccctcaccatttgcaagtggcaggagctgagaatgccagtacgagagtgtagccaaagtgagaggctgagagcaaaggagacatttttttcagttttgagtcgagtatccagacagaggcaaatcattttgtttaactttttattaaagtgtaactatagaaacacatcaatgatttttcacaagtggagcacgtgcatacaatcggcaccccagaagccccccgtcagattcccttccagttaactacctctccaagggaaaccactatcctgagttctaagcgcatagattagttctgtctggtttggggagatatataaatggaattatgcattcttcgtatctggtttcttttcaccaatattatgtttgtgagatttttgttgcatgtatttgtacatggattttcattctcatggttgtataatatttcattgtgtgaataaaccacatactgtttatctg

SEQ ID NO: 177602 - DNA, 6250 bp, Homo sapiens
  Payload ID: 14851
  Gene Symbol: RNMT
  Gene Name: RNA (guanine-7-) methyltransferase
  Uniprot ID: O43148
  ENST ID: ENST00000383314
  CDS Start-End: 241-1671
agtgacgtaagcagacacgcgtggcgcgggccgccgtttccgcaaacagaatcgcgtttggctgtgctggatgtgtgaacctattgggtactgtacaacttcaagcctcgaaatcagataggcaccaccaacctcatttcctgtttcaccttgattttctgtgataccaaaatctcagcttcacaaagtcattgaaagtgttggttcatgaagttttaccatcaattcaagtaatcataaatggcaaattctgcaaaagcagaagaatatgaaaagatgtctcttgaacaggcaaaagcgtcagtgaattctgaaacagagtcttcattcaatattaatgaaaacacaacagcttctgggactgggctttctgaaaagacttctgtctgtaggcaagtagacatagcaagaaagagaaaagagtttgaagatgatcttgtaaaggaaagttctagttgtgggaaagacactccatccaagaagagaaaacttgatcctgaaattgtcccagaggaaaaagattgtggtgatgctgaaggcaattcaaagaaaagaaaaagagaaactgaggatgttccaaaagataaatcttctactggagatggcactcaaaataagagaaaaatagcacttgaggatgttcctgaaaagcagaaaaatctggaagaaggacacagctcaacagtggctgcccattacaatgaacttcaggaagttggtttggagaagcgtagtcaaagtcgtattttttacctaagaaactttaataattggatgaaaagtgttctcattggagaatttttggaaaaggtacgacagaagaaaaaacgtgatatcactgttttggacctgggatgtggtaaaggtggagatttgctgaaatggaaaaaaggaagaattaacaagctagtttgtactgatattgccgatgtttctgtcaaacagtgtcagcagcggtatgaggacatgaaaaatcgtcgtgatagtgaatatattttcagtgcagaatttataactgctgacagctcaaaggaacttctgattgacaaatttcgtgacccacaaatgtgttttgacatctgcagttgtcagtttgtctgtcattactcatttgagtcttatgagcaggctgacatgatgctgagaaatgcgtgtgagagacttagccctgggggctattttattggtactactcccaatagctttgaattgataagacgccttgaagcttcagaaacagaatcatttggaaatgaaatatatactgtgaaatttcagaagaaaggagattatcctttatttggctgcaaatatgacttcaacttggaaggtgttgtggatgttcctgaattcttggtctattttccattgctaaatgaaatggcaaagaagtacaatatgaaactagtctacaaaaaaacatttctggaattctacgaagaaaagattaagaacaatgaaaataaaatgctcttaaaacgaatgcaggccttggagccatatcctgcaaatgagagttctaaacttgtctctgagaaggtggatgactatgaacatgcagcaaagtacatgaagaacagtcaagtaaggttacctttgggaaccttaagtaaatcagaatgggaagctacaagtatttacttggtgtttgcctttgagaaacagcagtgagcacataggcagtagtcccagaggggccgtgttctgtcctgcacaaatttgaacaactcatctcgatatatttgatatttctctgtctgttgattttaattctaaatgtgcaggatgctgccagaaactccaatgtagaaattcaacatttgctgtctgtgacagatgaacttttgcatgtgtatataagaatgagttgggacctctgtctttaaaaatctatttttaggtaatgttctaagaattccatttgcctctatgatcttagctcataaaaatataatatgacttgataaagcaactaaactctttccacagtgttcagatttgtcctgtgtgtgtttacagtattcaatttattgcagttatagaattggtcagagagcattttcatagtgtgctcatttctatggttttgttatatagcatttttcaacatttaatggtctgtacagttgaatgtaagtgttcaatatgtattgctgaagttataagtttaaaactcaatttcagatgctcataaaagttacttagctaaaattttagcaatttattgcattttgaaataatcattaacatgctgcaattcaggagctggttagaacattttaagtggcagcatagaattttggaattttggggctttcttttcagaaattgctaccatagtaattaatgtttccagttatcaagattgtgattagacacatttacctttcttcattgaacaaatggtgccatagttatttttctcaaaatttagtgaaaatccctcccatgtagacatgttgcacattttttccaaatttatacatggaactgcagtaggaatattctcaccatctgatgccatgtacccacttcagaaataagcaatacttgttcctctgttacaacctcagcactttgcaccgtaggagccattgttaaagttgtcacttgtgtaactgactgcttttccaaaactggtacttatgtgaactgttgtccttgctttacaccaccatttggaaaacttaccagtttttagatgtagatgtagtgaaaaacttcaagaatgaagcagagcaattgagtattcttttttaaattattaagccatgatttacaaaaacattactttctgtaattcacaatacttgttttaaaaacatagtgtcttcattagtgtgcatctattaactgttcatggtgttagagttgcaaactttttagcaagaaaatatggatttcctcatttcagttccttctgcagcctgtgaatctccacaaagtgttaccagtttacaaaaataagtctttttgccttaagtcattttggaaataagtaatactgcatctgactctggtggctgtattagctaggaaaggtttgtaaatggtgtcagtgaggtggggaaaggaagtcttcctgtcacatatgcaggttcgttttcattctagggcagtgccaggaagtatattgatagctttgtaggtacaggaaaaacatcatcattatttcctctgttcacatttactggtcttaattaacaggtaataataatacatgtacttttagcctgaaacctcttccacgccatgggtaacttgggggagagaagaatcctccaaacgatggagtagccagtggtaatacaaagcagggagaacagaaaggtagagttactaaggccttcagtgaacagaaaggagcagagagcaagattagatctgagaagatgctctggggactgagcccactgttgttggtgtcagggaggcttactggagccacacctgcaggcgctgtgttcaggcaccaccttcctccttgagctttgcctgtctcttgccttatcagttcttcctccaccaccctacacccccctccccccggccccaagcccctgtgtctccttgttacaattaagtttctggatattgacttaagaactgttaggaagaggactagaaaaggcttcccctgcctatcctctccgatcaccaaggtggaagggagctagtaggactcttccttgacacaccttgtcgtctaaatgttcggtattctattcaggacttacggtaactattatgagggaggcatggctttccaccgtcgggccaggaagagcacctgttgctgcaagctcagtgaagtggggcactcccagacctgccatgcagtttatcctctgagaatggaattggaaatgaagacctaaccagctattggtgggaatgacggaactggggattgcgatgattgatctgggaacatggctggattgtgatttaaccaagaatgctgatgttgaattctttgggcctagaatatacttgagaaagcactagtggcttgtgttcagggagaggagctggcagtttttaaccacttctgtgggagccgtgttctaacctgtggaaagtattgcaattctgtgagagtgactctgcagagtcactgcaccatcaggcttggccctgctgtgccttcagtacccagccaggttctctgggtccagggtgactctccaaagaaattggccttcagctggagaaaacattgggtggagactctcacttatgttaatgcaatcttgaaatgactgaaaggtagattgccagcacagtgagtttcccagcctgctcccccatccacacttggaaattgagggagcatgaccgctctctgacttcacatgttaatagaggatcagagcagagttgggagtatattggtcaggatcatagaaaagaagacaaagcttgctcagccatgagatggccaggtatccagttttgttaactctctttgggaatttctttttcagcctgttttttagcttagtgccattatgtcattttgatttgtattcaagtactcttcaagtatctttgtaatgaaggtttggctacttgtataggtctgcctgcagggtgaaaatgccagtgtgaatattctagctaccaaacattgttttttgttgaaaaactgactttctgttgtctacctcaggccttgtgcatttgggttatctcaagccagtcaccacagagggtctctagggtctgcaaaatagaggccaaatccagggaccaggccctaataatagaagttgtaccaaaatgcctgtggtacttgatggcctgttggtcaaataggaagtacaagtgtgtgatgttagaacctccctagttgctgctatatcaaacactgcacacttgacaagtgttttcattccccgccctctgacagaacaacattcctaattctttgaaggcaaccagtgcaaaggctactacacttgtgtaatgatatttagcagatgcatacaggactggatcccagggcactgtcagttcttccctccctctcgtgctgctcagtttgtcctctgctcccatgtaggcctaaagtcaccccactccttagtgcctgcacctcaccacgatattgaggaagcacaggacatccaagggtactctccagtttggctgtggagacttgagcaagccctaaagtcccctgctccctggacttctcctgggttgtgcttttttgggggcaacataccttggacaaagctgagctgacagctaatgtttattagcctcctacctaagtcagtcactttgctaaattcttcacctgtggtaactcattttgattgttataacatctcagcaccgttattcccattttaatgatgaggaaactgagtcatagaggatacagacttgcccaaaggagagccaggattttcacaccccctcctcaagctgggcctgccctccaagtgcttgttatatacctccacgggtgtcagcccagatgactcctcacccatccaccacctgcagcttgagatgttaactattagagctccattcttttggttcaaaacgttgatacttacttagatgttccctgagaggagtgtttatttctgagtaaggggctttgttgaaagagggggttagagagagcaagacagcacttgagtgcactggcaggaagcagagataagacttgaatttcagtttggtagaccaccttctttagcagcccaacctgtagcaaatctagtttagcctgcatggcagggagagggattctcttcccaccctcaccatttgcaagtggcaggagctgagaatgccagtacgagagtgtagccaaagtgagaggctgagagcaaaggagacatttttttcagttttgagtcgagtatccagacagaggcaaatcattttgtttaactttttattaaagtgtaactatagaaacacatcaatgatttttcacaagtggagcacgtgcatacaatcggcaccccagaagccccccgtcagattcccttccagttaactacctctccaagggaaaccactatcctgagttctaagcgcatagattagttctgtctggtttggggagatatataaatggaattatgcattcttcgtatctggtttcttttcaccaatattatgtttgtgagatttttgttgcatgtatttgtacatggattttcattctcatggttgtataatatttcattgtgtgaataaaccacatactgtttatctgaca

SEQ ID NO: 177603 - DNA, 1849 bp, Homo sapiens
  Payload ID: 14851
  Gene Symbol: RNMT
  Gene Name: RNA (guanine-7-) methyltransferase
  Uniprot ID: O43148
  ENST ID: ENST00000543302
  CDS Start-End: 113-1543
aagtgacgtaagcagacacgcgtggcgcgggccgccgtttccgcaaacagaatcgcgtttggctgtgctgtgttggttcatgaagttttaccatcaattcaagtaatcataaatggcaaattctgcaaaagcagaagaatatgaaaagatgtctcttgaacaggcaaaagcgtcagtgaattctgaaacagagtcttcattcaatattaatgaaaacacaacagcttctgggactgggctttctgaaaagacttctgtctgtaggcaagtagacatagcaagaaagagaaaagagtttgaagatgatcttgtaaaggaaagttctagttgtgggaaagacactccatccaagaagagaaaacttgatcctgaaattgtcccagaggaaaaagattgtggtgatgctgaaggcaattcaaagaaaagaaaaagagaaactgaggatgttccaaaagataaatcttctactggagatggcactcaaaataagagaaaaatagcacttgaggatgttcctgaaaagcagaaaaatctggaagaaggacacagctcaacagtggctgcccattacaatgaacttcaggaagttggtttggagaagcgtagtcaaagtcgtattttttacctaagaaactttaataattggatgaaaagtgttctcattggagaatttttggaaaaggtacgacagaagaaaaaacgtgatatcactgttttggacctgggatgtggtaaaggtggagatttgctgaaatggaaaaaaggaagaattaacaagctagtttgtactgatattgccgatgtttctgtcaaacagtgtcagcagcggtatgaggacatgaaaaatcgtcgtgatagtgaatatattttcagtgcagaatttataactgctgacagctcaaaggaacttctgattgacaaatttcgtgacccacaaatgtgttttgacatctgcagttgtcagtttgtctgtcattactcatttgagtcttatgagcaggctgacatgatgctgagaaatgcgtgtgagagacttagccctgggggctattttattggtactactcccaatagctttgaattgataagacgccttgaagcttcagaaacagaatcatttggaaatgaaatatatactgtgaaatttcagaagaaaggagattatcctttatttggctgcaaatatgacttcaacttggaaggtgttgtggatgttcctgaattcttggtctattttccattgctaaatgaaatggcaaagaagtacaatatgaaactagtctacaaaaaaacatttctggaattctacgaagaaaagattaagaacaatgaaaataaaatgctcttaaaacgaatgcaggccttggagccatatcctgcaaatgagagttctaaacttgtctctgagaaggtggatgactatgaacatgcagcaaagtacatgaagaacagtcaagtaaggttacctttgggaaccttaagtaaatcagaatgggaagctacaagtatttacttggtgtttgcctttgagaaacagcagtgagcacataggcagtagtcccagaggggccgtgttctgtcctgcacaaatttgaacaactcatctcgatatatttgatatttctctgtctgttgattttaattctaaatgtgcaggatgctgccagaaactccaatgtagaaattcaacatttgctgtctgtgacagatgaacttttgcatgtgtatataagaatgagttgggacctctgtctttaaaaatctatttttaggtaatgttctaagaattccatttgcctctatgatcttagctcataaaaatataatatgacttgataaagcaactaaa

SEQ ID NO: 177604 - DNA, 4108 bp, Homo sapiens
  Payload ID: 14851
  Gene Symbol: RNMT
  Gene Name: RNA (guanine-7-) methyltransferase
  Uniprot ID: O43148
  ENST ID: ENST00000592764
  CDS Start-End: 198-1712
aaacagaatcgcgtttggctgtgctggatgtgtgaacctattgggtactgtacaacttcaagcctcgaaatcagataggcaccaccaacctcatttcctgtttcaccttgattttctgtgataccaaaatctcagcttcacaaagtcattgaaagtgttggttcatgaagttttaccatcaattcaagtaatcataaatggcaaattctgcaaaagcagaagaatatgaaaagatgtctcttgaacaggcaaaagcgtcagtgaattctgaaacagagtcttcattcaatattaatgaaaacacaacagcttctgggactgggctttctgaaaagacttctgtctgtaggcaagtagacatagcaagaaagagaaaagagtttgaagatgatcttgtaaaggaaagttctagttgtgggaaagacactccatccaagaagagaaaacttgatcctgaaattgtcccagaggaaaaagattgtggtgatgctgaaggcaattcaaagaaaagaaaaagagaaactgaggatgttccaaaagataaatcttctactggagatggcactcaaaataagagaaaaatagcacttgaggatgttcctgaaaagcagaaaaatctggaagaaggacacagctcaacagtggctgcccattacaatgaacttcaggaagttggtttggagaagcgtagtcaaagtcgtattttttacctaagaaactttaataattggatgaaaagtgttctcattggagaatttttggaaaaggtacgacagaagaaaaaacgtgatatcactgttttggacctgggatgtggtaaaggtggagatttgctgaaatggaaaaaaggaagaattaacaagctagtttgtactgatattgccgatgtttctgtcaaacagtgtcagcagcggtatgaggacatgaaaaatcgtcgtgatagtgaatatattttcagtgcagaatttataactgctgacagctcaaaggaacttctgattgacaaatttcgtgacccacaaatgtgttttgacatctgcagttgtcagtttgtctgtcattactcatttgagtcttatgagcaggctgacatgatgctgagaaatgcgtgtgagagacttagccctgggggctattttattggtactactcccaatagctttgaattgataagacgccttgaagcttcagaaacagaatcatttggaaatgaaatatatactgtgaaatttcagaagaaaggagattatcctttatttggctgcaaatatgacttcaacttggaaggtgttgtggatgttcctgaattcttggtctattttccattgctaaatgaaatggcaaagaagtacaatatgaaactagtctacaaaaaaacatttctggaattctacgaagaaaagattaagaacaatgaaaataaaatgctcttaaaacgaatgcaggccttggagccatatcctgcaaatgagagttctaaacttgtctctgagaaggtggatgactatgaacatgcagcaaagtacatgaagaacagtcaagtaaggttacctttgggaaccttaagtaaatcagaatgggaagctacaagacttacggtaactattatgagggaggcatggctttccaccgtcgggccaggaagagcacctgttgctgcaagctcagtgaagtggggcactcccagacctgccatgcagtttatcctctgagaatggaattggaaatgaagacctaaccagctattggtgggaatgacggaactggggattgcgatgattgatctgggaacatggctggattgtgatttaaccaagaatgctgatgttgaattctttgggcctagaatatacttgagaaagcactagtggcttgtgttcagggagaggagctggcagtttttaaccacttctgtgggagccgtgttctaacctgtggaaagtattgcaattctgtgagagtgactctgcagagtcactgcaccatcaggcttggccctgctgtgccttcagtacccagccaggttctctgggtccagggtgactctccaaagaaattggccttcagctggagaaaacattgggtggagactctcacttatgttaatgcaatcttgaaatgactgaaaggtagattgccagcacagtgagtttcccagcctgctcccccatccacacttggaaattgagggagcatgaccgctctctgacttcacatgttaatagaggatcagagcagagttgggagtatattggtcaggatcatagaaaagaagacaaagcttgctcagccatgagatggccaggtatccagttttgttaactctctttgggaatttctttttcagcctgttttttagcttagtgccattatgtcattttgatttgtattcaagtactcttcaagtatctttgtaatgaaggtttggctacttgtataggtctgcctgcagggtgaaaatgccagtgtgaatattctagctaccaaacattgttttttgttgaaaaactgactttctgttgtctacctcaggccttgtgcatttgggttatctcaagccagtcaccacagagggtctctagggtctgcaaaatagaggccaaatccagggaccaggccctaataatagaagttgtaccaaaatgcctgtggtacttgatggcctgttggtcaaataggaagtacaagtgtgtgatgttagaacctccctagttgctgctatatcaaacactgcacacttgacaagtgttttcattccccgccctctgacagaacaacattcctaattctttgaaggcaaccagtgcaaaggctactacacttgtgtaatgatatttagcagatgcatacaggactggatcccagggcactgtcagttcttccctccctctcgtgctgctcagtttgtcctctgctcccatgtaggcctaaagtcaccccactccttagtgcctgcacctcaccacgatattgaggaagcacaggacatccaagggtactctccagtttggctgtggagacttgagcaagccctaaagtcccctgctccctggacttctcctgggttgtgcttttttgggggcaacataccttggacaaagctgagctgacagctaatgtttattagcctcctacctaagtcagtcactttgctaaattcttcacctgtggtaactcattttgattgttataacatctcagcaccgttattcccattttaatgatgaggaaactgagtcatagaggatacagacttgcccaaaggagagccaggattttcacaccccctcctcaagctgggcctgccctccaagtgcttgttatatacctccacgggtgtcagcccagatgactcctcacccatccaccacctgcagcttgagatgttaactattagagctccattcttttggttcaaaacgttgatacttacttagatgttccctgagaggagtgtttatttctgagtaaggggctttgttgaaagagggggttagagagagcaagacagcacttgagtgcactggcaggaagcagagataagacttgaatttcagtttggtagaccaccttctttagcagcccaacctgtagcaaatctagtttagcctgcatggcagggagagggattctcttcccaccctcaccatttgcaagtggcaggagctgagaatgccagtacgagagtgtagccaaagtgagaggctgagagcaaaggagacatttttttcagttttgagtcgagtatccagacagaggcaaatcattttgtttaactttttattaaagtgtaactatagaaacacatcaatgatttttcacaagtggagcacgtgcatacaatcggcaccccagaagccccccgtcagattcccttccagttaactacctctccaagggaaaccactatcctgagttctaagcgcatagattagttctgtctggtttggggagatatataaatggaattatgcattcttcgtatctggtttcttttcaccaatattatgtttgtgagatttttgttgcatgtatttgtacatggattttcattctcatggttgtataatatttcattgtgtgaataaaccacatactgtttatctga

SEQ ID NO: 177605 - DNA, 1879 bp, Homo sapiens
  Payload ID: 14851
  Gene Symbol: RNMT
  Gene Name: RNA (guanine-7-) methyltransferase
  Uniprot ID: O43148
  ENST ID: ENST00000589866
  CDS Start-End: 361-1791
gatgcccttagtgtccataggccaaaagaaatataacagttccatttattaagtagtttaccccaaagaatttaaaagtatttatggtctaacaactttatgtctgtttaaaaaattaacacacataaattggggggaaaggtaatgtttctgttttattcttgattaatcacaatcccttactaacaggatgtgtgaacctattgggtactgtacaacttcaagcctcgaaatcagataggcaccaccaacctcatttcctgtttcaccttgattttctgtgataccaaaatctcagcttcacaaagtcattgaaagtgttggttcatgaagttttaccatcaattcaagtaatcataaatggcaaattctgcaaaagcagaagaatatgaaaagatgtctcttgaacaggcaaaagcgtcagtgaattctgaaacagagtcttcattcaatattaatgaaaacacaacagcttctgggactgggctttctgaaaagacttctgtctgtaggcaagtagacatagcaagaaagagaaaagagtttgaagatgatcttgtaaaggaaagttctagttgtgggaaagacactccatccaagaagagaaaacttgatcctgaaattgtcccagaggaaaaagattgtggtgatgctgaaggcaattcaaagaaaagaaaaagagaaactgaggatgttccaaaagataaatcttctactggagatggcactcaaaataagagaaaaatagcacttgaggatgttcctgaaaagcagaaaaatctggaagaaggacacagctcaacagtggctgcccattacaatgaacttcaggaagttggtttggagaagcgtagtcaaagtcgtattttttacctaagaaactttaataattggatgaaaagtgttctcattggagaatttttggaaaaggtacgacagaagaaaaaacgtgatatcactgttttggacctgggatgtggtaaaggtggagatttgctgaaatggaaaaaaggaagaattaacaagctagtttgtactgatattgccgatgtttctgtcaaacagtgtcagcagcggtatgaggacatgaaaaatcgtcgtgatagtgaatatattttcagtgcagaatttataactgctgacagctcaaaggaacttctgattgacaaatttcgtgacccacaaatgtgttttgacatctgcagttgtcagtttgtctgtcattactcatttgagtcttatgagcaggctgacatgatgctgagaaatgcgtgtgagagacttagccctgggggctattttattggtactactcccaatagctttgaattgataagacgccttgaagcttcagaaacagaatcatttggaaatgaaatatatactgtgaaatttcagaagaaaggagattatcctttatttggctgcaaatatgacttcaacttggaaggtgttgtggatgttcctgaattcttggtctattttccattgctaaatgaaatggcaaagaagtacaatatgaaactagtctacaaaaaaacatttctggaattctacgaagaaaagattaagaacaatgaaaataaaatgctcttaaaacgaatgcaggccttggagccatatcctgcaaatgagagttctaaacttgtctctgagaaggtggatgactatgaacatgcagcaaagtacatgaagaacagtcaagtaaggttacctttgggaaccttaagtaaatcagaatgggaagctacaagtatttacttggtgtttgcctttgagaaacagcagtgagcacataggcagtagtcccagaggggccgtgttctgtcctgcacaaatttgaacaactcatctcgatatatttgatatttctctgtct

SEQ ID NO: 177606 - DNA, 1612 bp, Homo sapiens
  Payload ID: 14851
  Gene Symbol: RNMT
  Gene Name: RNA (guanine-7-) methyltransferase
  ENST ID: ENST00000588457
  CDS Start-End: 181-1077
gtaagcagacacgcgtggcgcgggccgccgtttccgcaaacagaatcgcgtttggctgtgctgaatctggaagaaggacacagctcaacagtggctgcccattacaatgaacttcaggaagttggtttggagaagcgtagtcaaagtcgtattttttacctaagaaactttaataattggatgaaaagtgttctcattggagaatttttggaaaaggtacgacagaagaaaaaacgtgatatcactgttttggacctgggatgtggtaaaggtggagatttgctgaaatggaaaaaaggaagaattaacaagctagtttgtactgatattgccgatgtttctgtcaaacagtgtcagcagcggtatgaggacatgaaaaatcgtcgtgatagtgaatatattttcagtgcagaatttataactgctgacagctcaaaggaacttctgattgacaaatttcgtgacccacaaatgtgttttgacatctgcagttgtcagtttgtctgtcattactcatttgagtcttatgagcaggctgacatgatgctgagaaatgcgtgtgagagacttagccctgggggctattttattggtactactcccaatagctttgaattgataagacgccttgaagcttcagaaacagaatcatttggaaatgaaatatatactgtgaaatttcagaagaaaggagattatcctttatttggctgcaaatatgacttcaacttggaaggtgttgtggatgttcctgaattcttggtctattttccattgctaaatgaaatggcaaagaagtacaatatgaaactagtctacaaaaaaacatttctggaattctacgaagaaaagattaagaacaatgaaaataaaatgctcttaaaacgaatgcaggccttggagccatatcctgcaaatgagagttctaaacttgtctctgagaaggtggatgactatgaacatgcagcaaagtacatgaagaacagtcaagtaaggttacctttgggaaccttaagtaaatcagaatgggaagctacaagtatttacttggtgtttgcctttgagaaacagcagtgagcacataggcagtagtcccagaggggccgtgttctgtcctgcacaaatttgaacaactcatctcgatatatttgatatttctctgtctgttgattttaattctaaatgtgcaggatgctgccagaaactccaatgtagaaattcaacatttgctgtctgtgacagatgaacttttgcatgtgtatataagaatgagttgggacctctgtctttaaaaatctatttttaggacttacggtaactattatgagggaggcatggctttccaccgtcgggccaggaagagcacctgttgctgcaagctcagtgaagtggggcactcccagacctgccatgcagtttatcctctgagaatggaattggaaatgaagacctaaccagctattggtgggaatgacggaactggggattgcgatgattgatctgggaacatggctggattgtgatttaaccaagaatgctgatgttgaattctttgggcctagaatatacttgagaaagcactagtggcttgtgttcagggagaggagctggc

SEQ ID NO: 177607 - DNA, 572 bp, Homo sapiens
  Payload ID: 14851
  Gene Symbol: RNMT
  Gene Name: RNA (guanine-7-) methyltransferase
  ENST ID: ENST00000591746
  CDS Start-End: 269-572
gtgtttgtccctcggccgccgtggaggggtggaactggcactcccacccctgacatgggctcacttcgcattagccctgtgcttcactacccaacgcgatgtgtgaacctattgggtactgtacaacttcaagcctcgaaatcagataggcaccaccaacctcatttcctgtttcaccttgattttctgtgataccaaaatctcagcttcacaaagtcattgaaagtgttggttcatgaagttttaccatcaattcaagtaatcataaatggcaaattctgcaaaagcagaagaatatgaaaagatgtctcttgaacaggcaaaagcgtcagtgaattctgaaacagagtcttcattcaatattaatgaaaacacaacagcttctgggactgggctttctgaaaagacttctgtctgtaggcaagtagacatagcaagaaagagaaaagagtttgaagatgatcttgtaaaggaaagttctagttgtgggaaagacactccatccaagaagagaaaacttgatcctgaaattgtcccagaggaaaaagattgtggtgatgctgaaggcaatt

SEQ ID NO: 177608 - DNA, 811 bp, Homo sapiens
  Payload ID: 14851
  Gene Symbol: RNMT
  Gene Name: RNA (guanine-7-) methyltransferase
  ENST ID: ENST00000593007
  CDS Start-End: 1-344
tctacgaagaaaagattaagaacaatgaaaataaaatgctcttaaaacgaatgcaggccttggaggactttcatttctttccccagccatatcctgcaaatgagagttctaaacttgtctctgagaaggtggatgactatgaacatgcagcaaagtacatgaagaacagtcaagtaaggttacctttgggaaccttaagtaaatcagaatgggaagctacaagacttacggtaactattatgagggaggcatggctttccaccgtcgggccaggaagagcacctgttgctgcaagctcagtgaagtggggcactcccagacctgccatgcagtttatcctctgagaatggaattggaaatgaagacctaaccagctattggtgggaatgacggaactggggattgcgatgattgatctgggaacatggctggattgtgatttaaccaagaatgctgatgttgaattctttgggcctagaatatacttgagaaagcactagtggcttgtgttcagggagaggagctggcagtttttaaccacttctgtgggagccgtgttctaacctgtggaaagtattgcaattctgtgagagtgactctgcagagtcactgcaccatcaggcttggccctgctgtgccttcagtacccagccaggttctctgggtccagggtgactctccaaagaaattggccttcagctggagaaaacattgggtggagactctcacttatgttaatgcaatcttgaaatgactgaaaggtagattgccagcacagtgagtttcccagcctgctcccccatccacactt

SEQ ID NO: 177609 - DNA, 2027 bp, Homo sapiens
  Payload ID: 14852
  Gene Symbol: RTCB
  Gene Name: RNA 2',3'-cyclic phosphate and 5'-OH ligase
  Uniprot ID: Q9Y3I0
  ENST ID: ENST00000216038
  CDS Start-End: 100-1617
gcgctttggttcttggaaggcggtgctctgagaagccggactacgcggcagcggctcttcaaagcggagccgggagtttttgctacagttttcgccaccatgagtcgcagctataatgatgagctgcagttcttggagaagatcaataaaaactgctggaggatcaagaagggcttcgtgcccaacatgcaggttgaaggtgttttctatgtgaatgatgctctggagaaattgatgtttgaggaattaaggaatgcctgtcgaggtggtggtgttggtggcttcctgccagccatgaaacagattggcaatgtggcagccctgcctggaattgttcatcgatctattgggcttcctgatgtccattcaggatatgggtttgctattgggaacatggcagcctttgatatgaatgaccctgaagcagtagtatccccaggtggtgtcgggtttgacatcaactgtggtgtccgcttgctaagaaccaatttagatgaaagtgatgtccagcctgtgaaggagcaacttgcccaagctatgtttgaccacattcctgttggggtggggtcaaaaggtgtcatcccaatgaatgccaaagacttggaggaggccttggagatgggggtggactggtccttaagagaagggtatgcctgggctgaagacaaggagcactgcgaggagtacggaaggatgctgcaggctgaccccaataaagtttctgcaagggcgaagaaaagaggccttcctcagttggggaccctgggagcaggcaaccattatgcagaaatccaggttgtggatgagattttcaatgagtatgctgctaaaaaaatgggcatcgaccataagggacaggtgtgtgtgatgatccacagtggaagcagaggcttgggccaccaagtagccacagatgcgctggtagctatggagaaggccatgaagagagacaagattatagtcaatgatcggcagttggcttgtgctcgaatcgcttccccagagggtcaagactatctgaagggaatggcagctgctgggaactatgcctgggtcaaccgctcttccatgaccttcttaacccgtcaggctttcgccaaggtcttcaacacaacccctgatgacttggacctacatgtgatctatgatgtttctcacaacattgccaaagtggagcagcatgtggtggacggaaaggaacggacactgttagtacacaggaagggatccacccgcgctttccctcctcaccatcccctcattgctgttgattaccaactcactggacagccagtgctcattggtggcaccatgggaacctgtagttatgttcttactggcactgaacagggcatgactgagacctttggaacaacctgtcatggagcgggccgtgcattgtcccgagcaaaatctcgacgtaatttagatttccaggatgtcttagacaaattggcagatatgggaattgcgatccgtgttgcctcacccaaactggttatggaagaggctcctgagtcctataagaatgtgacagatgtggtaaatacctgccatgatgctggaatcagcaagaaagccattaaactgagaccaattgctgtgatcaaaggatagaaccttggacagcagggctgcctgacaccaccaaccctctctgaagtggaagtggactgacatgctcttctgacatcagactcaaggcgggacaagttgcaaagtgtgcagctgtaactgctcacgccaaaatggctgatggggaggctgctgctttcaggggcccgtgcttgtaaaataaccttccaggaagaggcacattgcccacctttggaaagggaggaatatgccttctccttggttgttccacagagttttaggaaaatctgttagggatgggtagatgtcaaactgccttacgcagtcatactgatctttagccatcagattgatcttcttcacaccaagctctgtttacattccgagaggtgtcatgaagaaagttctgttcaataaggttttggaatgtt

SEQ ID NO: 177610 - DNA, 1534 bp, Homo sapiens
  Payload ID: 14853
  Gene Symbol: RTCA
  Gene Name: RNA 3'-terminal phosphate cyclase
  Uniprot ID: O00442
  ENST ID: ENST00000260563
  CDS Start-End: 128-1267
tcgtcaggctcctgcgccccaggcatgaaccaaggtttctgaactactgggcgggagccaacgtctcttctttctcccgctctggcggaggctttgtcgctgcgggctgggccccagggtgtcccccatggcggggccgcgggtggaggtcgatggcagcatcatggaagggggcggccagatcctgagagtctctacggccttgagctgtctcctaggcctccccttgcgggtgcagaagatccgagccggccggagcacgccaggcctgagttctggaggctggaagtccaagatcaaggtcctgacaaggcctcaacatttatctggactggaaatgattcgagatttgtgtgatgggcaactggagggggcagaaattggctcaacagaaataacctttacaccagagaagatcaaaggtggaatccacacagcagataccaagacagcagggagtgtgtgcctcttgatgcaggtctcaatgccgtgtgttctctttgctgcttctccatcagaacttcatttgaaaggtggaactaatgctgaaatggcaccacagatcgattatacagtgatggtcttcaagccaattgttgaaaaatttggtttcatatttaattgtgacattaaaacaaggggatattacccaaaagggggtggtgaagtgattgttcgaatgtcaccagttaaacaattgaaccctataaatttaactgagcgtggctgtgtgactaagatatatggaagagctttcgttgctggtgttttgccatttaaagtagcaaaagatatggcagcggcagcagttagatgcatcagaaaggagatccgggatttgtatgttaacatccagcctgttcaagaacctaaagaccaagcatttggcaatggaaatggaataataattattgctgagacctccactggctgtttgtttgctggatcatcgcttggtaaacgaggtgtaaatgcagacaaagttggaattgaagctgccgaaatgctattagcaaatcttagacatggtggtactgtggatgagtatctgcaagaccagctgattgttttcatggcattagccaatggagtttccagaataaaaacaggaccagttacactccatacgcaaaccgcgatacattttgctgaacaaatagcaaaggctaaatttattgtgaagaaatcagaagatgaagaagacgccgctaaagatacttatattattgaatgccaaggaattgggatgacaaatccaaatctatagagtatttgcctcttaaatgatacctcattgatatattgcactatttcataaatactataaaataatgactaggaagtaacttattaaaggctatgacttaaatttgaagatgaagtacagtgttctaggtttgctgagaaggcttcattaaattaatctcactttgaatatctcctgagagatggacaatgaaatatcagttggtggatatgtgtgatagctgatttcaatattgaagtattgaaataaaatattctttacacctga

SEQ ID NO: 177611 - DNA, 538 bp, Homo sapiens
  Payload ID: 14853
  Gene Symbol: RTCA
  Gene Name: RNA 3'-terminal phosphate cyclase
  ENST ID: ENST00000370126
  CDS Start-End: 88-237
gaactactgggcgggagccaacgtctcttctttctcccgctctggcggaggctttgtcgctgcgggctgggccccagggtgtcccccatggcggggccgcgggtggaggtcgatggcagcatcatggaagggggcggccagatcctgagagtctctacggccttgagctgtctcctaggcctccccttgcgggtgcagaagatccgagccggccggagcacgccaggcctgaggtaaatctggctggagggggagttgggccgtgaagctgggggatcggggggtcgggctgccgggctggggcatcgggagtccgagtggtggaacccagaaggtcccagacgcaggtatgggcgatccagggcggggcactctgcctgggcggtggcctgggttgtaaagtcttgaaagcctggaggggtgagtttagaaatggtctcgagttttctctgtttgactaaatagtgtcatttgctgaagagctagcttttaaaatgttttctcacctcaccgggcattccaaatatccgaacagcac

SEQ ID NO: 177612 - DNA, 2535 bp, Homo sapiens
  Payload ID: 14853
  Gene Symbol: RTCA
  Gene Name: RNA 3'-terminal phosphate cyclase
  Uniprot ID: O00442
  ENST ID: ENST00000370128
  CDS Start-End: 170-1270
gctgactccagtgtcccgagaggcgccgcttcttccgctttctcgtcaggctcctgcgccccaggcatgaaccaaggtttctgaactactgggcgggagccaacgtctcttctttctcccgctctggcggaggctttgtcgctgcgggctgggccccagggtgtcccccatggcggggccgcgggtggaggtcgatggcagcatcatggaagggggcggccagatcctgagagtctctacggccttgagctgtctcctaggcctccccttgcgggtgcagaagatccgagccggccggagcacgccaggcctgaggcctcaacatttatctggactggaaatgattcgagatttgtgtgatgggcaactggagggggcagaaattggctcaacagaaataacctttacaccagagaagatcaaaggtggaatccacacagcagataccaagacagcagggagtgtgtgcctcttgatgcaggtctcaatgccgtgtgttctctttgctgcttctccatcagaacttcatttgaaaggtggaactaatgctgaaatggcaccacagatcgattatacagtgatggtcttcaagccaattgttgaaaaatttggtttcatatttaattgtgacattaaaacaaggggatattacccaaaagggggtggtgaagtgattgttcgaatgtcaccagttaaacaattgaaccctataaatttaactgagcgtggctgtgtgactaagatatatggaagagctttcgttgctggtgttttgccatttaaagtagcaaaagatatggcagcggcagcagttagatgcatcagaaaggagatccgggatttgtatgttaacatccagcctgttcaagaacctaaagaccaagcatttggcaatggaaatggaataataattattgctgagacctccactggctgtttgtttgctggatcatcgcttggtaaacgaggtgtaaatgcagacaaagttggaattgaagctgccgaaatgctattagcaaatcttagacatggtggtactgtggatgagtatctgcaagaccagctgattgttttcatggcattagccaatggagtttccagaataaaaacaggaccagttacactccatacgcaaaccgcgatacattttgctgaacaaatagcaaaggctaaatttattgtgaagaaatcagaagatgaagaagacgccgctaaagatacttatattattgaatgccaaggaattgggatgacaaatccaaatctatagagtatttgcctcttaaatgatacctcattgatatattgcactatttcataaatactataaaataatgactaggaagtaacttattaaaggctatgacttaaatttgaagatgaagtacagtgttctaggtttgctgagaaggcttcattaaattaatctcactttgaatatctcctgagagatggacaatgaaatatcagttggtggatatgtgtgatagctgatttcaatattgaagtattgaaataaaatattctttacacctgaagtaaatacatttttcttttttatgtaattaattaaatcagggatatagatttgatctgtaatttgggtataattctaatctttgctgaaatcacatctcaagtataatgaggcaactttatgcaaatgtacttgttgtgacaacaataacattttccttttttttttttttttttgagacagtctcgttctgtcacccaggctggggtgctgtggtgtgatcttggctcactgcaacctctgcctcccgggttcaagcaattctactgcctcagcttcctgagtagttggtattacaccaccatgcccagctaatttttgtatttttagtagagacagggtttcaccatattggtcaggctggtttcgaactcctgacctcgtgatctgcccgcctcggcctcccaaagtggtgggattacaggcgtgagccagtgcacccggcaacaataacatttaataggcattgtctcattctaatgatatataccttctacctagtgggcactttgtacatatttattttttattttatttattcattttttttgagacagagtctcactctgtcaccaagttggagtgcagtggcacaatctcagctcactgcaacctccgccttccaggttgaagtgattctccagcctcagcctcccgagtagctgggactccaggcacgtaccaccatacccagataatttttgcatttttagtagagacggggtttcaccatgttggctaggatggtctccatctcctgacctcgtgatccgcccaccttggcctcccaaagtgctgggattacaggcatgagccaccacagctggtcgtaaatattttttgaatttgaatctgttttggaagccaaatatgttttggaagccaaacaattaagagaagtaaaattttaaccctagtaggtttcgcagattcatccccagatatgtttttgtttggcttgtgttattaacaaataaatgagtgtctttcaaatggaa

SEQ ID NO: 177613 - DNA, 1884 bp, Homo sapiens
  Payload ID: 14854
  Gene Symbol: RBM3
  Gene Name: RNA binding motif (RNP1, RRM) protein 3
  ENST ID: ENST00000354480
  CDS Start-End: 288-755
tggttgacctgccttgggcttaggtagtagagtctgcagacctgtgggcctggcccggagaggacctcgtgagtcttctgacatggactctgaagcctcaaaccaagagaggtgtctgtctagccctgatagtcgggcagcttagaggagtggggaggagaactcagcctgagttcagtcaagatgtaagtagtagcaaggggaacatggtgcattcaggtcattttgtgtgggattctatagctcctgatgaagccattctggggtaaaggagcttattctggaacatggcacccagaacctggtgcccagcaggaatttttggcctcttttgcccacttacccttgcctgctcttccctcaccattgccctgactgactgccaacccatcatccttgtgtctcccacacttagtctctggatggtcgtcagatccgtgtggatcatgcaggcaagtctgctcggggaaccagaggaggtggctttggggcccatgggcgtggtcgcagctactctagaggtggtggggaccagggctatgggagtggcaggtattatgacagtcgacctggagggtatggatatggatatggacgttccagagactataatggcagaaaccagggtggttatgaccgctactcaggaggaaattacagagacaattatgacaactgaaatgagacatgcacataatataggtgagacttggatatcggcattgagtgaacctgtttgtcacactctgtcatgaccctctcaccttttctggcaagactgctctgcatttctgctgccctcatacctcacccagccaacctaccaaacattcctagctaggccttccttgctctcaggtgcatatcagagcaagtttgctagggggtgggatctgaaaacccatctcctataatcttctactcttgtgtgggatggaggaaatgaaggtgtgtccctgttgtccaaccctcagcatcttcatcagctctaggaggtgagcatgttgtcagctgttacttcatgacatcacaattctccccctcttgctgttcccagatacacaaggaataatttctgatccaggatcgtccttccaaatggctgtatttataaaggtttttggagctgcaccgaagcatcttattttatagtatatcaaccttttgtttttaaattgacctgccaaggtagctgaagaccttttagacagttccatctttttttttaaattttttctgcctatttaaagacaaattatgggacgtttgtagaacctgagtatttttctttttaccagttttttagtttgagctcttaggtttattggagctagcaataattggttctggcaagtttggccagactgacttcaaaaaattaatgtgtatccagggacattttaaaaacctgtacacagtgtttattgtggttaggaagcaatttcccaatgtacctataagaaatgtgcatcaagccagcctgaccaacatggtgaaaccccatctgtactaaacataaaaaaattagcctggcatggtggtgtacgcctgtaatcccagtgacttgggaggctgaggcaggagaatcgcttgaacccgggaggcggaggttgcagtgagctaagatcgcgccactgtactccagcctgggcaacagcgagactccatctcaaaaaaaaaggaaatgtgtatcaagaacatgattatccagcggtattttctaattcagatcatcaaactgattatatagaagagttggctttaaaatgtttgcaaatgtctttttttttttaatactggaagaaaaaatattctgttgtgtctcatacagtgcttaggatgtctttcacagagcttattaaaaagatgaaacctgagaacaaa

SEQ ID NO: 177614 - DNA, 1130 bp, Homo sapiens
  Payload ID: 14854
  Gene Symbol: RBM3
  Gene Name: RNA binding motif (RNP1, RRM) protein 3
  Uniprot ID: P98179
  ENST ID: ENST00000376755
  CDS Start-End: 230-703
atgcgcaatgtggccccctaatggtggctgcgctgagccagctcctcagattaccaccttattggccgcctttctcagcttttctgtagttacccatattttgttcctctttcttgtctattttctgtgctttttctctgctttccgtctcgctattttctcacatctccattttctttctccttcctgccaccattcttcatgttcttcccacaggacttgaactgccatgtcctctgaagaaggaaagctcttcgtgggagggctcaactttaacaccgacgagcaggcactggaagaccacttcagcagtttcggacctatctctgaggtggtcgttgtcaaggaccgggagactcagcggtccaggggttttggtttcatcaccttcaccaacccagagcatgcttcagttgccatgagagccatgaacggagagtctctggatggtcgtcagatccgtgtggatcatgcaggcaagtctgctcggggaaccagaggaggtggctttggggcccatgggcgtggtcgcagctactctagaggtggtggggaccagggctatgggagtggcaggtattatgacagtcgacctggagggtatggatatggatatggacgttccagagactataatggcagaaaccagggtggttatgaccgctactcaggaggaaattacagagacaattatgacaactgaaatgagacatgcacataatatagatacacaaggaataatttctgatccaggatcgtccttccaaatggctgtatttataaaggtttttggagctgcaccgaagcatcttattttatagtatatcaaccttttgtttttaaattgacctgccaaggtagctgaagaccttttagacagttccatctttttttttaaattttttctgcctatttaaagacaaattatgggacgtttgtagaacctgagtatttttctttttaccagttttttagtttgagctcttaggtttattggagctagcaataattggttctggcaagtttggccagactgacttcaaaaaattaatgtgtatccagggacattttaaaaacctgtacacagtgtttattgtggttaggaagcaatttcccaatgtacctataag
